United States Patent Application Publication US 2017/0114356 A1 - sequence listing, part 4

SEQ ID NO: 3882 - DNA, 2172 bp, Zea Mays
ccgcccctcgcgccagctgagctttacagtctcaccctcccgcggtttgctccttctttgcgcgatctaacggcggtgtcctttggctgtgattgaagggctcacgggggtgccgaactcggtgcactcgtacgacgtggagacgcgcaggtggacgaggttacatcctgctggagacctccgtctccgagggctgcgcatgctgcagctgcagtgggcaccatggttgttttccatgtactagggacttgggatcttcaaattccatttccgcgccaacttttttcagttgcgatttataaaatggcgacgcagggtggaattggaccagcagggcactccatagacgatctctatgtccttgacctcacaaacgacaagtttaaatggcacatgttagggttgttgttcaaggggcagggcctggtcctcgctatggtcactgcatggatttggcagctcaacggtatcttgttactgtatcaggaaatgacggacaatccagttgagaattacagccaggttaacaagatttttaatgtggattctcaaccatgtacgtgcaaaaccttttggaagtctcatgatgttccagttagggttaagaattcatacaaccctaaagctccaggcacccttattaccagacaaagggacatggataaggttgtactaactagcatagtgctcaagtcaaatgtcaatatgttggacattttgagcactcggatgcttggtcagtatggttttcctggcaagggactgatggaattcttggagcaaaggagcagcgcacgatcacctccaaagaaagacccatgctgcttctacaaggagctgtacaaagattttggatgagatgatggataatggttttccactcacaactgagccaaacatcttgaaagagatgatcaccccacctaatattgtgaacaaaatgttgaatgttgttactagcaagagttctacccttggcagcaaacttccagatgcagctgcttcttttgtaccttggcgaagaacaacggtcaaggatgcaagcaatgaagtctatgttaacatagtcgaggaacttgatgcatgtgtgaacagagagggggttcttgtgaaatgcgaagcatacggtgaagtccaagtaaattacagcctcccaggtgtgccagagctgaccatgtcctttgctaacactgcaattatcaatgatgttaccttccacccctgcgtctgattcaggccttgggaatcaaatcagatcctatcatttgttcctgccgacgggcagttcaagctcatgagttataggtactcatttgtgcgctagcttttcttctgtacacactcagcacgctcacgtttgatcaaacaagcaatgttcagaaactgaagaagacaccgatctatgtgaaaccacaattaacatcagattccgggaactgccgcgttagtgtgatggtcgggattcgaaatgatcgtgggaaacctattgattcgataacagtgcagttccagttgccccctcttattgtttctgttgatctgactgcaaactatggcacggttgacatccttgccgacaagacctgtttgtggacaattgggcagataccaaaagacaaagcaccaacactctctagaaatttacgactggaggaagggctcgcacaactgcatgcattgccgacatttcaggcgaaattcaggattatgagagttgccctatctggccttcaaatcgataagctagacgtgaagaaacaccccgaacgctccgtacaaaggttttagagcccagactcaagctgggaagtatgaggtcagatcgtaggtgcttgcaggggggcagttgttagttcattcttgtagaaaacaaatgatgttgcggacctagctcatggcctgttaacacattgttatggtcatcagttgagggttcacgaccagctgcatttgggtcgttgcatttgatgggaggtgccattgttctttgttcaggtcaataggtgtcttgtacctgaatcagattatcctctgtggtgtgaaagcaacagaatactgcgaccctaggcctatctagatcaaggttttggattctggcaccttgtgttataaaattcacttgagtatagaatctctattttttgttgtaagaaaaaaatctctttttgttag

SEQ ID NO: 3883 - DNA, 2300 bp, Zea Mays
ggcaaactattatccaacaatttttggatgaacacaatggaatgatctacaacagttaaattgattgactactatgtacaacagaatattctgtattttttatgttaacgtacacaaaactactgtgtacgcattcatgttcattttagtccaccggtgagagactgcgttgtcggcccatcaagcaccgtggagacatcgtcccatcggcgagggcgcaggaaccctgaaaggcaaattgttcaaattcacaatatccggtgctgtcattctttcttttaactcgtcttctgctggtgatgttaccaaactgctaaaaaacgctttggctgcatttgcggatctagagggtggacaggatgggcccaccctctgatttcgatcctgctaaaagtatatagatgattttgatgggcccaccctctgattcatttttgtcactaatgaatctttgtacaaattatattttgaatgctcaagaaaagagttctggaactaaacaatggtacaggatattcatccttattgcacttgtatagtgtgtgcaggctgcttctcagtgataaaacgaatctttcagttgcatacttctcataaacgaaagattatgttcagtagataaacatttgttccctttttaccttttaaagctatatttattgttgcttggcatttgctttactaaccatcccaagaaaagagttatggaactaaacaacggtacatgatattcatccatattgcacgtgtatagtgtgagcaggctgcttctcagtgaataaacgaatctttcagttgcatacttctcaaaaacgaaagatcatgttcagtagataaacatatgtttcctttttaccttttaaagctatattgattgtttcttggcatttgctttactaaccatcatgaattgaacatatagctcatgatgttccagttagggttaagaattcatacaaccctaaagctccaggcacccttattaccagacaaagggacatggataaggttgtactaactagcatagtgctcaagtcaaatgtcaatatgttggacattttgagcactcggatgcttggtcagtatggttttcctggcaagggactgatggaattcttggagcaaaggagcagcgcacgatcacctccaaagaaagacccatgctgcttctacaaggagctgtacaaagattttggatgagatgatggataatggttttccactcacaactgagccaaacatcttgaaagagatgatcaccccacctaatattgtgaacaaaatgttgaatgttgttactagcaagagttctacccttggcagcaaacttccagatgcagctgcttcttttgtaccttggcgaagaacaacggtcaaggatgcaagcaatgaagtctatgttaacatagtcgaggaacttgatgcatgtgtgaacagagagggggttcttgtgaaatgcgaagcatacggtgaagtccaagtaaattacagcctcccaggtgtgccagagctgaccatgtcctttgctaacactgcaattatcaatgatgttaccttccacccctgcgtctgattcaggccttgggaatcaaatcagatcctatcatttgttcctgccgacgggcagttcaagctcatgagttataggtactcatttgtgcgctagcttttcttctgtacacactcagcacgctcacgtttgatcaaacaagcaatgttcagaaactgaagaagacaccgatctatgtgaaaccacaattaacatcagattccgggaactgccgcgttagtgtgatggtcgggattcgaaatgatcgtgggaaacctattgattcgataacagtgcagttccagttgccccctcttattgtttctgttgatctgactgcaaactatggcacggttgacatccttgccgacaagacctgtttgtggacaattgggcagataccaaaagacaaagcaccaacactctctagaaatttacgactggaggaagggctcgcacaactgcatgcattgccgacatttcaggcgaaattcaggattatgagagttgccctatctggccttcaaatcgataagctagacgtgaagaaacaccccgaacgctccgtacaaaggtcaataggtgtcttgtacctgaatcagattatcctctgtggtgtgaaagcaacagaatactgcgaccctaggcctatctagatcaaggttttggattctggcaccttgtgttataaaattcacttgagtatagaatctctattttttgttgtaagaaaaaaatctctttttgttag

SEQ ID NO: 3884 - DNA, 1272 bp, Zea Mays
gtgaccatgcacttgtctatattattcattttaataaatttcttcaggattttgtgataaatttaaaagatcaaggcaggccattgatctactgttggatttgttgagtctgttataaatttcctaatctgcatgctgcaatcaagttttgctgcttgctaagcggttgccacttgccagtgcatgtattctgaaatttctctaattctatagtgcttaacgactgcagattttggatgagatgatggataatggttttccactcacaactgagccaaacatcttgaaagagatgatcaccccacctaatattgtgaacaaaatgttgaatgttgttactagcaagagttctacccttggcagcaaacttccagatgcagctgcttcttttgtaccttggcgaagaacaacggtcaaggatgcaagcaatgaagtctatgttaacatagtcgaggaacttgatgcatgtgtgaacagagagggggttcttgtgaaatgcgaagcatacggtgaagtccaagtaaattacagcctcccaggtgtgccagagctgaccatgtcctttgctaacactgcaattatcaatgatgttaccttccacccctgcgtctgattcaggccttgggaatcaaatcagatcctatcatttgttcctgccgacgggcagttcaagctcatgagttatagtgttcagaaactgaagaagacaccgatctatgtgaaaccacaattaacatcagattccgggaactgccgcgttagtgtgatggtcgggattcgaaatgatcgtgggaaacctattgattcgataacagtgcagttccagttgccccctcttattgtttctgttgatctgactgcaaactatggcacggttgacatccttgccgacaagacctgtttgtggacaattgggcagataccaaaagacaaagcaccaacactctctagaaatttacgactggaggaagggctcgcacaactgcatgcattgccgacatttcaggcgaaattcaggattatgagagttgccctatctggccttcaaatcgataagctagacgtgaagaaacaccccgaacgctccgtacaaaggtcaataggtgtcttgtacctgaatcagattatcctctgtggtgtgaaagcaacagaatactgcgaccctaggcctatctagatcaaggttttggattctggcaccttgtgttataaaattcacttgagtatagaatctctattttttgttgtaagaaaaaaatctctttttgttag

SEQ ID NO: 3885 - DNA, 1082 bp, Zea Mays
gtgaccatgcacttgtctatattattcattttaataaatttcttcaggattttgtgataaatttaaaagatcaaggcaggccattgatctactgttggatttgttgagtctgttataaatttcctaatctgcatgctgcaatcaagttttgctgcttgctaagcggttgccacttgccagtgcatgtattctgaaatttctctaattctatagtgcttaacgactgcagattttggatgagatgatggataatggttttccactcacaactgagccaaacatcttgaaagagatgatcaccccacctaatattgtgaacaaaatgttgaatgttgttactagcaagagttctacccttggcagcaaacttccagatgcagctgcttcttttgtaccttggcgaagaacaacggtcaaggatgcaagcaatgaagtctatgttaacatagtcgaggaacttgatgcatgtgtgaacagagagggggttcttgtgaaatgcgaagcatacggtgaagtccaagtaaattacagcctcccaggccttgggaatcaaatcagatcctatcatttgttcctgccgacgggcagttcaagctcatgagttatagtgttcagaaactgaagaagacaccgatctatgtgaaaccacaattaacatcagattccgggaactgccgcgttagtgtgatggtcgggattcgaaatgatcgtgggaaacctattgattcgataacagtgcagttccagttgccccctcttattgtttctgttgatctgactgcaaactatggcacggttgacatccttgccgacaaggcgaaattcaggattatgagagttgccctatctggccttcaaatcgataagctagacgtgaagaaacaccccgaacgctccgtacaaaggtcaataggtgtcttgtacctgaatcagattatcctctgtggtgtgaaagcaacagaatactgcgaccctaggcctatctagatcaaggttttggattctggcaccttgtgttataaaattcacttgagtatagaatctctattttttgttgtaagaaaaaaatctctttttgttag

SEQ ID NO: 3886 - DNA, 428 bp, Zea Mays
tcacgcgactgctcgtgatcttctgacctcgtcgaccctgttgattcgctacttcgacatcgtcaaccctgctgattccggcgcgcgccaacaatcacattcactgcaaggataggacgacaggatcagaatacatcatatggagggctgatacatatgtagacttgccagatctttctgcacatcttactacgttttatgcatggtaacagctagtttcaaagaagaacaccagcaaagtatcatgctatattttgctcttttattagtttatagtcatttttgtatgcatatttgatttttgtaccatattttcctttttactgtgtagtggtaaccatcaacagaaactgatggttgagctacgacttatgtaagaagtaagatgttttgtgtaaccctttatgtttagtaatttcatctcaaca

SEQ ID NO: 3887 - DNA, 2071 bp, Zea Mays
gttggcatgggaacggatatgaagaataaacagcacatttccatacaaaatgtgcccaagttaaagttctgaatcggaatgattcagcagtacgttctcggtgctccagtactctaccatagcactgcttgctacaaaaggcacggcaagaccaaaagcaaagcgcagttttttttaaaaaaaaaagatgcgtaagagattcttgaggcatcaaaactactccaacatatctcaccaccaatataccatgcaagctaataggtaaacactatctttgacagttttacagacacagcagacgctgatgcattcttgcgaagggcgctcgcaagttacaagtgctacagcgcacttgcaaaattcgcaagattgcatttgcggaccacaattgtcgcaggtaacaatgcctgattgctctctgataatattgaaccaaaaccgcttacttcgggtagtaaatcgattggccagctggtggtgcgtgcggcggagcaccagggggcatgctatactgtgtcatctgctgcgaagcctgaaatgctactggtggggcaccggaactcgatccaatagcaggatagtgaggcatggagttggccattaatggttggttggggtatgcagtcgatgcagatgcaaaactccctgcctgcatgttaggattccaagcagccacctgtccaactccaataggagttgaagtcgctgtgcttgcataaaaaggagcagctggtactgatgcagtgttctgccatgccactcccggagaccttagaactggcgtttgtgcagcagcttgcagctgcacgttagggtctgaaagagtgtagtccctgcttctctcatcatgtgctttgtcaatttgcatgaacaataggtattctttttttactaattgagcagaattcgttattcattagtcctgaacagtatatacttaaattatttgctaatttacacagcccaaaactactatttatacctttacattgagatcagtatgacgagagtatgacagatgaagcttacagtaaccaccatcatatatgcagtgtccctccaaagcttgtttagcaacggctgcggtagttatatctaaaaaaagattttgttagtcagatgaacctatgtatttgtacatcaaatattaatgatatatttccatggctaagggggaaacagaactagcaattccacttgaccataaagaataaattttaagatactctggattccagggtcataatgtgataagtgtgggtgcaaaggtatttagagattcttgtttcatcaaagcagttcaattacaactaccactaaccagtacaaacagtattgagcaccaacaagattgatgtcatttgaattgccatacttttcaaagatatttatttcaataagctagataaggcccacaaattagatgtcaaaatgttttttcaacagaagaaccaatgatatagaggtgctgactatattctaatgcccaacacattaaacaggtaaaggtacctaaattaggactcgcatgtcacaagggaagttcaatgatgacaaaatgaaagtttaaagcaagcctctagtaagaaagagagtattactaaaaacaactttatagctgtggaaagttgcagatgtccattttaagccttcacgaactccgacacctctctgctgaagttcccaaacttagaaacttatgatgcaaaaagggagagaataacagtgtggcaggttcactcataaatggtgagagggagggaggatgggaggaagagggtgagagctggaggatataaatcaagaacatagagcataaacatggtacattctgaaccaagtcttaaaagaagaactacagacttcaatactttcaaacagtgggagcaagacataaagtgtgctcaactgtgtaggcaagttacggtgacatgccaatgcaataaattgtcgatgtatcacagtgcaccaaggtcaagagcatatcctgttgggtgcattggtgagcacatacctggatattggattagagcctgcattccaccattcttctcaaacattgcaatttttt

SEQ ID NO: 3888 - DNA, 2160 bp, Zea Mays
gttggcatgggaacggatatgaagaataaacagcacatttccatacaaaatgtgcccaagttaaagttctgaatcggaatgattcagcagtacgttctcggtgctccagtactctaccatagcactgcttgctacaaaaggcacggcaagaccaaaagcaaagcgcagttttttttaaaaaaaaaagatgcgtaagagattcttgaggcatcaaaactactccaacatatctcaccaccaatataccatgcaagctaataggtaaacactatctttgacagttttacagacacagcagacgctgatgcattcttgcgaagggcgctcgcaagttacaagtgctacagcgcacttgcaaaattcgcaagattgcatttgcggaccacaattgtcgcaggtaacaatgcctgattgctctctgataatattgaaccaaaaccgcttacttcgggtagtaaatcgattggccagctggtggtgcgtgcggcggagcaccagggggcatgctatactgtgtcatctgctgcgaagcctgaaatgctactggtggggcaccggaactcgatccaatagcaggatagtgaggcatggagttggccattaatggttggttggggtatgcagtcgatgcagatgcaaaactccctgcctgcatgttaggattccaagcagccacctgtccaactccaataggagttgaagtcgctgtgcttgcataaaaaggagcagctggtactgatgcagtgttctgccatgccactcccggagaccttagaactggcgtttgtgcagcagcttgcagctgcacgttagggtctgaaagagtgtagtccctgcttctctcatcatgtgcctgaatgcaagcaaataggtagccaattagaataaggcaaaagcaggcagtactaaggggtaacaaaaaaagatgttcagaaagcgtactttgtcaatttgcatgaacaataggtattctttttttactaattgagcagaattcgttattcattagtcctgaacagtatatacttaaattatttgctaatttacacagcccaaaactactatttatacctttacattgagatcagtatgacgagagtatgacagatgaagcttacagtaaccaccatcatatatgcagtgtccctccaaagcttgtttagcaacggctgcggtagttatatctaaaaaaagattttgttagtcagatgaacctatgtatttgtacatcaaatattaatgatatatttccatggctaagggggaaacagaactagcaattccacttgaccataaagaataaattttaagatactctggattccagggtcataatgtgataagtgtgggtgcaaaggtatttagagattcttgtttcatcaaagcagttcaattacaactaccactaaccagtacaaacagtattgagcaccaacaagattgatgtcatttgaattgccatacttttcaaagatatttatttcaataagctagataaggcccacaaattagatgtcaaaatgttttttcaacagaagaaccaatgatatagaggtgctgactatattctaatgcccaacacattaaacaggtaaaggtacctaaattaggactcgcatgtcacaagggaagttcaatgatgacaaaatgaaagtttaaagcaagcctctagtaagaaagagagtattactaaaaacaactttatagctgtggaaagttgcagatgtccattttaagccttcacgaactccgacacctctctgctgaagttcccaaacttagaaacttatgatgcaaaaagggagagaataacagtgtggcaggttcactcataaatggtgagagggagggaggatgggaggaagagggtgagagctggaggatataaatcaagaacatagagcataaacatggtacattctgaaccaagtcttaaaagaagaactacagacttcaatactttcaaacagtgggagcaagacataaagtgtgctcaactgtgtaggcaagttacggtgacatgccaatgcaataaattgtcgatgtatcacagtgcaccaaggtcaagagcatatcctgttgggtgcattggtgagcacatacctggatattggattagagcctgcattccaccattcttctcaaacattgcaatttttt

SEQ ID NO: 3889 - DNA, 567 bp, Zea Mays
acgggtaaattcaggtacccacccgtcaccactacggcactacccttcagccccagatttctccaagcctccgggacgaggcgcatccgtccatgggggccaaggcggcacaccggcgtggggtgctggacctggaggcgcagttcgccttcttccggtcgcagcaccggcaccccgtgaacgcggcggcgcacgtgctgctcacctggcccatcctcttcaccaacctcttgatcctccacttcctgccgctgccgctgcccgtctcccccgcgctggccctcgcgctcgcatacgccgccgcctacctcgctgtcgaccgcagagccggcgcagtcgcggggctgctcttcctcgccgcatgggccgccagccgcgccctcgcggcccgcctcggcttcgctctctcctggaagcttgtcctcgtcacgcagctcttctgctggacctggcagttcctcggccacggcctcttcgagaagaaggggccgagtgttagtgatcttcctgaggtgttcttgatggagccgttcctcatcttcctgcagcctccgctggttcttcgtg

SEQ ID NO: 3890 - DNA, 1247 bp, Zea Mays
acgggtaaattcaggtacccacccgtcaccactacggcactacccttcagccccagatttctccaagcctccgggacgaggcgcatccgtccatgggggccaaggcggcacaccggcgtggggtgctggacctggaggcgcagttcgccttcttccggtcgcagcaccggcaccccgtgaacgcggcggcgcacgtgctgctcacctggcccatcctcttcaccaacctcttgatcctccacttcctgccgctgccgctgcccgtctcccccgcgctggccctcgcgctcgcatacgccgccgcctacctcgctgtcgaccgcagagccggcgcagtcgcggggctgctcttcctcgccgcatgggccgccagccgcgccctcgcggcccgcctcggcttcgctctctcctggaagcttgtcctcgtcacgcagctcttctgctggacctggcagttcctcggccacggcctcttcgagaagaaggggccgagtgttagtgatcttcctgaggtgttcttgatggagccgttcctcatcttcctgcaggtaaccacaggcacagctgacaaacatatactgaacaaactgttcggctatgagccgtatcctgggttctgcaagaacgtggacaggaagatcgaagccgatctcagggcgagcgagagctcaagcagaggaaggacaacctgattgattgggaattcgggagtgatcctccggagcggtgcgcgaaattgtaccatctatacatgtagcatattgcctgccatttgtgttgttttattcaggtatatgatatctgcgcaccattatatagtgtagtaaacatcagtcatgtgtgttgaagtcagcttgaatcccgggaggaaggtagagagcggtaataatctcctcgtttactgccctataatttgctatgtttaaattactatgtttaagatgaactaaattttacatgatccaccccccttcatagaaaggggaggatgagtgtcaacacaaccaaacgacatttgggttatcatcggtagcatatctcttatcctagctaatctcttatggtccaacatattagccatcacaaatttaagattcttaatcctctttatccaagataccagcaaatcacagatcgccagaaatccttcgctccagaagatcgcaaaatccacacatctgtccatcggagacatgggagattgaacaggcagcggatgttctcttttctagtaaattgctcgccct

SEQ ID NO: 3891 - DNA, 1784 bp, Zea Mays
atggcagagggcgtggtggcgggggtcgcggctcccatggccgtggctcgggccgtggcaggggaccgcaggctagaacagtgtctcggcgaggacaaggtgaagattctggagcaggcgttcatggaggcagcagataatgtgctgccacatccaatggaggatgcttacctcgaggcttgtcacacaaacaacatggaatggaaaatgtgcatatatggtgctgattgcagtgagattagcctcgtccaagttaagggatctggtatgttaaaggattctgcctgccatgaactagacaagattagaagtttaaagaggccttacatcaagagagtacaagatcgccataaggaaacagtaaattgtctcaaacgcaacgctattgaaatggagggatacattcgccctcttgacgtagtaataattgtgtcgcagtatataccttgctctgatgaccagcattctgatggtgttgcagatgatcatcccaacgattccttattctctccaacataccatcatcacaaggtggtgtctgttttttattcaacaggaggtctacatggtggtgtctataggtctcgatgtcaagcctggttccactgttaagtgtgagcctggatatggttttatgctgcacctttcccaggctgctcttggggaatcgaagaagagtgataatgcgctattgccttgatgtatgtcaaaattgatgatcagaaacttgccattggaaccctctctgttgacaagaacccacacatacaatttgatctggttttcgataaagagtttgagctgtcgcacacatcaaaaactaccatcgtcttcttcactggctacaaggttgagcaaccattcaaggaagatggaatggatcttgattctgaagatgaagacgagaagctgaatgttccagtagtcaaggaaaatggcaaagctggtgggaagatacagaaaagtcaagaaaaggcagttccttgaatttttcaaaaagaaagatttttacagatatttttaataatgacctcggtggaccctatgcatttcttgagccactttttgttcaaagaccccttctatataagatacaggcaaggagagaaaagaggattcagataactgtatcactttctgcaatagtactactgaagcacggagcgaaccgcacaggctaagcccgcacggagcgaaccacacgggaaaagctgatgggaagaaacagaaaagtcaagaaaaggctgttcctgcagcttcaaaatcaagtccggcttccaagaagagcaaggatgacgatgattctgatgagggcgagactgatgattctaacgaggacgagacagacgattctgatgagggtgagggtttgtctcctgaagaaggcgatgatgatgattcaagtgatgaagatgataccagtgacgatgaggaggaagacacttcaactcctaagaagcatgaggtaggcaagaagagagctgctgaaagttccatgctgaaaactcctctatctgataagaaagcaaaagttgccacaccgtcagctcagaagataggtgtgccattgaacggattaacaaaactgtcgtcgaagattgtataggtgtgactctgttcaaggatagtcttgaggttctagaacagaagagtagtggtgtgcatcagtgtatctgtttacaggataatagtggttggttaggtgtgtgcagaaaaagtttagtgttatggtttgtatgtgatacatattaactgtgccttggaatgttcatgtgttgtcctga

SEQ ID NO: 3892 - DNA, 1954 bp, Zea Mays
atggcagagggcgtggtggcgggggtcgcggctcccatggccgtggctcgggccgtggcaggggaccgcaggctagaacagtgtctcggcgaggacaaggtgaagattctggagcaggcgttcatggaggcagcagataatgtgctgccacatccaatggaggatgcttacctcgaggcttgtcacacaaacaacatggaatggaaaatgtgcatatatggtgctgattgcagtgagattagcctcgtccaagttaagggatctggtatgttaaaggattctgcctgccatgaactagacaagattagaagtttaaagaggccttacatcaagagagtacaagatcgccataaggaaacagtaaattgtctcaaacgcaacgctattgaaatggagggatacattcgccctcttgacgtagtaataattgtgtcgcagtatataccttgctctgatgaccagcattctgatggtgttgcagatgatcatcccaacgattccttattctctccaacataccatcatcacaaggaggtctacatggtggtgtctataggtctcgatgtcaagcctggttccactgttaagtgtgagcctggatatggttttatgctgcacctttcccagaaacttgccattggaaccctctctgttgacaagaacccacacatacaatttgatctggttttcgataaagagtttgagctgtcgcacacatcaaaaactaccatcgtcttcttcactggctacaaggttgagcaaccattcaaggaagatggaatggatcttgattctgaagatgaagacgagaagctgaatgttccagtagtcaaggaaaatggcaaagctggtgggaagatacagaaaagtcaagaaaaggcagttccttgaatttttcaaaaagaaagatttttacagatatttttaataatgacctcggtggaccctatgcatttcttgagccactttttgttcaaagaccccttctatataagatacaggcaaggagagaaaagaggattcagataactgtatcactttctgcaagtacaaatacacaagcacagaatatctttcccctttatgtactttttagctagacctaccagtaatatttcgcttgagggcattctccgatatatcgagcgggatgatgcttggtggacgtgtacatactaatattaatcggtctcgaagcttccaatacactcagttctcacatgaacgagtgggatggacctccctagaaaccaaacacccctgaatcgcagtcatcatcagcgaacgacaatccgtgtgctgttgcgatgtagtagtactactgaagcacggagcgaaccgcacaggctaagcccgcacggagcgaaccacacgggaaaagctgatgggaagaaacagaaaagtcaagaaaaggctgttcctgcagcttcaaaatcaagtccggcttccaagaagagcaaggatgacgatgattctgatgagggcgagactgatgattctaacgaggacgagacagacgattctgatgagggtgagggtttgtctcctgaagaaggcgatgatgatgattcaagtgatgaagatgataccagtgacgatgaggaggaagacacttcaactcctaagaagcatgaggtaggcaagaagagagctgctgaaagttccatgctgaaaactcctctatctgataagaaagcaaaagttgccacaccgtcagctcagaagataggtgtgccattgaacggattaacaaaactgtcgtcgaagattgtataggtgtgactctgttcaaggatagtcttgaggttctagaacagaagagtagtggtgtgcatcagtgtatctgtttacaggataatagtggttggttaggtgtgtgcagaaaaagtttagtgttatggtttgtatgtgatacatattaactgtgccttggaatgttcatgtgttgtcctga

SEQ ID NO: 3893 - DNA, 2015 bp, Zea Mays
atggcagagggcgtggtggcgggggtcgcggctcccatggccgtggctcgggccgtggcaggggaccgcaggctagaacagtgtctcggcgaggacaaggtgaagattctggagcaggcgttcatggaggcagcagataatgtgctgccacatccaatggaggatgcttacctcgaggcttgtcacacaaacaacatggaatggaaaatgtgcatatatggtgctgattgcagtgagattagcctcgtccaagttaagggatctggtatgttaaaggattctgcctgccatgaactagacaagattagaagtttaaagaggccttacatcaagagagtacaagatcgccataaggaaacagtaaattgtctcaaacgcaacgctattgaaatggagggatacattcgccctcttgacgtagtaataattgtgtcgcagtatataccttgctctgatgaccagcattctgatggtgttgcagatgatcatcccaacgattccttattctctccaacataccatcatcacaaggaggtctacatggtggtgtctataggtctcgatgtcaagcctggttccactgttaagtgtgagcctggatatggttttatgctgcacctttcccaggctgctcttggggaatcgaagaagagtgataatgcgctattgccttgatgtatgtcaaaattgatgatcagaaacttgccattggaaccctctctgttgacaagaacccacacatacaatttgatctggttttcgataaagagtttgagctgtcgcacacatcaaaaactaccatcgtcttcttcactggctacaaggttgagcaaccattcaaggaagatggaatggatcttgattctgaagatgaagacgagaagctgaatgttccagtagtcaaggaaaatggcaaagctggtgggaagatacagaaaagtcaagaaaaggcagttccttgaatttttcaaaaagaaagatatttttaataatgacctcggtggaccctatgcatttcttgagccactttttgttcaaagaccccttctatataagatacaggcaaggagagaaaagaggattcagataactgtatcactttctgcaagtacaaatacacaagcacagaatatctttcccctttatgtactttttagctagacctaccagtaatatttcgcttgagggcattctccgatatatcgagcgggatgatgcttggtggacgtgtacatactaatattaatcggtctcgaagcttccaatacactcagttctcacatgaacgagtgggatggacctccctagaaaccaaacacccctgaatcgcagtcatcatcagcgaacgacaatccgtgtgctgttgcgatgtagtagtactactgaagcacggagcgaaccgcacaggctaagcccgcacggagcgaaccacacgggaaaagctgatgggaagaaacagaaaagtcaagaaaaggctgttcctgcagcttcaaaatcaagtccggcttccaagaagagcaaggatgacgatgattctgatgagggcgagactgatgattctaacgaggacgagacagacgattctgatgagggtgagggtttgtctcctgaagaaggcgatgatgatgattcaagtgatgaagatgataccagtgacgatgaggaggaagacacttcaactcctaagaagcatgaggtaggcaagaagagagctgctgaaagttccatgctgaaaactcctctatctgataagaaagcaaaagttgccacaccgtcagctcagaagataggtgtgccattgaacggattaacaaaactgtcgtcgaagattgtataggtgtgactctgttcaaggatagtcttgaggttctagaacagaagagtagtggtgtgcatcagtgtatctgtttacaggataatagtggttggttaggtgtgtgcagaaaaagtttagtgttatggtttgtatgtgatacatattaactgtgccttggaatgttcatgtgttgtcctga

SEQ ID NO: 3894 - DNA, 2040 bp, Zea Mays
atggcagagggcgtggtggcgggggtcgcggctcccatggccgtggctcgggccgtggcaggggaccgcaggctagaacagtgtctcggcgaggacaaggtgaagattctggagcaggcgttcatggaggcagcagataatgtgctgccacatccaatggaggatgcttacctcgaggcttgtcacacaaacaacatggaatggaaaatgtgcatatatggtgctgattgcagtgagattagcctcgtccaagttaagggatctggtatgttaaaggattctgcctgccatgaactagacaagattagaagtttaaagaggccttacatcaagagagtacaagatcgccataaggaaacagtaaattgtctcaaacgcaacgctattgaaatggagggatacattcgccctcttgacgtagtaataattgtgtcgcagtatataccttgctctgatgaccagcattctgatggtgttgcagatgatcatcccaacgattccttattctctccaacataccatcatcacaaggtggtgtctgttttttattcaacaggaggtctacatggtggtgtctataggtctcgatgtcaagcctggttccactgttaagtgtgagcctggatatggttttatgctgcacctttcccaggctgctcttggggaatcgaagaagagtgataatgcgctattgccttgatgtatgtcaaaattgatgatcagaaacttgccattggaaccctctctgttgacaagaacccacacatacaatttgatctggttttcgataaagagtttgagctgtcgcacacatcaaaaactaccatcgtcttcttcactggctacaaggttgagcaaccattcaaggaagatggaatggatcttgattctgaagatgaagacgagaagctgaatgttccagtagtcaaggaaaatggcaaagctggtgggaagatacagaaaagtcaagaaaaggcagttccttgaatttttcaaaaagaaagatatttttaataatgacctcggtggaccctatgcatttcttgagccactttttgttcaaagaccccttctatataagatacaggcaaggagagaaaagaggattcagataactgtatcactttctgcaagtacaaatacacaagcacagaatatctttcccctttatgtactttttagctagacctaccagtaatatttcgcttgagggcattctccgatatatcgagcgggatgatgcttggtggacgtgtacatactaatattaatcggtctcgaagcttccaatacactcagttctcacatgaacgagtgggatggacctccctagaaaccaaacacccctgaatcgcagtcatcatcagcgaacgacaatccgtgtgctgttgcgatgtagtagtactactgaagcacggagcgaaccgcacaggctaagcccgcacggagcgaaccacacgggaaaagctgatgggaagaaacagaaaagtcaagaaaaggctgttcctgcagcttcaaaatcaagtccggcttccaagaagagcaaggatgacgatgattctgatgagggcgagactgatgattctaacgaggacgagacagacgattctgatgagggtgagggtttgtctcctgaagaaggcgatgatgatgattcaagtgatgaagatgataccagtgacgatgaggaggaagacacttcaactcctaagaagcatgaggtaggcaagaagagagctgctgaaagttccatgctgaaaactcctctatctgataagaaagcaaaagttgccacaccgtcagctcagaagataggtgtgccattgaacggattaacaaaactgtcgtcgaagattgtataggtgtgactctgttcaaggatagtcttgaggttctagaacagaagagtagtggtgtgcatcagtgtatctgtttacaggataatagtggttggttaggtgtgtgcagaaaaagtttagtgttatggtttgtatgtgatacatattaactgtgccttggaatgttcatgtgttgtcctga

SEQ ID NO: 3895 - DNA, 1591 bp, Zea Mays
tgaaagtgaccttcatgatgatgaccagcattctgatggtgttgcagatgatcatcccaacgattccttattctctccaacataccatcatcacaaggaggtctacatggtggtgtctataggtctcgatgtcaagcctggttccactgttaagtgtgagcctggatatggttttatgctgcacctttcccaggctgctcttggggaatcgaagaagagtgataatgcgctattgccttgatgtatgtcaaaattgatgatcagaaacttgccattggaaccctctctgttgacaagaacccacacatacaatttgatctggttttcgataaagagtttgagctgtcgcacacatcaaaaactaccatcgtcttcttcactggctacaaggttgagcaaccattcaaggaagatggaatggatcttgattctgaagatgaagacgagaagctgaatgttccagtagtcaaggaaaatggcaaagctggtgggaagatacagaaaagtcaagaaaaggcagttccttgaatttttcaaaaagaaagatttttacagatatttttaataatgacctcggtggaccctatgcatttcttgagccactttttgttcaaagaccccttctatataagatacaggcaaggagagaaaagaggattcagataactgtatcactttctgcaagtacaaatacacaagcacagaatatctttcccctttatgtactttttagctagacctaccagtaatatttcgcttgagggcattctccgatatatcgagcgggatgatgcttggtggacgtgtacatactaatattaatcggtctcgaagcttccaatacactcagttctcacatgaacgagtgggatggacctccctagaaaccaaacacccctgaatcgcagtcatcatcagcgaacgacaatccgtgtgctgttgcgatgtagtagtactactgaagcacggagcgaaccgcacaggctaagcccgcacggagcgaaccacacgggaaaagctgatgggaagaaacagaaaagtcaagaaaaggctgttcctgcagcttcaaaatcaagtccggcttccaagaagagcaaggatgacgatgattctgatgagggcgagactgatgattctaacgaggacgagacagacgattctgatgagggtgagggtttgtctcctgaagaaggcgatgatgatgattcaagtgatgaagatgataccagtgacgatgaggaggaagacacttcaactcctaagaagcatgaggtaggcaagaagagagctgctgaaagttccatgctgaaaactcctctatctgataagaaagcaaaagttgccacaccgtcagctcagaagataggtgtgccattgaacggattaacaaaactgtcgtcgaagattgtataggtgtgactctgttcaaggatagtcttgaggttctagaacagaagagtagtggtgtgcatcagtgtatctgtttacaggataatagtggttggttaggtgtgtgcagaaaaagtttagtgttatggtttgtatgtgatacatattaactgtgccttggaatgttcatgtgttgtcctga

SEQ ID NO: 3896 - DNA, 2005 bp, Zea Mays
aaagatggaacaatcctttttagactaccagcaggcacaagaacttagctttggttctgaactttgttatttgcagcagcaagctcaagcagttatcttatgttctgaactttgttatgcacatgaaatttgttcatattttagtttgcaagttattttatttatttaccagttactttcacttgtctaagttgtattggctgtagcagttagcatgcatgagtgttgatatgaacattttaaagatggaacaatcctttttagactaccagcaggcacaagaacttagctttggttctgaactttgttatttgcagcagcaacctcaagcagttatcttatgttctaaaactttgttatgcacatgaaatttgttcatattttagtttgcaagttattttatttatttaccagttactttcacttgtctaagttgtattggctgtagcagttagcatgcatgagtgttgatatgaacagagtagttcaatactaggtggtgtctgttttttattcaacaggaggtctacatggtggtgtctataggtctcgatgtcaagcctggttccactgttaagtgtgagcctggatatggttttatgctgcacctttcccaggctgctcttggggaatcgaagaagagtgataatgcgctattgccttgatgtatgtcaaaattgatgatcagaaacttgccattggaaccctctctgttgacaagaacccacacatacaatttgatctggttttcgataaagagtttgagctgtcgcacacatcaaaaactaccatcgtcttcttcactggctacaaggttgagcaaccattcaaggaagatggaatggatcttgattctgaagatgaagacgagaagctgaatgttccagtagtcaaggaaaatggcaaagctggtgggaagatacagaaaagtcaagaaaaggcagttccttgaatttttcaaaaagaaagatatttttaataatgacctcggtggaccctatgcatttcttgagccactttttgttcaaagaccccttctatataagatacaggcaaggagagaaaagaggattcagataactgtatcactttctgcaagtacaaatacacaagcacagaatatctttcccctttatgtactttttagctagacctaccagtaatatttcgcttgagggcattctccgatatatcgagcgggatgatgcttggtggacgtgtacatactaatattaatcggtctcgaagcttccaatacactcagttctcacatgaacgagtgggatggacctccctagaaaccaaacacccctgaatcgcagtcatcatcagcgaacgacaatccgtgtgctgttgcgatgtagtagtactactgaagcacggagcgaaccgcacaggctaagcccgcacggagcgaaccacacgggaaaagctgatgggaagaaacagaaaagtcaagaaaaggctgttcctgcagcttcaaaatcaagtccggcttccaagaagagcaaggatgacgatgattctgatgagggcgagactgatgattctaacgaggacgagacagacgattctgatgagggtgagggtttgtctcctgaagaaggcgatgatgatgattcaagtgatgaagatgataccagtgacgatgaggaggaagacacttcaactcctaagaagcatgaggtaggcaagaagagagctgctgaaagttccatgctgaaaactcctctatctgataagaaagcaaaagttgccacaccgtcagctcagaagataggtgtgccattgaacggattaacaaaactgtcgtcgaagattgtataggtgtgactctgttcaaggatagtcttgaggttctagaacagaagagtagtggtgtgcatcagtgtatctgtttacaggataatagtggttggttaggtgtgtgcagaaaaagtttagtgttatggtttgtatgtgatacatattaactgtgccttggaatgttcatgtgttgtcctga

SEQ ID NO: 3897 - DNA, 1419 bp, Zea Mays
aacaccgattcgtttccccttggcacctggcgccctgtcgccttcgaaaaacagccgccgccgtcgcccgtcccggatccgacggcccccgctccttcgtctagtatttatactagtgccttgccggcgctgctcctgttgcctctcgcatttgcccacgcccgcagcgcctcgcctcggctgctctacctctatcccgcgacccgcgagatcggaatcgcggcgccccgccgccctcctccaaaatggcaccgtctctgctcggggggttcaccaagtcgttggccatgacggtgctctccgagatcggggacaagaccttcttcgccgccgcgattctggctatgcgccatcccaggaaactcgtattggcaggctgtttaactgcactaatagtcatgacagctctatcggcttctctaggttgggttgcaccaaatctgatttcacgtaaatggactcatcatttgaccactctattgttctttctatttggcatttggtcattgtgggaaggcttcaaggaagatgggtaccggatgctgcctttaagagtaataaaggtgaatctaaaaataaatttaaggcgaatgatgatatgaagaaacagcaaagaccatttctcatgcagttcttctcaccaatttttctgaaggcattttctattacattctttggtgagtggggtgacaagagccagattgctacaattggcttggctgctgatgaaaacccgttcggtgttgtcctgggtggaatcatagcgcaagcactctgcactactgctgccgttcttggtggaaagagcctagcgtcccagatatctgagaagatggttgaactgtcaagcggagtgctcttcctgctcttcggtatcatgtccttactctctggaccagaaggagaattgtaatccctgcttgagcctttttcagctagctgattaacatggctttctcttcttagacctatcttatttcagtacatgaatgatggcaacgaaagccatccatccatggcgaacaggatggtgatttaacagtttagccgacacgctgtaaacatttcagtcgcccttcaaaaattactacatgttacagaagtctgtagcgattgtatatttgtattctgtcgtgcccagcacgtgaaattttgttatcgcaattacatgcgttaacaaagctttgttcgtgaaccaagtattcaggcaattaatatggggcttatagcaggcctttgtcttttttcgttgtgttattcctttaatattaaatgtcggctagttttctatggaacttcaagtcttcaattgtggcgaaggtaacgaaacaaggccaatcttattgaatgttttatcaaaattttctggacattaaataaattgatatgacaatataaatggagagataataaaagttt

SEQ ID NO: 3898 - DNA, 1443 bp, Zea Mays
aacaccgattcgtttccccttggcacctggcgccctgtcgccttcgaaaaacagccgccgccgtcgcccgtcccggatccgacggcccccgctccttcgtctagtatttatactagtgccttgccggcgctgctcctgttgcctctcgcatttgcccacgcccgcagcgcctcgcctcggctgctctacctctatcccgcgacccgcgagatcggaatcgcggcgccccgccgccctcctccaaaatggcaccgggttcaccaagtcgttggccatgacggtgctctccgagatcggggacaagaccttcttcgccgccgcgattctggctatgcgccatcccaggaaactcgtattggcaggctgtttaactgcactaatagtcatgacagctctatcggcttctctaggttgggttgcaccaaatctgatttcacgtaaatggactcatcatttgaccactctattgttctttctatttggcatttggtcattgtgggaaggcttcaaggaagatgggtaccgagattcggaagaattggctgaagttgaagcagagctggatgctgcctttaagagtaataaaggtgaatctaaaaataaatttaaggcgaatgatgatatgaagaaacagcaaagaccatttctcatgcagttcttctcaccaatttttctgaaggcattttctattacattctttggtgagtggggtgacaagagccagattgctacaattggcttggctgctgatgaaaacccgttcggtgttgtcctgggtggaatcatagcgcaagcactctgcactactgctgccgttcttggtggaaagagcctagcgtcccagatatctgagaagatggttgaactgtcaagcggagtgctcttcctgctcttcggtatcatgtccttactctctggaccagaaggagaattgtaatccctgcttgagcctttttcagctagctgattaacatggctttctcttcttagacctatcttatttcagtacatgaatgatggcaacgaaagccatccatccatggcgaacaggatggtgatttaacagtttagccgacacgctgtaaacatttcagtcgcccttcaaaaattactacatgttacagaagtctgtagcgattgtatatttgtattctgtcgtgcccagcacgtgaaattttgttatcgcaattacatgcgttaacaaagctttgttcgtgaaccaagtattcaggcaattaatatggggcttatagcaggcctttgtcttttttcgttgtgttattcctttaatattaaatgtcggctagttttctatggaacttcaagtcttcaattgtggcgaaggtaacgaaacaaggccaatcttattgaatgttttatcaaaattttctggacattaaataaattgatatgacaatataaatggagagataataaaagttt

SEQ ID NO: 3899 - DNA, 1383 bp, Zea Mays
aacaccgattcgtttccccttggcacctggcgccctgtcgccttcgaaaaacagccgccgccgtcgcccgtcccggatccgacggcccccgctccttcgtctagtatttatactagtgccttgccggcgctgctcctgttgcctctcgcatttgcccacgcccgcagcgcctcgcctcggctgctctacctctatcccgcgacccgcgagatcggaatcgcggcgccccgccgccctcctccaaaatggcaccgtctctgctcggggggttcaccaagtcgttggccatgacggtgctctccgagatcggggacaagaccttcttcgccgccgcgattctggctatgcgccatcccaggaaactcgtattggcaggctgtttaactgcactaatagtcatgacagctctatcggcttctctaggttgggttgcaccaaatctgatttcacgtaaatggactcatcatttgaccactctattgttctttctatttggcatttggtcattgtgggaaggcttcaaggaagatgggtaccgagattcggaagaattggctgaagttgaagcagagctggatgctgcctttaagagtaataaaggtgaatctaaaaataaatttaaggcgaatgatgatatgaagaaacagcaaagaccatttctcatgcagttcttctcaccaatttttctgaaggcattttctattacattctttggtgagtggggtgacaagagccagattgctacaattggcttggctgctgatgaaaacccgttcggtgttgtcctgggtggaatcatagcgcaagcactctgcactactgctgccgttcttggtggaaagagcctagcgtcccagatatctgagaagatggttgaactgtcaagcggagtgctcttcctgctcttcggtatcatgtccttactctctggaccagaaggagaatttacatgaatgatggcaacgaaagccatccatccatggcgaacaggatggtgatttaacagtttagccgacacgctgtaaacatttcagtcgcccttcaaaaattactacatgttacagaagtctgtagcgattgtatatttgtattctgtcgtgcccagcacgtgaaattttgttatcgcaattacatgcgttaacaaagctttgttcgtgaaccaagtattcaggcaattaatatggggcttatagcaggcctttgtcttttttcgttgtgttattcctttaatattaaatgtcggctagttttctatggaacttcaagtcttcaattgtggcgaaggtaacgaaacaaggccaatcttattgaatgttttatcaaaattttctggacattaaataaattgatatgacaatataaatggagagataataaaagttt

SEQ ID NO: 3900 - DNA, 1340 bp, Zea Mays
aacaccgattcgtttccccttggcacctggcgccctgtcgccttcgaaaaacagccgccgccgtcgcccgtcccggatccgacggcccccgctccttcgtctagtatttatactagtgccttgccggcgctgctcctgttgcctctcgcatttgcccacgcccgcagcgcctcgcctcggctgctctacctctatcccgcgacccgcgagatcggaatcgcggcgccccgccgccctcctccaaaatggcaccgtctctgctcggggggttcaccaagtcgttggccatgacggtgctctccgagatcggggacaagaccttcttcgccgccgcgattctggctatgcgccatcccaggaaactcgtattggcaggctgtttaactgcactaatagtcatgacagctctatcggcttctctaggttgggttgcaccaaatctgatttcacgtaaatggactcatcatttgaccactctattgttctttctatttggcatttggtcattgtgggaaggcttcaaggaagatggagattcggaagaattggctgaagttgaagcagagctggatgctgcctttaagagtaataaaggtgaatctaaaaataaatttaaggcgaatgatgatatgaagaaacagcaaagaccatttctcatgcagttcttctcaccaatttttctgaaggcattttctattacattctttggtgagtggggtgacaagagccagattgctacaattggcttggctgctgatgaaaacccgttcggtgttgtcctgggtggaatcatagcgcaagcactctgcactactgctgccgttcttggtggaaagagcctagcgtcccagatatctgagaagatggttgaactgtcaagcggagtgctcttcctgctcttcgtacatgaatgatggcaacgaaagccatccatccatggcgaacaggatggtgatttaacagtttagccgacacgctgtaaacatttcagtcgcccttcaaaaattactacatgttacagaagtctgtagcgattgtatatttgtattctgtcgtgcccagcacgtgaaattttgttatcgcaattacatgcgttaacaaagctttgttcgtgaaccaagtattcaggcaattaatatggggcttatagcaggcctttgtcttttttcgttgtgttattcctttaatattaaatgtcggctagttttctatggaacttcaagtcttcaattgtggcgaaggtaacgaaacaaggccaatcttattgaatgttttatcaaaattttctggacattaaataaattgatatgacaatataaatggagagataataaaagttt

SEQ ID NO: 3901 - DNA, 1182 bp, Zea Mays
ggtagctgcaaaagtgcagattcgccggtggagcgaacgggtgaagcgccttggagtcgaatttttgattctggctatgcgccatcccaggaaactcgtattggcaggctgtttaactgcactaatagtcatgacagctctatcggcttctctaggttgggttgcaccaaatctgatttcacgtaaatggactcatcatttgaccactctattgttctttctatttggcatttggtcattgtgggaaggcttcaaggaagatggagattcggaagaattggctgaagttgaagcagagctggatgctgcctttaagagtaataaaggtgaatctaaaaataaatttaaggcgaatgatgatatgaagaaacagcaaagaccatttctcatgcagttcttctcaccaatttttctgaaggcattttctattacattctttggtgagtggggtgacaagagccagattgctacaattggcttggctgctgatgaaaacccgttcggtgttgtcctgggtggaatcatagcgcaagcactctgcactactgctgccgttcttggtggaaagagcctagcgtcccagatatctgagaagatggttgaactgtcaagcggagtgctcttcctgctcttcggtatcatgtccttactctctggaccagaaggagaattgtaatccctgcttgagcctttttcagctagctgattaacatggctttctcttcttagacctatcttatttcagtacatgaatgatggcaacgaaagccatccatccatggcgaacaggatggtgatttaacagtttagccgacacgctgtaaacatttcagtcgcccttcaaaaattactacatgttacagaagtctgtagcgattgtatatttgtattctgtcgtgcccagcacgtgaaattttgttatcgcaattacatgcgttaacaaagctttgttcgtgaaccaagtattcaggcaattaatatggggcttatagcaggcctttgtcttttttcgttgtgttattcctttaatattaaatgtcggctagttttctatggaacttcaagtcttcaattgtggcgaaggtaacgaaacaaggccaatcttattgaatgttttatcaaaattttctggacattaaataaattgatatgacaatataaatggagagataataaaagttt

SEQ ID NO: 3902 - DNA, 1782 bp, Zea Mays
cagccgcgccgcacgcccgcaccaagaatctaccaccagcagccaccaaggtaccattacgctacctcctgtgctatagagcggcgccgcagatcgatcgaccgatccatccaccgatcgggatgtgggaaggcggcggcagccacgcccacgaggcgctcctgctgcaggccgccggatcaggagcggccgactacgggcacgccggcccgtcgctcctgcggccgtggctcggcccggccgccgcgtcggggttctcctacatggccccaaaccacgcgcagccagggcccttgggcgccgaggcggcggtcgcgagccgtttcggcttcggcggcggcgggtacagcgatggcggggtggagcaagagcaattcgtggtgatcggctcagccgagactgtgcctccgcggcacagtctgcaggctgctggagttggtgggaggacgacggcgctgctgccgcacgggccgaggatggtgtcgggacttctcgggaccctgcaggcggagctggggcggatgacggccaaggagatcatggacgccaaggcgctggcggcctctcgcagccacagcgaggccgagcgcagccgccgccagcgcatcaacggccacctcgccaagctccgcagcctgctccccaacaccaccaagacggacaaggcgtcactgctggccgaggtaatcgagcacgtcaaggagctgaagcggcagacgtcggcggcggctcggcagcggcacctgctgctgccgacggaggcggacgacctgttcggtggacgccgcggaggacggcgacgacggcaggctcgtcgcgcgggcgtcgctgtgctgcgaggaccgcgtgggcctcatccccgacatcgcccgcgcgctcgccgcgctcagcctgcgggcccgccgcgccgagatcgccacgctcggcggccgcgtccgcaacgtgctcctcatcaccactgccgacgacgacgacgaggaaggagagggccacgtcgaaggcgggtgcgccggcgcctcgtccaaccggaggcacgagctcgtcgcgtccatccaggaagcgctgcgcggcgtcatggaccgcaagacggcgagcagcgacacgttctcatctagcggcggcggcggcggcgggagcatcaagaggcagcgcgtgagcggtctgcatgagcaaggttcgctttaattagcgtgctcaaagtagctagctatgttgtcgtggtccttcctcgatcctagcatgaaatatcgaagcatgcttgcatggctagcttgcttctgcagaaactcaagttgattagtacagttataaagctataatcacttcaaagtttaaccttggaacgagctggctcttctttttttgtcgctatatatggcatggcactatggcagtggtgtgtgagatagacgtggagggggataagggtgtacacatgtataatctcgggggttattataatgtaagatggaattggtggggttggtcatttatttcttcagtgtgccatgcatggagccatggaggttcactcttttttcacttttcatcacattgtcgttggcatcccattgccaatacatttgtggattttaatatggtatacatttttttgatgtttttccggcctcacatcttctgatgatctcatgcttggttttcttaagtatcaatttgctaatggtattgttattggccatatatagcatcatatcctctttctctcataaaacactcagttccgttgtccttttgtaaatttaatagatcgtctcaaagttt

SEQ ID NO: 3903 - DNA, 869 bp, Zea Mays
aatccgatgcctccaaaccgcacgtcgaacggcccacggagcatcaccaccgcggcagctgagctcggccccaacattcagattcttcgaggcgcggcgacggcggtcggcgacatggaggccgcggtgcccagccgtgttgcgctctccgcggcgagccgcctcccaaatccccacgccgtgacaggagatagatctttcatttacaagggaagatgccaaagtcttgcaattcctatggctttgtcagcagctgcgccaggcaaaggtggtggtgtgcttgatcggccagttgagaaaactactcctggtcgccagtctgaatttgatgtgaagttttcaggctgtctaaatagatgccattgaggaaatcccggaaaatgtcgcctccataccgtgtcatcctgcacaatgacaactacaacaggcgcgagtacgttgtcaaggtcctgatgaaagtgatccctgggatgaccgtcgacaacgctgtgaacatcatgcaggaggcgcacgtgaatgggctgtcagtggtgattgtctgttcccagtccgaggctgaggagcactgcacgtcgctcaggggcaacggcctccggagctcgatcgagcccgcgagtggtggctgctgaggttcgagacttgggggtataccttcttgttttgccagcgtatagtttgtaaatacccagcgtatcaagctaaagctgaaacggattggttatatgcacttatcgatacaacgaagctgagtacccctctcgggtaggtgtaaatcgtgcaagggtaccctgtagaagaagaaacatagtattttcggttttgatttataaaatatttagttgcacatgcctactctgtttatagaaatt

SEQ ID NO: 3904 - DNA, 637 bp, Zea Mays
gcagagcatggctacaatgtcgtccgaagccgctgttatatatcccatcgaggatatggcctggcaaatccactcccagatgcatactacgctttccagcagatagctagctagatactcggggcgtgcatgcagagagcggaatatatatagctcaaatgctggttctaagaatggcctatcgatcagcattcagcacgcgcgtttcccacaagagcaatcaggaagcgagcgcgcgaacgacagctcggcaagagagagacgagagtcctcgctgtggctgtacacatggctgtccaatcaagtaaagaagagcggagccctctaatgaaagggccgggtgtgtagctaggtctgcaggttgtttcggctcgtgctggctggatgcatgctgcgggtaactctgcctctttcttctcctatcgctcggaagttgcgtgtgccataccgctatcatggccctaccacacctttagaaaaatagcacacatgcagcagcagagcatggctacaatgtcgtccgaagccgctgttatatatcccatcgaggatggcctggcaaatccactcccagatgcatactacgcctttccagcagatagctagctagatactcggggcgtgcatgcagagagcg

SEQ ID NO: 3905 - DNA, 1947 bp, Zea Mays
gaatactaattatattgactataccaaatagtaggagtacaaataaaatgtaagtgtcatatcattatacacattttgattctactttacttaaacacataataatgattttttattgtatacttcttaatttatatatttagtgtgacctcctaccttatatattattactaattttatatgaatgtatgacttgcgtgaatttttaaagtcaattgagggtacatgttacagtttttaccgctcgaattttagattccaatcgtaactggtgtaattttcgtaccgaacttttgtttccgatgtttccgaattaccgatgtcgtatttgtttccgaagttaccattttcgatcttgttttcgaggaaaaaaatatgaaaacgaaaatggttttagtgtttatcgatcgtttccgatcgttttcacccctaatgttaactgacagcacaggcccatatcttttacaacattcatatctccgtcttcaattctgagaaaattgacagggttatctgcctctcgccgccccttccttcccgctgcccctccctccccgccgacactcccctcagccgccgagaactccaagcgcacctggaggacaccattcgatgcctacgccgtgttagcttctaggaggaagggaaggaagcaggacgacacaagaggaagagaagacttggaagaggggaagaagataggttcacttgccttgtcatccttgtttgtgctaatagtaccccgccttgagcaccagcttgtccccaagcaggcgctgatggaaagcgctgccggagagcctccagatcttcccaggtagcgagtgactggggaagggacgaccattgcaccaggccttgctgcaccgcgcgaactcagcgagacgccatgcgacgctgaagaacagccacatgcacttgaaatgggtcagacaaaactggtatgatagaagatacctgtgtaggaggctgaatgaactgtttgagctgtgacacgtgaaagacggggtgaactgtggatgaatctggtaggtccaacttgtatgcagtggaaccaatcttggacaaaatctggtaaggaccaaagaagcgaaaactgagcttctggttggcacgagagaccagggatgtctggacgtatggttgaagcttgacgaacaccaaatcccccacttggaacatacgttcggagcggcgcttatccgcttgctgcttcatacactgtttggcatggtgtagatgttgctgcaataacagatggatacgttgcttgtcttggatgaatgcaaccaaatcacacgaagaactgtccaatgccagaataccgaaatgtcgtgggacatagctgtagagagcttcaaatggtgttttttcaatagatgaatggtggctagtgttataccaaaactctgctgaagctatccaattggcccacttggaaggacaagtatgaacaaagcatcttaggtacgtctcgaggcattgattaacgcgcccagtctgcccgttcgattgaggatggtatgctgctcatgtggagactaaccccggctagcttgaagagttctttccaaaaattacttgtgaaaatcttatctcggtcaaagacaatagcaactgggaggccatgcaacttgtagacttgctgaaagaatgcctgagtaatggaaactgctgaaaagggatgagacaatggaataaagtgagcatacttagtgaataaatcaaccaccactaagatgcagtcaaaacattgtgactgtggcagcccttcaataaagtccatcgagatcgtatgccaagcagctgtgggaactgacaagggctggagcaaaccaggtgaaagagctcggtctggtttcacctgttgataggtaacactggaagccacccaattctgaacgaacgacttgagacccaatcaggcaaaaacttgcttgatcttcc

SEQ ID NO: 3906 - DNA, 1466 bp, Zea Mays
tcctcgccttgctttctccgccatcctctctgctttccaccaccctataccaaaccagccaaagccctccactcctccccgcctccgcctccgacgtcgaacattcttctccaatggcgacggcccccgcatccctctcgctctccgcctctaccctgcccacccggctccgtgccgcagcggtgctggcgggcatgcgctggaggcagccgcagcgcgggcggatggtggtgcgcgccaagatccgggagatcttcatgccggcgctgagctccaccatgacggagggcaagatcgtctcctggtccgctggagagggtgatcgcgtctccaagggtgacgccgtcgtggtcgtcgagtctgacaaggccgacatggacgttgagaccttccacgacggcatcgtggcggtggtcctcgtccaggctggcgagtcggcgccggtgggcgcgcccatcgcgctgctcgcggagtcagaggaggaggtgccgctcgctctcgccaaggctcaggagctctccaacgggcagccgcagcaggcgcctcctgctccgacggaggatgccgcagcgacgccgccccctccttctgctccggccactgctcccacgccggtggccgtgggtacgaagggcattgccagcccgcacgctaagaagctggctaagcagcacagggtggaccttgccaaggtgactggcaccgggccgtatggtcgaattacgtcggcagatgtcgaggcggctgccggaatccagccgaagtcaaagcccgctcctgctgctgctgcgccaccacctgtggctgcaccttcagtgggtgcggtgcctcaatcggcagttctaccaccggttcctggcgcgactgttgttccattcactaccatgcaggctgcagtgagcaagaacatggtggagagtctggcagtgccagcattccgcgttgggtaccccattattactgataaactcgacgagctgtatgaaaaggttaagccaaagggagtgacaatgacagtgctgctggcgaaggctgcagccatggctcttgcacagcaccctgttgtcaatgctagctgcagggatggaaagagcttcacatacaacagtaacatcaacattgcagtggctgtggcaattgatggtggccttattacacctgttcttcaggatgctgacaagctggatatatatttgctctcgcaaaattggaaggatctagtgaagaaagcacgagcaaaacagctccaaccaaatgagtacagctctgggacttttacactgtccaacctgggtatgtttggtgtagatcggtttgatgcaatccttccacctggccagggagctattatggctgttggagcctcgaaacctacagttgtggctgataaagatggtttctttagcgtcaagagcaaaatgctgattgttctggactatactggcaatatttcgccagaattgtgg

SEQ ID NO: 3907 - DNA, 2986 bp, Zea Mays
tcctcgccttgctttctccgccatcctctctgctttccaccaccctataccaaaccagccaaagccctccactcctccccgcctccgcctccgacgtcgaacattcttctccaatggcgacggcccccgcatccctctcgctctccgcctctaccctgcccacccggctccgtgccgcagcggtgctggcgggcatgcgctggaggcagccgcagcgcgggcggatggtggtgcgcgccaagatccgggagatcttcatgccggcgctgagctccaccatgacggagggcaagatcgtctcctggtccgctggagagggtgatcgcgtctccaagggtgacgccgtcgtggtcgtcgagtctgacaaggccgacatggacgttgagaccttccacgacggcatcgtggcggtggtcctcgtccaggctggcgagtcggcgccggtgggcgcgcccatcgcgctgctcgcggagtcagaggaggaggtgccgctcgctctcgccaaggctcaggagctctccaacgggcagccgcagcaggcgcctcctgctccgacggaggatgccgcagcgacgccgccccctccttctgctccggccactgctcccacgccggtggccgtgggtacgaagggcattgccagcccgcacgctaagaagctggctaagcagcacagggtggaccttgccaaggctgcagtgagcaagaacatggtggagagtctggcagtgccagcattccgcgttgggtaccccattattactgataaactcgacgagctgtatgaaaaggttaagccaaagggagtgacaatgacagtgctgctggcgaaggctgcagccatggctcttgcacagcaccctgttgtcaatgctagctgcagggatggaaagagcttcacatacaacagtaacatcaacattgcagtggctgtggcaattgatggtggccttattacacctgttcttcaggatgctgacaagctggatatatatttgctctcgcaaaattggaaggatctagtgaagaaagcacgagcaaaacagctccaaccaaatgagtacagctctgggacttttacactgtccaacctgggtatgtttggtgtagatcggtttgatgcaatccttccacctggccagggagctattatggctgttggagcctcgaaacctacagttgtggctgataaagatggtttctttagcgtcaagagcaaaatgctggtcaatgtcactgctgatcacaggattgtatatggggctgatttggcagcattcctacaaacttttgcaaaggttattgaggatcctgagagcttaactttgtgagatctcttgaagagttatgatcttatctatatgcccataaatagtctggttgcagttggagttctgttgttgatctccagtttttgtatctttgaacattcgacatgatttatctgatctttttgtgctggtttgtatctctcattgttgtggatcttgttagtataccgttgataaaagggtagacccagtgccaaaggctactagataagtagggtttgtgaaagggataaactgagacaagccttctccctgtaaatatggagaggctgtttcgaaaacccgtgacctggtgaatgagtgagtgagatagctctcaccactgcactaggcctgccctgtaccattgatattgtggaattattggagagcaataaattataagctgtagatagttctgcagattttgtatctaaaatatggtttatgtccctttttcatttatcttatgggaagtatattttcttgaaatttgtaaagcggtagaggtcccccggtgcacttaaactggcatgtaaatggacatggtactgttttgaagtgtactggcgcagtggccctgccttgctgtctttggagtttgattttttttttaaatttattagcaaaacgaaaacatacaagagtacaggttatataggatgctccagaacaataacatggtcagcattaagttgtgacttgtgagtatattcaatgaattgaaaaccatgcaaccaaaacacatcatcatcctaatacaattctgcatgtgtacaaactctccataactgatacaaacccatcattaagccaataactatacacacagttccacaaaaatgttaatttgttaatgtccaactggttaatgtgaagtctgatcatgaacgtattcacctgagtggaagcactatgttcagaggttgcatgtgctttgaacccctcatttctcggcacaccctatctagcaaaccgagaaaatccctcatgatgacaaatatatggaggaggttgcactcgttcttgccaacctctccatgataatactctgtgagttctctgacctgctgtaggacctcagcttcgtcaaccttgagttccagcatggtattctctgcatgagtttggaatgatctcatgcactgcaggaaattctggttcctgtcattgcaggtaaggtccttcccgacaagccttatcaatcgagccagtccacgtgatagattcgagattgaacttttcaagtgtggcttgacaagatccagaagttccactgggcttatctgaagcctttgatccctgcgatcgctccatctcttggacgacaaagtgcaggagggttgtcttcccgtcagctccacgtatatctgacagcttcagcagtgcgtcaagtctgaaagcatttgcccctcctcttatagttccaacattcattctgtttccagtcttgagtaccgcttcaagtaatcttagaaacaatttgctcgacctgagctcgctgcaggctccctagtaaacaaagaagcagttgcagcttcaatagagtgtttctatctttttaaattaatcaaatagctctacttactctaatcagtgcaaaggacatcctgagatgggcaacttcgtcgtcaaaagtttccttgtacagcatcgcctcaattcttggaaatgac

SEQ ID NO: 3908 - DNA, 1543 bp, Zea Mays
tcctcgccttgctttctccgccatcctctctgctttccaccaccctataccaaaccagccaaagccctccactcctccccgcctccgcctccgacgtcgaacattcttctccaatggcgacggcccccgcatccctctcgctctccgcctctaccctgcccacccggctccgtgccgcagcggtgctggcgggcatgcgctggaggcagccgcagcgcgggcggatggtggtgcgcgccaagatccgggagatcttcatgccggcgctgagctccaccatgacggagggcaagatcgtctcctggtccgctggagagggtgatcgcgtctccaagggtgacgccgtcgtggtcgtcgagtctgacaaggccgacatggacgttgagaccttccacgacggcatcgtggcggtggtcctcgtccaggctggcgagtcggcgccggtgggcgcgcccatcgcgctgctcgcggagtcagaggaggaggtgccgctcgctctcgccaaggctcaggagctctccaacgggcagccgcagcaggcgcctcctgctccgacggaggatgccgcagcgacgccgccccctccttctgctccggccactgctcccacgccggtggccgtgggtacgaagggcattgccagcccgcacgctaagaagctggctaagcagcacagggtggaccttgccaaggtgactggcaccgggccgtatggtcgaattacgtcggcagatgtcgaggcggctgccggaatccagccgaagtcaaagcccgctcctgctgctgctgcgccaccacctgtggctgcaccttcagtgggtgcggtgcctcaatcggcagttctaccaccggttcctggcgcgactgttgttccattcactaccatgcaggctgcagtgagcaagaacatggtggagagtctggcagtgccagcattccgcgttgggtaccccattattactgataaactcgacgagctgtatgaaaaggttaagccaaagggagtgacaatgacagtgctgctggcgaaggctgcagccatggctcttgcacagcaccctgttgtcaatgctagctgcagggatggaaagagcttcacatacaacagtaacatcaacattgcagtggctgtggcaattgatggtggccttattacacctgttcttcaggatgctgacaagctggatatatatttgctctcgcaaaattggaaggatctagtgaagaaagcacgagcaaaacagctccaaccaaatgagtacagctctgggacttttacactgtccaacctgggtatgtttggtgtagatcggtttgatgcaatccttccacctggccagggagctattatggctgttggagcctcgaaacctacagttgtggctgataaagatggtttctttagcgtcaagagcaaaatgctggtcaatgtcactgctgatcacaggattgtatatggggctgatttggcagcattcctacaaacttttgcaaagataaactagcttgcaccataagacaccacacttcttgcacaagccat

SEQ ID NO: 3909 - DNA, 947 bp, Zea Mays
cacaacatgaacccgtacttacaatccaatgttctcctcaaggatggcgcaagaaatggaagaggaaaaagaagagttggaggttgcgacatacctgcaccttacgaggcgtcgtgcacacaacgagcgttgtcatggtggttcgattcccggtcgagttcggatccatcgtgaccatatcagtggtgatgccaagattcgagccgactacttctgtgcataacccgtgtacacggatgctcaattctgaaggaggtttcgcatgcgtcgccatgttttttagtgcctcgttgatgttgtgcaacaagtcgatctttacttcgttcagcgcccaaattgtgctggggagcttggtctctctgctctgcagaaggttgttgtcgttgttcgcatcctttcttacggtattcttgttgatgccgtcgacgagtacgtacgcattggtgaatccaccgctcatgaggccttgaaacacttttgcacggccatccaaaccgcatttggtggttactatctcaaggcacctactgctgcagatatcgcacgcctcctccaagttggggagtcaaggggcttccctggtatgcttggtagcgtcgattgcatgcattgggagtggcgtaaatgcccaaccacatggaagggaatgtttactggtcgaggtaaataccctaccatgatccttgaagcggatgctttgcatgacctctggatatggcacgcgtactttggcatgcccggtagctataacaacatcaacattcttcagcgttcaaaccttttcgaaagccatttcagcggtgatagtgctcttgtggctttctccgtgaatggtcacacttacaacatgggatattacctagcatatggtatttacctagactgcccaacatttatgaagacaattgaaagtcgcctagagggggggtgaatagggcgaatctgat

SEQ ID NO: 3910 - DNA, 2128 bp, Zea Mays
aaaaaccctactagtattgcgccgagcacaaaaacccatgaccacaggtcacgctcacgccgcacggaccggacagacgcccagaaagatagggctgcccgctgcccctgcctctgccatccttttcctgcagcagatgacacggccgcgggcccgcggcagaagagagagcccaaatcatagccacaaaagccacgcacgcggggcgcttgtcttgcgcgcacgaaaacccacatccaccgcggcgccacaccgcgtgcgtcggctgcttgctgccccgtgttccttggctcccgccgacaccgagcgccgacaccgagcgccgccaccgccatggctgccccgccccgcgccaccgcggtcctcgcgtggggttccggggaggacgggcagcttggcatgggcgggaacgaggagaaggactgggcacactgcgtggaggcactcggttcctacgccgtcaccgccgtcgtagccggtagccgcaactccctcgccatctgcgaagacggccgcctcttcacttgggggtggaaccagcgcggcacgctcgggcacccgccgaagaccaagacggagagctcccctggccccgtccacgccctcgcggggttgaagatcgtccaggcggcgattggtgggtggcattgccttgcagttgacgacaatgggcacgcctacgcctgggggggaaacgagtacgggcagtgcggtgaggagcctgagaggaaggaggacgggacgagggcgctcaggagggacatcccgaccccacagcggtgcgcacccaagctcaaagtccggcaagtagctgctggagggacacattcagtggttttgactcaagaaggtcacgtttggacatggggacagccatggcctcctggtgatatcaagcaaatatcgacaccagtacgcgtgcaaggccttgagaaagtgagggtcattgctgtaggtgcattccataatttggcactcacagaggatggaattttgtgggcatggggtaataatgagtatggtcagctggggactggagatacccaaccaagatcacaccctatacgcgttgaaggactatctgatctctcactggttgacattgctgctggaggctggcattcaactgcactaactatacagggagaggtgtatgcttgggggagaggagaacacgggaggcttggatttggagatgataagagtagtcgcatggtccccctaaaggttgagcttctagctggagaggatattgttcaggtatcatgtggaggaacacattcagttgctctaactcgagatggccggatgttttcttatgggaggggcgaccatggccgtctgggctacggcaggaagctgacgacaggccagcccatgggagtggacattgacctgccgccgcccaagacccgcagcagccgggacgggcagtggcaggcgaagtacgtggcttgtggcgggcggcacaccctggctattgtggtgtgggcagagaccaccgactgatcacggagtgatcaacttcctgaatcctaatctgggtgcaaatctgagtttgacaatcctgctagataattatagtgttagtgaaataagcataagttatgcgacattaggcatcataaatttttatgtatgtgcttaatttggcaaggaacaaaaatagtcgggaagaggactttgtgcagatgggagagcttcagtatttcagcaatatttttcgatggacaattttgtgctgtatcctgtgcttactggctcccgggttgctaccttcactcgctgcacggctacacatctaactgtcaagggtgacaatggatcaagcactagttcaaatcgaatattggagacattcaattagcgacgattaaggagatcatgcttcaactcgcggctgctcaagaacatgcacaaattacctccaaggagcttggcctaaggagacgcctcaaagtgcgcagtgttggcttgaagcacagcaagaatcaggcagcactctcgtctcacgcacatccgttacggggacgcgaacaccaaattcttctaactatgggtgaattatagggcacgccaaattaagggagtatttggttactttgtcatgctactaactaaacttatc

SEQ ID NO: 3911 - DNA, 1696 bp, Zea Mays
gccgcgggcccgcggcagaagagagagcccaaatcatagccacaaaagccacgcacgcggggcgcttgtcttgcgcgcacgaaaacccacatccaccgcggcgccacaccgcgtgcgtcggctgcttgctgccccgtgttccttggctcccgccgacaccgagcgccgacaccgagcgccgccaccgccatggctgccccgccccgcgccaccgcggtcctcgcgtggggttccggggaggacgggcagcttggcatgggcgggaacgaggagaaggactgggcacactgcgtggaggcactcggttcctacgccgtcaccgccgtcgtagccggtagccgcaactccctcgccatctgcgaagacggccgcctcttcacttgggggtggaaccagcgcggcacgctcgggcacccgccgaagaccaagacggagagctcccctggccccgtccacgccctcgcggggttgaagatcgtccaggcggcgattggtgggtggcattgccttgcagttgacgacaatgggcacgcctacgcctgggggggaaacgagtacgggcagtgcggtgaggagcctgagaggaaggaggacgggacgagggcgctcaggagggacatcccgaccccacagcggtgcgcacccaagctcaaagtccggcaagttgacattgctgctggaggctggcattcaactgcactaactatacagggagaggtgtatgcttgggggagaggagaacacgggaggcttggatttggagatgataagagtagtcgcatggtccccctaaaggttgagcttctagctggagaggatattgttcaggtatcatgtggaggaacacattcagttgctctaactcgagatggccggatgttttcttatgggaggggcgaccatggccgtctgggctacggcaggaagctgacgacaggccagcccatgggagtggacattgacctgccgccgcccaagacccgcagcagccgggacgggcagtggcaggcgaagtacgtggcttgtggcgggcggcacaccctggctattgtggtgtgggcagagaccaccgactgatcacggagtgatcaacttcctgaatcctaatctgggtgcaaatctgagtttgacaatcctgctagataattatagtgttagtgaaataagcataagttatgcgacattaggcatcataaatttttatgtatgtgcttaatttggcaaggaacaaaaatagtcgggaagaggactttgtgcagatgggagagcttcagtatttcagcaatatttttcgatggacaattttgtgctgtatcctgtgcttactggctcccgggttgctaccttcactcgctgcacggctacacatctaactgtcaagggtgacaatggatcaagcactagttcaaatcgaatattggagacattcaattagcgacgattaaggagatcatgcttcaactcgcggctgctcaagaacatgcacaaattacctccaaggagcttggcctaaggagacgcctcaaagtgcgcagtgttggcttgaagcacagcaagaatcaggcagcactctcgtctcacgcacatccgttacggggacgcgaacaccaaattcttctaactatgggtgaattatagggcacgccaaattaagggagtatttggttactttgtcatgctactaactaaacttatc

SEQ ID NO: 3912 - DNA, 2072 bp, Zea Mays
cgcgggcccgcggcagaagagagagcccaaatcatagccacaaaagccacgcacgcggggcgcttgtcttgcgcgcacgaaaacccacatccaccgcggcgccacaccgcgtgcgtcggctgcttgctgccccgtgttccttggctcccgccgacaccgagcgccgacaccgagcgccgccaccgccatggctgccccgccccgcgccaccgcggtcctcgcgtggggttccggggaggacgggcagcttggcatgggcgggaacgaggagaaggactgggcacactgcgtggaggcactcggttcctacgccgtcaccgccgtcgtagccggtagccgcaactccctcgccatctgcgaagacggccgcctcttcacttgggggtggaaccagcgcggcacgctcgggcacccgccgaagaccaagacggagagctcccctggccccgtccacgccctcgcggggttgaagatcgtccaggcggcgattggtgggtggcattgccttgcagttgacgacaatgggcacgcctacgcctgggggggaaacgagtacgggcagtgcggtgaggagcctgagaggaaggaggacgggacgagggcgctcaggagggacatcccgaccccacagcggtgcgcacccaagctcaaagtccggcaagtagctgctggagggacacattcagtggttttgactcaagaaggtcacgtttggacatggggacagccatggcctcctggtgatatcaagcaaatatcgacaccagtacgcgtgcaaggccttgagaaagtgagggtcattgctgtaggtgcattccataatttggcactcacagaggatggaattttgtgggcatggggtaataatgagtatggtcagctggggactggagatacccaaccaagatcacaccctatacgcgttgaaggactatctgatctctcactggttgacattgctgctggaggctggcattcaactgcactaactatacagggagagataaattcacttccttgctatttattcagagcatgctttaaagatgtccagattataaagtaccaaaaatatacatattatacgatgaaagtgtatgcttgggggagaggagaacacgggaggcttggatttggagatgataagagtagtcgcatggtccccctaaaggttgagcttctagctggagaggatattgttcaggtatcatgtggaggaacacattcagttgctctaactcgagatggccggatgttttcttatgggaggggcgaccatggccgtctgggctacggcaggaagctgacgacaggccagcccatgggagtggacattgacctgccgccgcccaagacccgcagcagccgggacgggcagtggcaggcgaagtacgtggcttgtggcgggcggcacaccctggctattgtggtgtgggcagagaccaccgactgatcacggagtgatcaacttcctgaatcctaatctgggtgcaaatctgagtttgacaatcctgctagataattatagtgttagtgaaataagcataagttatgcgacattaggcatcataaatttttatgtatgtgcttaatttggcaaggaacaaaaatagtcgggaagaggactttgtgcagatgggagagcttcagtatttcagcaatatttttcgatggacaattttgtgctgtatcctgtgcttactggctcccgggttgctaccttcactcgctgcacggctacacatctaactgtcaagggtgacaatggatcaagcactagttcaaatcgaatattggagacattcaattagcgacgattaaggagatcatgcttcaactcgcggctgctcaagaacatgcacaaattacctccaaggagcttggcctaaggagacgcctcaaagtgcgcagtgttggcttgaagcacagcaagaatcaggcagcactctcgtctcacgcacatccgttacggggacgcgaacaccaaattcttctaactatgggtgaattatagggcacgccaaattaagggagtatttggttactttgtcatgctactaactaaacttatc

SEQ ID NO: 3913 - DNA, 2085 bp, Zea Mays
cacaaaagccacgcacgcggggcgcttgtcttgcgcgcacgaaaacccacatccaccgcggcgccacaccgcgtgcgtcggctgcttgctgccccgtgttccttggctcccgccgacaccgagcgccgacaccgagcgccgccaccgccatggctgccccgccccgcgccaccgcggtcctcgcgtggtgcgctcactctcgcgcgttctctctcgtgcgcgaggggcgcggcgggcaactccgtttctcgcgtcgcggcgggccactgattgctctggttctcgttttgtacaggggttccggggaggacgggcagcttggcatgggcgggaacgaggagaaggactgggcacactgcgtggaggcactcggttcctacgccgtcaccgccgtcgtagccggtagccgcaactccctcgccatctgcgaagacggccgcctcttcacttgggggtggaaccagcgcggcacgctcgggcacccgccgaagaccaagacggagagctcccctggccccgtccacgccctcgcggggttgaagatcgtccaggcggcgattggtgggtggcattgccttgcagttgacgacaatgggcacgcctacgcctgggggggaaacgagtacgggcagtgcggtgaggagcctgagaggaaggaggacgggacgagggcgctcaggagggacatcccgaccccacagcggtgcgcacccaagctcaaagtccggcaagtagctgctggagggacacattcagtggttttgactcaagaaggtcacgtttggacatggggacagccatggcctcctggtgatatcaagcaaatatcgacaccagtacgcgtgcaaggccttgagaaagtgagggtcattgctgtaggtgcattccataatttggcactcacagaggatggaattttgtgggcatggggtaataatgagtatggtcagctggggactggagatacccaaccaagatcacaccctatacgcgttgaaggactatctgatctctcactggttgacattgctgctggaggctggcattcaactgcactaactatacagggagaggtgtatgcttgggggagaggagaacacgggaggcttggatttggagatgataagagtagtcgcatggtccccctaaaggttgagcttctagctggagaggatattgttcagctgagcagcagagctcattttccacgtttgcaggtatcatgtggaggaacacattcagttgctctaactcgagatggccggatgttttcttatgggaggggcgaccatggccgtctgggctacggcaggaagctgacgacaggccagcccatgggagtggacattgacctgccgccgcccaagacccgcagcagccgggacgggcagtggcaggcgaagtacgtggcttgtggcgggcggcacaccctggctattgtggtgtgggcagagaccaccgactgatcacggagtgatcaacttcctgaatcctaatctgggtgcaaatctgagtttgacaatcctgctagataattatagtgttagtgaaataagcataagttatgcgacattaggcatcataaatttttatgtatgtgcttaatttggcaaggaacaaaaatagtcgggaagaggactttgtgcagatgggagagcttcagtatttcagcaatatttttcgatggacaattttgtgctgtatcctgtgcttactggctcccgggttgctaccttcactcgctgcacggctacacatctaactgtcaagggtgacaatggatcaagcactagttcaaatcgaatattggagacattcaattagcgacgattaaggagatcatgcttcaactcgcggctgctcaagaacatgcacaaattacctccaaggagcttggcctaaggagacgcctcaaagtgcgcagtgttggcttgaagcacagcaagaatcaggcagcactctcgtctcacgcacatccgttacggggacgcgaacaccaaattcttctaactatgggtgaattatagggcacgccaaattaagggagtatttggttactttgtcatgctactaactaaacttatc

SEQ ID NO: 3914 - DNA, 1934 bp, Zea Mays
gccacgcacgcggggcgcttgtcttgcgcgcacgaaaacccacatccaccgcggcgccacaccgcgtgcgtcggctgcttgctgccccgtgttccttggctcccgccgacaccgagcgccgacaccgagcgccgccaccgccatggctgccccgccccgcgccaccgcggtcctcgcgggttccggggaggacgggcagcttggcatgggcgggaacgaggagaaggactgggcacactgcgtggaggcactcggttcctacgccgtcaccgccgtcgtagccggtagccgcaactccctcgccatctgcgaagacggccgcctcttcacttgggggtggaaccagcgcggcacgctcgggcacccgccgaagaccaagacggagagctcccctggccccgtccacgccctcgcggggttgaagatcgtccaggcggcgattggtgggtggcattgccttgcagttgacgacaatgggcacgcctacgcctgggggggaaacgagtacgggcagtgcggtgaggagcctgagaggaaggaggacgggacgagggcgctcaggagggacatcccgaccccacagcggtgcgcacccaagctcaaagtccggcaagtagctgctggagggacacattcagtggttttgactcaagaaggtcacgtttggacatggggacagccatggcctcctggtgatatcaagcaaatatcgacaccagtacgcgtgcaaggccttgagaaagtgagggtcattgctgtaggtgcattccataatttggcactcacagaggatggaattttgtgggcatggggtaataatgagtatggtcagctggggactggagatacccaaccaagatcacaccctatacgcgttgaaggactatctgatctctcactggttgacattgctgctggaggctggcattcaactgcactaactatacagggagaggtgtatgcttgggggagaggagaacacgggaggcttggatttggagatgataagagtagtcgcatggtccccctaaaggttgagcttctagctggagaggatattgttcaggtatcatgtggaggaacacattcagttgctctaactcgagatggccggatgttttcttatgggaggggcgaccatggccgtctgggctacggcaggaagctgacgacaggccagcccatgggagtggacattgacctgccgccgcccaagacccgcagcagccgggacgggcagtggcaggcgaagtacgtggcttgtggcgggcggcacaccctggctattgtggtgtgggcagagaccaccgactgatcacggagtgatcaacttcctgaatcctaatctgggtgcaaatctgagtttgacaatcctgctagataattatagtgttagtgaaataagcataagttatgcgacattaggcatcataaatttttatgtatgtgcttaatttggcaaggaacaaaaatagtcgggaagaggactttgtgcagatgggagagcttcagtatttcagcaatatttttcgatggacaattttgtgctgtatcctgtgcttactggctcccgggttgctaccttcactcgctgcacggctacacatctaactgtcaagggtgacaatggatcaagcactagttcaaatcgaatattggagacattcaattagcgacgattaaggagatcatgcttcaactcgcggctgctcaagaacatgcacaaattacctccaaggagcttggcctaaggagacgcctcaaagtgcgcagtgttggcttgaagcacagcaagaatcaggcagcactctcgtctcacgcacatccgttacggggacgcgaacaccaaattcttctaactatgggtgaattatagggcacgccaaattaagggagtatttggttactttgtcatgctactaactaaacttatc

SEQ ID NO: 3915 - DNA, 1909 bp, Zea Mays
gccacgcacgcggggcgcttgtcttgcgcgcacgaaaacccacatccaccgcggcgccacaccgcgtgcgtcggctgcttgctgccccgtgttccttggctcccgccgacaccgagcgccgacaccgagcgccgccaccgccatggctgccccgccccgcgccaccgcggtcctcgcgtggggttccggggaggacgggcagcttggcatgggcgggaacgaggagaaggactgggcacactgcgtggaggcactcggttcctacgccgtcaccgccgtcgtagccggtagccgcaactccctcgccatctgcgaagacggccgcctcttcacttgggggtggaaccagcgcggcacgctcgggcacccgccgaagaccaagacggagagctcccctggccccgtccacgccctcgcggggttgaagatcgtccaggcggcgattggtgggtggcattgccttgcagttgacgacaatgggcacgcctacgcctgggggggaaacgagtacgggcagtgcggtgaggagcctgagaggaaggaggacgggacgagggcgctcaggagggacatcccgaccccacagcggtagctgctggagggacacattcagtggttttgactcaagaaggtcacgtttggacatggggacagccatggcctcctggtgatatcaagcaaatatcgacaccagtacgcgtgcaaggccttgagaaagtgagggtcattgctgtaggtgcattccataatttggcactcacagaggatggaattttgtgggcatggggtaataatgagtatggtcagctggggactggagatacccaaccaagatcacaccctatacgcgttgaaggactatctgatctctcactggttgacattgctgctggaggctggcattcaactgcactaactatacagggagaggtgtatgcttgggggagaggagaacacgggaggcttggatttggagatgataagagtagtcgcatggtccccctaaaggttgagcttctagctggagaggatattgttcaggtatcatgtggaggaacacattcagttgctctaactcgagatggccggatgttttcttatgggaggggcgaccatggccgtctgggctacggcaggaagctgacgacaggccagcccatgggagtggacattgacctgccgccgcccaagacccgcagcagccgggacgggcagtggcaggcgaagtacgtggcttgtggcgggcggcacaccctggctattgtggtgtgggcagagaccaccgactgatcacggagtgatcaacttcctgaatcctaatctgggtgcaaatctgagtttgacaatcctgctagataattatagtgttagtgaaataagcataagttatgcgacattaggcatcataaatttttatgtatgtgcttaatttggcaaggaacaaaaatagtcgggaagaggactttgtgcagatgggagagcttcagtatttcagcaatatttttcgatggacaattttgtgctgtatcctgtgcttactggctcccgggttgctaccttcactcgctgcacggctacacatctaactgtcaagggtgacaatggatcaagcactagttcaaatcgaatattggagacattcaattagcgacgattaaggagatcatgcttcaactcgcggctgctcaagaacatgcacaaattacctccaaggagcttggcctaaggagacgcctcaaagtgcgcagtgttggcttgaagcacagcaagaatcaggcagcactctcgtctcacgcacatccgttacggggacgcgaacaccaaattcttctaactatgggtgaattatagggcacgccaaattaagggagtatttggttactttgtcatgctactaactaaacttatc

SEQ ID NO: 3916 - DNA, 2125 bp, Zea Mays
gccacgcacgcggggcgcttgtcttgcgcgcacgaaaacccacatccaccgcggcgccacaccgcgtgcgtcggctgcttgctgccccgtgttccttggctcccgccgacaccgagcgccgacaccgagcgccgccaccgccatggctgccccgccccgcgccaccgcggtcctcgcgtggtgcgctcactctcgcgcgttctctctcgtgcgcgaggggcgcggcgggcaactccgtttctcgcgtcgcggcgggccactgattgctctggttctcgttttgtacaggggttccggggaggacgggcagcttggcatgggcgggaacgaggagaaggactgggcacactgcgtggaggcactcggttcctacgccgtcaccgccgtcgtagccggtagccgcaactccctcgccatctgcgaagacggccgcctcttcacttgggggtggaaccagcgcggcacgctcgggcacccgccgaagaccaagacggagagctcccctggccccgtccacgccctcgcggggttgaagatcgtccaggcggcgattggtgggtggcattgccttgcagttgacgacaatgggcacgcctacgcctggggtaggggcactcgcttccctgcgttttccgtgactggtttctggttgcttacttgctttgatgcaatgtgcatggattgtgcagggggaaacgagtacgggcagtgcggtgaggagcctgagaggaaggaggacgggacgagggcgctcaggagggacatcccgaccccacagcggtgcgcacccaagctcaaagtccggcaactgctggagggacacattcagtggttttgactcaagaaggtcacgtttggacatggggacagccatggcctcctggtgatatcaagcaaatatcgacaccagtacgcgtgcaaggccttgagaaagtgagggtcattgctgtaggtgcattccataatttggcactcacagaggatggaattttgtgggcatggggtaataatgagtatggtcagctggggactggagatacccaaccaagatcacaccctatacgcgttgaaggactatctgatctctcactggttgacattgctgctggaggctggcattcaactgcactaactatacagggagaggtgtatgcttgggggagaggagaacacgggaggcttggatttggagatgataagagtagtcgcatggtccccctaaaggttgagcttctagctggagaggatattgttcaggtatcatgtggaggaacacattcagttgctctaactcgagatggccggatgttttcttatgggaggggcgaccatggccgtctgggctacggcaggaagctgacgacaggccagcccatgggagtggacattgacctgccgccgcccaagacccgcagcagccgggacgggcagtggcaggcgaagtacgtggcttgtggcgggcggcacaccctggctattgtggtgtgggcagagaccaccgactgatcacggagtgatcaacttcctgaatcctaatctgggtgcaaatctgagtttgacaatcctgctagataattatagtgttagtgaaataagcataagttatgcgacattaggcatcataaatttttatgtatgtgcttaatttggcaaggaacaaaaatagtcgggaagaggactttgtgcagatgggagagcttcagtatttcagcaatatttttcgatggacaattttgtgctgtatcctgtgcttactggctcccgggttgctaccttcactcgctgcacggctacacatctaactgtcaagggtgacaatggatcaagcactagttcaaatcgaatattggagacattcaattagcgacgattaaggagatcatgcttcaactcgcggctgctcaagaacatgcacaaattacctccaaggagcttggcctaaggagacgcctcaaagtgcgcagtgttggcttgaagcacagcaagaatcaggcagcactctcgtctcacgcacatccgttacggggacgcgaacaccaaattcttctaactatgggtgaattatagggcacgccaaattaagggagtatttggttactttgtcatgctactaactaaacttatc

SEQ ID NO: 3917 - DNA, 3882 bp, Zea Mays
agatctcactacgaccaaggatatccagacagcgaggattgctccagcaccatacaaggcaagagaggacttgttctccattgcatcccactgtagtaaacatcatcgtaattttttgtgccaagattattagcatagaggaatataactttgtatgcaaccttatcttttagttcagaaaggagctcgtcatcctcgccagaattattctgttttgaaaatcgtgtagctgttaattggagttgacaaatcttcatggaatctgctgacaaacaatgacattttgttagactggttttactaacaacaaattgtgtgcagttaactatgccagttactcatagcagacattgaattgaagctttcaattggggggggggggggggggggctaaacgattggaatttttttcttgaaacaatagaaaaaatgcccctgactgccgaaagtaactcttttcaacatttgctataattgctaacaataacaagcatactttaacaaatcacaattatgaattatgacatgtcatggtcggcaaaaagtatgaaagaaggaataaatccagagtttgagtcggttaggagtttcactataggaagtttgggtaagatctgttagcttattttaggaaagtgtgattttcatgtatggtgagttttagctggcccgtgcctttataaactaggtgttagggtgtttcagtaagcaagaaatatattaccagctccttgtgtttatatccctgccttgacagtatggttgccgaccacggcgactcaaccgcaccagcgaggtccaaggccacatcctaccacacaccaccactactcattgtgtcatgttcctagttccaatcatccggttcccccaaccggtgacaacctggtatcagtcagctctgatttgatcagcatggactcccgaatctcttcgctgcaggacatggtacagaccatgtcaaaatctctggaagttgtttccaaatcagtggacaccatgaacacatcgctgaccaatgtcataggccgccagcgggacagcgataaccagcttcaagccttgaatctagcagtcacgcgattggaaaagacctctccatcctctggtctgcccgacaacaccagccataacaattgtaatgggcatagaggtggtggcggcggaggtggcagaggaggccgcaatgatggtgatggtggcggtggcagaggtggcggctaggggcatgatcatcaagatcaggaggaacatgctccaccacgctacctcaaactggattacccgaaattcgatggctcagaggatcctcttccatggttgaatcgctgagatcaattctttcatggacagggcacaccggaggagaagaaagtttggctcgcatcttaccacatgaccggcacagctcaattgtggtattatcgcctcaagatgatagcaggtgaaccatctttgcaacacttcgtccagcttgtcttgcatcgttttggtcctaccctgaccaagacaccactaagcgaactgaagctgctgtactgtacttttttcgaaaaacgcaggagaactgcgtctcattatattaaggagaaaagggtctaagaaggagctgctgcaccgtactggaagcatggatgaataccaggtggtgcctgatcaagatatccctccagtgggtgaagtgttggccttgacagtggatgacatgccagcaatatcattgcatgctcttatagggcatagctgtgcatggcattcaaacaatgaaggtgcatgttcacattatgggttgccgcctcacagcattgctggactcaggatcaacccacagtttcatcaatcacaaagtgggccaggagttgcaactgccattgcagcaatgctctagactgtgcgttgcattccagcaacagtgtcttctgcaatctgcatatagacattggaggtgaagcatttacagtggactgttttgctctggacctgggaggctacgacatgattttgggtgttcagtggctgggcacattgggccctatcttgttggatttccatcatcaaacattatatttttggcgggaaggctgccaagtcatctgaactgggtcacaaggggtgctagaacccatggatttcgcactgatgtcggtgaagacaggacctcataagcaatttactacaggagtttgagtgtctgtttgctgaaccttcgggtttaccaccacaacgggccatttgtcaccaaattcggttgaaaacagcaactgaagcggtggcagtttgaacatactccctccgttcttttttatttgtcgcattttagttcaaaaatgaactagcgggtgacaaatattcgagaacggaggtagtatcaatgacatgacaggctgcacaaattcttgaagttagctatggttatgtagttgtcacaaggatatgtcagtttttaatttaaaaagaaaaatatgcagatcttgtcacacaatggcaattccattctcttggaaactatgtcccctttaaaggtaaataatgttttattaagatcataaacaagaaaattggtgataaaccacctttttgcataaacaaaaaaacatcaaccaaaacttgaagtttggattgcattttttgtggaacttgtagagcagaaaaaagaataagtgtttgtggaaacttgttagccagcggggaaaaaacaaatgcttgtagcccttgtttggaaaccaaaatcaaattcccctccccttttatgttttttttttaaaaaaatcactttttaccaaatccagtaaaggtgacgtcttcaatatctacctcttctaatagcattctcttcaatcagatgctttgcccacatcctccaagatgcagaaactagggcttgtaatgacaagctagattccttgtcgatagttactttgtggcgagctaggaggattcacgcaagacataggccttgccagccagtggcaacccagccagccatttttcactgcagcagctaggtaccaggcttgcacaatgcaccagcttgatggacaaggttgtgaatgcttttattaaattaattttgaagaatgtcaattttaggctaagaaagatcagaaaactttatgttctggaatttgaatcctgttttgcgctactgtagatgatttgaattgcatgctgtgtgcccactatggcacaaactgatgaatgaggaagaagtgctccgctagtcggtcttgccagttgtgtctacaacttgccgaatagttccagctgctactgccagtatggtagctcccttcattgagaaaggtcagttgagatttgtggctgaggaacatataacaagtccgtcgtttgaactcttgtgtcttaaaggtttttttcacaaacgatgccgtgaacaagcacatcaccacttggtaacaggctagggggtcacgctcactttggacaacatcttctttgacctgcagcaagggtttgtgtaactgtgtctgtgtagtttctatctcaacccgagtatatgtcacagcagcagcaactagctatcactcggaaaaaatagggagtatgcacacaacacattgaaaaaaaatctgagaaaattggcatgttcttggacaaaattagcttcccaggcctcatttttatactcaccaaatagccacctaactgtaaaaacaaccagaaaggcctgtttggttcgtggctaactgtgccacactttgcctaaggttagtcgtctgaattgaagaactaaccttagacagaaaagttaggcaaagtgtggcaagttaggcagcgaaccaaacatgccctagcagccttcaaagctcagcccctagattacttgtctgcacatcaatccaacccaatccacatgggttg

SEQ ID NO: 3918 - DNA, 6026 bp, Zea Mays
ctctaatccgcccgccattactttcgcagacgccgctcttcgctcgctcaccgccgcttccttccacgggccatttcgtctccgtcgcccatgctcacctccttcaactctgtgaacccgcgatccgacgtgtagtgccgccgtactgcgcggcgacggcccaccggcgaggagccgccgacctatgcccctcggccagtccggcattggctaacccccaaatgcctcccgccgctaactagccgcagcctgtacatacacagacagacagacatacacaccgtaccggaggttgaagcggagaatcgatcccgacgcttcgccgccgctgtctcgtcgccggagaggagttttagcctcaaaggcgtgattttttgccttgttattttctagcttttttctttcgtgatttttggaccgtgttctcgcgatcgcgccggagagatgggagttgtggacttctcggtgctgggcgctctgcagaaggtcagatccttcgtcgccggcgccacgccggctgaagccgcagacggccggctgcccgccacgccgaggtcgcgcagcggggggccctccccagagaactcgcccccgcccgcggcgacgagatccggaggcaggcgcgccatcgccctgcgccggcagatatcctcgccggagctgctccgctgccgcgctgtcaggcgagcagatgatgaggatgatgatgagcccggggttcagtttttcacccatgggaatgacttcttacatgacttctcagatacagaatctgttagtgttagtacccctaatgatatcaaccgctccctgaccccaagccccttggagagcccgacttggatggtgaagcagaacgacagctcaccaatatccaggaagaatggccgtttcagcccggattctcctggatatggtacaaaggcaagtttaggatctgatggttcgccgcaacagataaatggtagcgtcactgacagtggtgacggaagcaaaactcagtatcctgttgaatttggtgccaatatatggtgcccaccaccaccagaagatgagggcgatgatatcgaatcgaggttatttggattccaggacgaggatgatgaggctggggactcaagcgggcttcttgtttctggtagctttagtgctaacaaaatagctgctattgacgaggtcacaaacactgctcaggaagagtgtctgaagactgcggtgctcggccatttccgagctcttgtggctcaattactgaaggcagaaggcattgatatgggaaaggatgatgggtccaaaggttggcttgatattgtgtcatccttaacttggcaagctgcaagctatgtgaggccagataccaagaaaggaggcagcatggatcctactgattatgtgaaggtcaaatgtatagcatcaggggatccaagagatagtaattttgttcgaggagttgtttgctccaagaatgtaaaacacaagcgcatggtctctgagcataggaatgcaaaattgctcattttagggggcgcacttgagtaccacagggttcctaataaattggcatctattggcaggatacttgaacaggagaaggagcacatgaaaatgattgttggaaagattgagtcccggcgacctaatgttgtgctagttgagaaaactgtctcatcttctgctcaggagctcttctccaaagacatttcgttagttctgaatgttaagaggacacttttggacagggtatcaaggtgcacaggggcacaaattgcttcatcagctgacagtattgcttcagtacggctaggtcaatgtgaagcgttcaaggtgcaaaaagttacagaattcccatcagctaaacagacaaataggagatcaagcaagacactgatgttctttgaaggctgcccttggcgtttgggttgcacggttctactgagagggtcatgtcgggaggagctcaagaggattaagcgtgctgtacaacttgcagtctttgctgcttatcacctttctcttgaaacatcattctttgcagatgaaggtgcaacacttcctaaattgccctcgagacatgtggtagttgatccagatacaaggaattgtacaaatagcaattcagctgcattgaccaatgttggtatgcctcatggacgtaaatcagaacatgacaaactctcacagactgctatggtcaacattatgtttgaaaatacccctgtgtcacctagttcattgccatcgaatggagaaggccacatgtttgtgggtgcatgtcagcataaagaaactgaatattctgttgatcataagaactcttgtgaacattgtgtatcccgtgcaactggttcatgcaacgggtatgaaacatctttatgttcatcagataatgattcaatgacacagaatcaaaatttgcagaactctgcaaagcttacatcaaatgctcaccaatatgagtttccagcaaaggaatgtcaacaagtagaccactgggatagacaaccacatgatgatcaatcagtagatcagcgggacctgaataaattttctggtgaatactttcctggttctgacaatcatcagagcatattagtttcgttgtccagtacgtgtatcccaaaaggcttggtatgcgagcgctcccatcttttccgcatcaagttttatggtagctttgataagccacttggtagatacctccgggacgacttatttgatgaggcatatcgctgtcagtcatgcaaagagccatcagaatcacatattaggcgttatactcaccagcatggtagcttaacaattagtgttcggaggcttcaatctcgaaagttgcctggtgagcgtgacggaaggatatggatgtggcacaggtgcctcaagtgcaaacctaaggatggtgttccacctgccacacggaggataatcatgtcagatgctgcctggggtctgtcgcttgggaaattcctagagctaagtttctcaaaccatgcttctgccaaccgagttgcaagctgtggacattcactccagagggactgccttcgtttttatgggtatggaaacatggtggcattcttcagatattctcctgttgacattctctcagttaaccttcctccaccagtactggacttcaattgttgtagtacacaagagtggctaaaaagggtggcagttgagatatttggcaaaatggaatccttgcatgtggaggtgtctgaatttcttcactgtactgaaaagaacattgtaactgaggatgaacctgtgagggaatgtgttcaaaggcagattatcgagatgaaggattggcttaaaatgcaaagaaatgaatatgagatgttgcttttaccagtcatgagggaaagcaatcaccccatgcagacatcaattgatattctggagctcaaccgcttgcggcgtggtcttcttcttgatgcttacatttgggatcggaggctatgccatatagactcggttcttaatacacatggccatatttcaaaaaccaatccagataatcttgatattctcctatgcaccagactgaaggagtggaaagctgatttgctttgtggggatactgagattgaaaaatctttagggagtccaaagaaatctttgttatccagagagggccatttgaatgataatgagtacagtgttgctgatacaaatttagagatttgtttggagggtcatcctgtggatgatgcagatgatcttgacaaagtctacaacaaattcagtggagtaaagaagcggcctactgctgaacctactgatggcttggaacctgttgagaggttaccctcacttgcatccattttctctgatactattgatttggcatggactgggtcttgtgatttgcagcatgatcttccacaagctttcaccaaaattgatgaaaatgtatcctttaatttggacagtccgaagtacagcaatttagtaacccctgttagaattcactcgtttagttctacgctggggttgcggcagagagaacgaactggattagttccagcttctttgcatctatcatcattcaaatctgctgagtacttcggagctatgagaagcatcctgaaggacccaatgccaaatatgcgaaggtcctgttctcaaaggtctcctgggacgatagagaaattaaatgttgttcttgcacgtaaacccacatatatctcatctacttcaaatattatcaatgatggggcacggctactgttaccccagactggatatgaacatgatgtcgttgttgcagtatacgaggatgagcccaccagtattatatcatatgccatgacatcagaagaatatgtagaacaagtaacacacagactgaattccagtttgagtttttctcatcaaccaaatactaatgggattagcagccatggacttgaggcgtcctctccatctcaaggagaccatttgcattccaagggaactcattttaagttatccttcgatgatgactcaccgatttctccagataaaacaaagttctctgtgatttgctattttgcaaagcattttgctgcgctgagaaagaaatgctgtcccaaagatattgattacatacgttctctaagtcgctgcaagagatggaacgcgcagggtggaaaaagcaatgtttactttgcaaagacactggatgaaaggttcataatcaaacaagtcacgagaacagagctggagtcttttgtagagtttgctcctcagtacttcaagtatttaatggaatccttggcttctggtagcccaacctgcctggccaaaatagtagggttatatcaggttggcgtcaagagcttgaaaactgggaaggaagtgaggatggatctgatggtgatggaaaatgttttctttgaaaggaagatatctcgggtgtatgacctaaagggttcattgcgctcacgctacacggctggggacagcaaagtcctcttggatgcaaacctcatagaggcattgcatacgaagcctatatttttggggagcaaggcaaaacgaagattggaaagagctgtctggaatgatacttcattccttgcgttggcggatgtgatggactactctctccttgttggcatcgacgaggagaagaaagagctcgtcatcggcatcatcgactacttgcgccaatacacctgggacaagcagctggagacgtgggtgaaggcctcgggcattcttggtggccccaagaacgaatcccccaccgtcatatctccaatgcagtacaagaagaggttcaggaaagccatgtccaagtacttcctcaccgtcccggaccagtggtcctcttgacggcctggctagctaacaagaattgtccgccttaaccagaagcgtttgccgtgccatgccatgccatgccatagtacatgtccgtcattctttctgtgcctagaccctagagagagagagagagagagagagaggtagtcaaattcattttgtgtccgcctgtaccatctgtagcagccatagataggggatcatcctccgactggggatgctggatgccaagcatatggtcactgcagtgtccagccacagatagagaggcttggtccatgactcccatctccatgtacattacggccagcatataatatgtctgaggagaaaaaaaaaggaaatctgtcgacgaaatgcagagaattcttttgatgcctttgtggcatgtatgcagactgtgaaggctattgcaatgtgtcacccccccgtaatttcgttgggagtagttgcggttcacctgccgtgagagtgaaagctattgcatgtatcactgagctcttgacggttcttgtcaaatactcctagttaagtttcacgcaacaatcagacatcatcttcttcgagtaatagtacactaacagtatggctacggcaggtctatgtcgtggagccacatagtctgctttaatccgtactggtttttactgttttcacagtgtttttgattctattgattgctgcagcagttctaagaggcgtcggcatgagag

SEQ ID NO: 3919 - DNA, 5999 bp, Zea Mays
ctctaatccgcccgccattactttcgcagacgccgctcttcgctcgctcaccgccgcttccttccacgggccatttcgtctccgtcgcccatgctcacctccttcaactctgtgaacccgcgatccgacgtgtagtgccgccgtactgcgcggcgacggcccaccggcgaggagccgccgacctatgcccctcggccagtccggcattggctaacccccaaatgcctcccgccgctaactagccgcagcctgtacatacacagacagacagacatacacaccgtaccggaggttgaagcggagaatcgatcccgacgcttcgccgccgctgtctcgtcgccggagaggagttttagcctcaaaggcgtgattttttgccttgttattttctagcttttttctttcgtgatttttggaccgtgttctcgcgatcgcgccggagagatgggagttgtggacttctcggtgctgggcgctctgcagaaggtcagatccttcgtcgccggcgccacgccggctgaagccgcagacggccggctgcccgccacgccgaggtcgcgcagcggggggccctccccagagaactcgcccccgcccgcggcgacgagatccggaggcaggcgcgccatcgccctgcgccggcagatatcctcgccggagctgctccgctgccgcgctgtcaggcgagcagatgatgaggatgatgatgagcccggggttcagtttttcacccatgggaatgacttcttacatgacttctcagatacagaatctgttagtgttagtacccctaatgatatcaaccgctccctgaccccaagccccttggagagcccgacttggatggtgaagcagaacgacagctcaccaatatccaggaagaatggccgtttcagcccggattctcctggatatggtacaaaggcaagtttaggatctgatggttcgccgcaacagataaatggtagcgtcactgacagtggtgacggaagcaaaactcagtatcctgttgaatttggtgccaatatatggtgcccaccaccaccagaagatgagggcgatgatatcgaatcgaggttatttggattccaggacgaggatgatgaggctggggactcaagcgggcttcttgtttctggtagctttagtgctaacaaaatagctgctattgacgaggtcacaaacactgctcaggaagagtgtctgaagactgcggtgctcggccatttccgagctcttgtggctcaattactgaaggcagaaggcattgatatgggaaaggatgatgggtccaaaggttggcttgatattgtgtcatccttaacttggcaagctgcaagctatgtgaggccagataccaagaaaggaggcagcatggatcctactgattatgtgaaggtcaaatgtatagcatcaggggatccaagagatagtaattttgttcgaggagttgtttgctccaagaatgtaaaacacaagcgcatggtctctgagcataggaatgcaaaattgctcattttagggggcgcacttgagtaccacagggttcctaataaattggcatctattggcaggatacttgaacaggagaaggagcacatgaaaatgattgttggaaagattgagtcccggcgacctaatgttgtgctagttgagaaaactgtctcatcttctgctcaggagctcttctccaaagacatttcgttagttctgaatgttaagaggacacttttggacagggtatcaaggtgcacaggggcacaaattgcttcatcagctgacagtattgcttcagtacggctaggtcaatgtgaagcgttcaaggtgcaaaaagttacagaattcccatcagctaaacagacaaataggagatcaagcaagacactgatgttctttgaaggctgcccttggcgtttgggttgcacggttctactgagagggtcatgtcgggaggagctcaagaggattaagcgtgctgtacaacttgcagtctttgctgcttatcacctttctcttgaaacatcattctttgcagatgaaggtgcaacacttcctaaattgccctcgagacatgtggtagttgatccagatacaaggaattgtacaaatagcaattcagctgcattgaccaatgttggtatgcctcatggacgtaaatcagaacatgacaaactctcacagactgctatggtcaacattatgtttgaaaatacccctgtgtcacctagttcattgccatcgaatggagaaggccacatgtttgtgggtgcatgtcagcataaagaaactgaatattctgttgatcataagaactcttgtgaacattgtgtatcccgtgcaactggttcatgcaacgggtatgaaacatctttatgttcatcagataatgattcaatgacacagaatcaaaatttgcagaactctgcaaagcttacatcaaatgctcaccaatatgagtttccagcaaaggaatgtcaacaagtagaccactgggatagacaaccacatgatgatcaatcagtagatcagcgggacctgaataaattttctggtgaatactttcctggttctgacaatcatcagagcatattagtttcgttgtccagtacgtgtatcccaaaaggcttggtatgcgagcgctcccatcttttccgcatcaagttttatggtagctttgataagccacttggtagatacctccgggacgacttatttgatgaggcatatcgctgtcagtcatgcaaagagccatcagaatcacatattaggcgttatactcaccagcatggtagcttaacaattagtgttcggaggcttcaatctcgaaagttgcctggtgagcgtgacggaaggatatggatgtggcacaggtgcctcaagtgcaaacctaaggatggtgttccacctgccacacggaggataatcatgtcagatgctgcctggggtctgtcgcttgggaaattcctagagctaagtttctcaaaccatgcttctgccaaccgagttgcaagctgtggacattcactccagagggactgccttcgtttttatggatattctcctgttgacattctctcagttaaccttcctccaccagtactggacttcaattgttgtagtacacaagagtggctaaaaagggtggcagttgagatatttggcaaaatggaatccttgcatgtggaggtgtctgaatttcttcactgtactgaaaagaacattgtaactgaggatgaacctgtgagggaatgtgttcaaaggcagattatcgagatgaaggattggcttaaaatgcaaagaaatgaatatgagatgttgcttttaccagtcatgagggaaagcaatcaccccatgcagacatcaattgatattctggagctcaaccgcttgcggcgtggtcttcttcttgatgcttacatttgggatcggaggctatgccatatagactcggttcttaatacacatggccatatttcaaaaaccaatccagataatcttgatattctcctatgcaccagactgaaggagtggaaagctgatttgctttgtggggatactgagattgaaaaatctttagggagtccaaagaaatctttgttatccagagagggccatttgaatgataatgagtacagtgttgctgatacaaatttagagatttgtttggagggtcatcctgtggatgatgcagatgatcttgacaaagtctacaacaaattcagtggagtaaagaagcggcctactgctgaacctactgatggcttggaacctgttgagaggttaccctcacttgcatccattttctctgatactattgatttggcatggactgggtcttgtgatttgcagcatgatcttccacaagctttcaccaaaattgatgaaaatgtatcctttaatttggacagtccgaagtacagcaatttagtaacccctgttagaattcactcgtttagttctacgctggggttgcggcagagagaacgaactggattagttccagcttctttgcatctatcatcattcaaatctgctgagtacttcggagctatgagaagcatcctgaaggacccaatgccaaatatgcgaaggtcctgttctcaaaggtctcctgggacgatagagaaattaaatgttgttcttgcacgtaaacccacatatatctcatctacttcaaatattatcaatgatggggcacggctactgttaccccagactggatatgaacatgatgtcgttgttgcagtatacgaggatgagcccaccagtattatatcatatgccatgacatcagaagaatatgtagaacaagtaacacacagactgaattccagtttgagtttttctcatcaaccaaatactaatgggattagcagccatggacttgaggcgtcctctccatctcaaggagaccatttgcattccaagggaactcattttaagttatccttcgatgatgactcaccgatttctccagataaaacaaagttctctgtgatttgctattttgcaaagcattttgctgcgctgagaaagaaatgctgtcccaaagatattgattacatacgttctctaagtcgctgcaagagatggaacgcgcagggtggaaaaagcaatgtttactttgcaaagacactggatgaaaggttcataatcaaacaagtcacgagaacagagctggagtcttttgtagagtttgctcctcagtacttcaagtatttaatggaatccttggcttctggtagcccaacctgcctggccaaaatagtagggttatatcaggttggcgtcaagagcttgaaaactgggaaggaagtgaggatggatctgatggtgatggaaaatgttttctttgaaaggaagatatctcgggtgtatgacctaaagggttcattgcgctcacgctacacggctggggacagcaaagtcctcttggatgcaaacctcatagaggcattgcatacgaagcctatatttttggggagcaaggcaaaacgaagattggaaagagctgtctggaatgatacttcattccttgcgttggcggatgtgatggactactctctccttgttggcatcgacgaggagaagaaagagctcgtcatcggcatcatcgactacttgcgccaatacacctgggacaagcagctggagacgtgggtgaaggcctcgggcattcttggtggccccaagaacgaatcccccaccgtcatatctccaatgcagtacaagaagaggttcaggaaagccatgtccaagtacttcctcaccgtcccggaccagtggtcctcttgacggcctggctagctaacaagaattgtccgccttaaccagaagcgtttgccgtgccatgccatgccatgccatagtacatgtccgtcattctttctgtgcctagaccctagagagagagagagagagagagagaggtagtcaaattcattttgtgtccgcctgtaccatctgtagcagccatagataggggatcatcctccgactggggatgctggatgccaagcatatggtcactgcagtgtccagccacagatagagaggcttggtccatgactcccatctccatgtacattacggccagcatataatatgtctgaggagaaaaaaaaaggaaatctgtcgacgaaatgcagagaattcttttgatgcctttgtggcatgtatgcagactgtgaaggctattgcaatgtgtcacccccccgtaatttcgttgggagtagttgcggttcacctgccgtgagagtgaaagctattgcatgtatcactgagctcttgacggttcttgtcaaatactcctagttaagtttcacgcaacaatcagacatcatcttcttcgagtaatagtacactaacagtatggctacggcaggtctatgtcgtggagccacatagtctgctttaatccgtactggtttttactgttttcacagtgtttttgattctattgattgctgcagcagttctaagaggcgtcggcatgagag

SEQ ID NO: 3920 - DNA, 195 bp, Zea Mays
cggcagaagaagcttctacattctgttcagcatcaatgagattattcacaacatcaacatgtacccatcttcctgttgatgcttgcccaccacagtatacctcagcccaatataatggagctccagcacttcttgaccaaactgcacttgagctggataaagcttccacattttgacgcaatttcttcaatggtg

SEQ ID NO: 3921 - DNA, 1304 bp, Zea Mays
tgtaaatccagcacggtgcatacccaatcagttcccgttcccctcgtcgacacctgcagtgccaagttgcatcgactcctccccggtcctccaccgcccgccgccgatggatgtggatgtggacgaggccaccgccacccctgcctccgcctctgccaagcccgcttccaacggcgaggccccctccggcgcccgcgaggtggatgtcggcgaggagtacacgctcgccggcgttctgcgcagcttcgtcgacggcgtctggtacccggacgagccgctgctccggcggctccgggcggcgtcctgcgaggccgcgccgcggctgaagggggcgtctcggaactcagcgcgggatctgctcgagtggacaaggcagggcagcggcctccgcgccatcctcgtcatctcgctcaaaacttgcatttcaaggtggagactggagagtgcatcttgtaagcggaaacaaaaacatggtggattactttcggtagcaacagagcatggttgattgctttcgcatgcagttttgatcccataaaactcttacatgataccttggtttggtatggcatccattttagcaattattgaaatttctcagtaaataaattttcctcattttacccttttctgatctggcaggtcgggacaatcatgcctatagcattgactggccttttaatcttcatgttctttctgctaattgccactgctaatgcgatcatcgtctcagccctgatgtcactggccgctgctggcggattcttggctatcttctttgcttgcttggttgcagtgtatattggagcagtaggagttgctatctttgccatttctgccattgtcatctcatcagttgttggagttatgattactactggttgggttgggttcttctggatgatctggttcaccgcaaggaagagcatggacctgacgaagcattccatcagcatgacgagctcggcagtccaatcctattccgcgtcccgccaagtgaagcagaagcatgtcgactgaggctagttggttgcgtcttgcgtcctgtatgaagaagccctcgggtcgatctgggtgaattacggtagacgacatgcttgttttggcagttctgtttttcacggacactaggtgcataaatactagctctgaacttcggcagcgtgtacgtttgtcacggcggccaatgctgttctgtatggtatagtgatcagatgattgtacattgtgcaggtatgcagtatgtacatgccgattcatgagttgataataaaactatcactatattttttttcctttttcca

SEQ ID NO: 3922 - DNA, 1816 bp, Zea Mays
cagcacggtgcatacccaatcagttcccgttcccctcgtcgacacctgcagtgccaagttgcatcgactcctccccggtcctccaccgcccgccgccgatggatgtggatgtggacgaggccaccgccacccctgcctccgcctctgccaagcccgcttccaacggcgaggccccctccggcgcccgcgaggtggatgtcggcgaggagtacacgctcgccggcgttctgcgcagcttcgtcgacggcgtctggtacccggacgagccgctgctccggcggctccgggcggcgtcctgcgaggccgcgccgcggctgaagggggcgtctcggaactcagcgcgggatctgctcgagtggacaaggcagggcagcggcctccgcgccatcctcgtcatctcggtgggcgcgcctcattgatccgtaacataagcacgggttttcatgtcctgtttactaaatctgactcgatgttctttaggtgattgcgtattggtacacttgttttactttgtgctatcagtcaattgggttactgtgtcatatagcattgaaatgttggtttatattggtactgtttaggtctcaggggccaaaatgtttacaagatctgtagagggaaatgaagaataggatgaattgtaatccctccttcctgaaatataataggtatatgcagggatggcaatggagaattgttcatcgcagaatagctccacacaggggcgaagctaggattcaaaattagaggggaccaaattagattagggggctattagaaacattttttgcactatttacataaaattagctaaagacctaagatatcctgcacatcccgtccccgtggcctctatgtttgccctaaatcaatctttaacatctacaacctcaaataggtaaacaataaaaatagatttagtacggtatcagggtttttaatactgctcatttagtatcgtaaatattatcggttttttctaaaaacttattaaactgagcttagtttgacgacttcggacagctcaaaacttgcatttcaaggtggagactggagagtgcatcttgtaagcggaaacaaaaacatggtggattactttcggtagcaacagagcatggttgattgctttcgcatgcagttttgatcccataaaactcttacatgataccttggtttggtatggcatccattttagcaattattgaaatttctcagtaaataaattttcctcattttacccttttctgatctggcaggtcgggacaatcatgcctatagcattgactggccttttaatcttcatgttctttctgctaattgccactgctaatgcgatcatcgtctcagccctgatgtcactggccgctgctggcggattcttggctatcttctttgcttgcttggttgcagtgtatattggagcagtaggagttgctatctttgccatttctgccattgtcatctcatcagttgttggagttatgattactactggttgggttgggttcttctggatgatctggttcaccgcaaggaagagcatggacctgacgaagcattccatcagcatgacgagctcggcagtccaatcctattccgcgtcccgccaagtgaagcagaagcatgtcgactgaggctagttggttgcgtcttgcgtcctgtatgaagaagccctcgggtcgatctgggtgaattacggtagacgacatgcttgttttggcagttctgtttttcacggacactaggtatgcagtatgtacatgccgattcatgagttgataataaaactatcactatattttttttcctttttcca

SEQ ID NO: 3923 - DNA, 467 bp, Zea Mays
gtgcaagatttatccctggatccaacttgcctcacctatatatcttccaagcaagacttgtgcacatagctggaccttctcttcttggtcatgcccttccctcccatcaattcttcaatgctgcgtaatccctactgaaagaggcaccaatcagccattctgcaacttgccttcccgtgcttgcctcactgacatgaactcatcgtctttcttcctctgatccataagatctggccaacaagatcggtggcgcacaggtatcgggtcatcacttggtctctgaattctcaggattggagttgaagaagagcatcatgcttggtgggcagagcgagaccgtcaagtacagggtctttgctggaacatggaacgtgggcggcttggcgccgccggatgacctggacttggaggattggctggacacgaagaacgactcctacgacatctatgttcttggtgaacgtttg

SEQ ID NO: 3924 - DNA, 3105 bp, Zea Mays
gtccaaccaaggaacccaagccaaactagctagcctgcactagcttgcacccttaagaaatacagcgagagagatgatgagagtggccgtggtcggtggtggcctaagcgggctagtggcggcgcatgagctggcgaggagcggcggcgcacgcgtcaccgtgtacgagaaggaggaccatctcggcggcgccaagaccgtcgccgtcaatggtggatcaggccctgttctggtcgacctcgacttcatggtcttcaaccgggtgacgttctcaaacatgatggaatggtttgaacgtctgggggtggaaatggagaaatcggacatgtcattctcagcaagcttacggttaaacgaaggtaaaggctttgagtggggtacccgcaatggtatatctagtgttctggtgcagaagagtaatttgcttagccccagattctggctcatgatcaatgagatattcaagttcaagaaccatgccctcaagtaccaagaggactatgcacgaaaccctgacaagaatgagactttcggtcaatttattcagtcacatagatattcacagctgttccaggatgcttaccttatcccaatgtgcgcatgcatttggtcctgtccaccacagaacatatttggcttccctgctggttttgtgctttcatttttttgtgataatcatcttctcgagttgtttagtcccctacagtggctaaatgtcaaaggtggttctgggtgctacgtgaaaaaggtaagagaggaattggagagcatgggttgtcaaattaaaaccggatgtgaagtgagatcagtttcaagatttaatggaggttaccggattttggaggctgatggctcagaagagatgtatgacaggatcatattttgtgttcatgctcctgatgctctaaaaatactaggagaagaagcaacacctcatgaacggagagttctaggagctttccagtatatctacagcgatttgtatttccactgtgatgaaagttttatgccacgtaattcttctgcatggagtgcgatgaacttcttggggactacaagcagtggtgtttgtgttacctactggttaaatatacttcagaacattgaatctgccggacctttccttgcaacacttaaccctcctcgtgttcccgatcatgtattgctaaaatggcacactaggcacccgattccttccatggctgctgcaagggctactcttgagctcaatagcatacaagggaagaggggaatatggttctgtgtcccatatcaacaaggttatggaaatcatgaggacagcgtgaaggctgggaaagcagtaactttagggttgcttggcaagaaatgtgaccttttggtgaacccgaaacccatgatcgtcccatcatggactgaggccggcgtacgatatatggtggcaaaaaatctaggaaaattcataaccattggtaacttcagcatgctcgaagatggaggcacttctcttagttttggcaaaacatgtgaaagatgtcaactaaaatgtgtgatacgggttcacaacccccagttctattggaagattgcaaccgaaggagaccctggttttgcatattcctacatcaatggttatatctcgtttgttgataaaaaagaaggcatccagaatattgtcgagattattattgctaacagaggtgaacggaaaaggttgagcagtacccgtgccaggaataaaagtggttatgtaaaaaagggctggtggacacccttgtttaaaaaaaatggagctgcaatggcaaaatatgttttgcatgaagtcttaaggagaaacactatatcaaaagctcgtaaaaatatctctgcacactatgacctggcggaagatgagagtttagaagcagcgcagctacgtaaacttgacaatctaattaataaggctaaggtggatccggggcatcatgtccttgacattggctgtggttggggctcgttagcaatacgtttggtgaagagaactggctgcaagtgcacgggaattacattatcggaggagcaactgaaatacggaaagagaaaggtgaaagaatttggattagaggaccacataactctcctgctttgtgattaccgtcaaataccgaacggccagaagtttgataggattataagttgtgggatgcttgaacacgttggccatgagttctacgaagatttctttgcctcctgcgagtatcatttggccgaacacggcctacttgtcctccagtccatcgcggtcccagaggaactgtacgacaaaatgaggacgaagcctgacttcctgaaggaatatatcttcccaggtggctgcataccttctttagctcggattgcatctgccatgtctaacgcatcaaggctgtgcatacaacacgttgagaatattgggtaccactattaccccactctgattcactggagggagaactttgaggctaatgaagaaaaagttttggccctaggatttgatgaaaaattcatccgtacttgggagtactatttaaactactgtgcagctatgttcaaatcacacatgggtttagattaccagatagtgtttgctcgcgcaggcgatgcgaagttgccgagctatgtcgccattgcgtaaatggaggaggacgtcgtgtttatgttttatatgtgagacagaacattgtattttctttgttagttaggaagtccaacattcgccaaataaaaatggtttgctagagatgactcgagggtgagacaagtgtcaaagccgcatgatgattaggttgtcaacttccgagagtttttcttggcggggcaaaggtttcctatgatcctttttgtattgaatgtgataaagaagtttaaggttaagtttcatcatttgaatcctttgtgattttctttttattttttttgtgtgggtacgaaagtctcaaaaggtagaagttaactagaacatgtttgtgcatacgtattgagtgcacattcaaccgaggaaggtgtctgtgtgtggtgtaaccttcacatgtcagttcaggccttcagggtttataccttttgttggctatttgttgaataacagtgctatcatgtgcagtgttcggc

SEQ ID NO: 3925 - DNA, 3116 bp, Zea Mays
aatacagcgagagagatgatgagagtggccgtggtcggtggtggcctaagcgggctagtggcggcgcatgagctggcgaggagcggcggcgcacgcgtcaccgtgtacgagaaggaggaccatctcggcggcgccaagaccgtcgccgtcaatggtggatcaggccctgttctggtcgacctcgacttcatggtcttcaaccgggtgacgttctcaaacatgatggaatggtttgaacgtctgggggtggaaatggagaaatcggacatgtcattctcagcaagcttacggttaaacgaaggtaaaggctttgagtggggtacccgcaatggtatatctagtgttctggtgcagaagagtaatttgcttagccccagattctggctcatgatcaatgagatattcaagttcaagaaccatgccctcaagtaccaagaggactatgcacgaaaccctgacaagaatgagactttcggtcaatttattcagtcacatagatattcacagctgttccaggatgcttaccttatcccaatgtgcgcatgcatttggtcctgtccaccacagaacatatttggcttccctgctggttttgtgctttcatttttttgtgataatcatcttctcgagttgtttagtcccctacagtggctaaatgtcaaaggtggttctgggtgctacgtgaaaaaggtaagagaggaattggagagcatgggttgtcaaattaaaaccggatgtgaagtgagatcagtttcaagatttaatggagaaacaggttaccggattttggaggctgatggctcagaagagatgtatgacaggatcatattttgtgttcatgctcctgatgctctaaaaatactaggagaagaagcaacacctcatgaacggagagttctaggagctttccagtatatctacagcgatttgtatttccactgtgatgaaagttttatgccacgtaattcttctgcatggagtgcgatgaacttcttggggactacaagcagtggtgtttgtgttacctactggttaaatatacttcagaacattgaatctgccggacctttccttgcaacacttaaccctcctcgtgttcccgatcatgtattgctaaaatggcacactaggcacccgattccttccatggctgctgcaagggctactcttgagctcaatagcatacaagggaagaggggaatatggttctgtgtcccatatcaacaaggttatggaaatcatgaggacagcgtgaaggctgggaaagcagtaactttagggttgcttggcaagaaatgtgaccttttggtgaacccgaaacccatgatcgtcccatcatggactgaggccggcgtacgatatatggtggcaaaaaatctaggaaaattcataaccattggtaacttcagcatgctcgaagatggaggcacttctcttagttttggcaaaacatgtgaaagatgtcaactaaaatgtgtgatacgggttcacaacccccagttctattggaagattgcaaccgaaggagaccctggttttgcatattcctacatcaatggttatatctcgtttgttgataaaaaagaaggcatccagaatattgtcgagattattattgctaacagaggtgaacggaaaaggttgagcagtacccgtgccaggaataaaagtggttatgtaaaaaagggctggtggacacccttgtttaaaaaaaatggagctgcaatggcaaaatatgttttgcatgaagtcttaaggagaaacactatatcaaaagctcgtaaaaatatctctgcacactatgacctgagtaatgatttctttgctctttttctggatccgacgatgacttactcttgtggtattttcaaggcggaagatgagagtttagaagcagcgcagctacgtaaacttgacaatctaattaataaggctaaggtggatccggggcatcatgtccttgacattggctgtggttggggctcgttagcaatacgtttggtgaagagaactggctgcaagtgcacgggaattacattatcggaggagcaactgaaatacggaaagagaaaggtgaaagaatttggattagaggaccacataactctcctgctttgtgattaccgtcaaataccgaacggccagaagtttgataggattataagttgtgggatgcttgaacacgttggccatgagttctacgaagatttctttgcctcctgcgagtatcatttggccgaacacggcctacttgtcctccagtccatcgcggtcccagaggaactgtacgacaaaatgaggacgaagcctgacttcctgaaggaatatatcttcccaggtggctgcataccttctttagctcggattgcatctgccatgtctaacgcatcaaggctgtgcatacaacacgttgagaatattgggtaccactattaccccactctgattcactggagggagaactttgaggctaatgaagaaaaagttttggccctaggatttgatgaaaaattcatccgtacttgggagtactatttaaactactgtgcagctatgttcaaatcacacatgggtttagattaccagatagtgtttgctcgcgcaggcgatgcgaagttgccgagctatgtcgccattgcgtaaatggaggaggacgtcgtgtttatgttttatatgtgagacagaacattgtattttctttgttagttaggaagtccaacattcgccaaataaaaatggtttgctagagatgactcgagggtgagacaagtgtcaaagccgcatgatgattaggttgtcaacttccgagagtttttcttggcggggcaaaggtttcctatgatcctttttgtattgaatgtgataaagaagtttaaggttaagtttcatcatttgaatcctttgtgattttctttttattttttttgtgtgggtacgaaagtctcaaaaggtagaagttaactagaacatgtttgtgcatacgtattgagtgcacattcaaccgaggaaggtgtctgtgtgtggtgtaaccttcacatgtcagttcaggccttcagggtttataccttttgttggctatttgttgaataacagtgctatcatgtgcagtgttcggc

SEQ ID NO: 3926 - DNA, 968 bp, Zea Mays
tacactccaatccacctcaatacatgtggactgaggtgaatacgaaagtacccaaacaatgcctatatggtcactaagaatactgttttgtatcgttttgtgttgtagattgtactgtttatagagtaatttggatatgagtatgaatatggataaatgaagatggtcttatgccaaaagaacaacttcaacgagtcccattttggcaaggcttcggagtaccaaactggcgaattgcgacgttggcggaattgtaaagatctcggtaaagaaggacgtggattcgtacacaatccgcggcactaacaaggtcgtccatgtgggcgactgcgtgctgatgcgggcgtcggactcggacaagcagccgtatgtggcgcgggtggagaagatggaggccgacggacgcggcagcgtgcgggtgcaggtgcgctggtactaccgccctgaggaatccaagggcggtcgccggcagttccacggcgccaaggagcttttcctttccgatcatttcgacctacagagcgcccacaccatcgaggggaaatgtgttgtccactctttcaagaactacaccaagcttgataatgtcgggcctgaggacttcttctcccgatttgagtacaaggcggccaccggttcgttcacccctgaccgcgtggcagtgtattgcaaatgtgagatgccatacaacccggatgacctcatggtgcagtgcgaagcttgcaaggactggttccatccatcttgcatggctatgaccattgaacaggccaaaaaactagatcactttgtttgctcagactgtttgaaagaaaatggttcaaagagactttcaaatgtatatgccacttcatcaaattcttagcccaaggatgaatcaataaggcagacgaggtgaaaactgagtgccaacatccaggggagatgtgctgcttctgtggcgaatcagcccttgcactggcgagagc

SEQ ID NO: 3927 - DNA, 860 bp, Zea Mays
aacttcaacgagtcccattttggcaaggcttcggagtaccaaactggcgaattgcgacgttggcggaattgtaatggcaataattccttcctccttcgttccccatttctcctctttctaggtttctacccctcatcggtcctcgctccacggccatggtgaggatgaagcaggtaaagatctcggtaaagaaggacgtggattcgtacacaatccgcggcactaacaaggtcgtccatgtgggcgactgcgtgctgatgcgggcgtcggactcggacaagcagccgtatgtggcgcgggtggagaagatggaggccgacggacgcggcagcgtgcgggtgcaggtgcgctggtactaccgccctgaggaatccaagggcggtcgccggcagttccacggcgccaaggagcttttcctttccgatcatttcgacctacagagcgcccacaccatcgaggggaaatgtgttgtccactctttcaagaactacaccaagcttgataatgtcgggcctgaggacttcttctcccgatttgagtacaaggcggccaccggtattgcaaatgtgagatgccatacaacccggatgacctcatggtgcagtgcgaagcttgcaaggactggttccatccatcttgcatggctatgaccattgaacaggccaaaaaactagatcactttgtttgctcagactgtttgaaagaaaatggttcaaagagactttcaaatgtatatgccacttcatcaaattcttagcccaaggatgaatcaataaggcagacgaggtgaaaactgagtgccaacatccaggggagatgtgctgcttctgtggcgaatcagcccttgcactggcgagagc

SEQ ID NO: 3928 - DNA, 251 bp, Zea Mays
atgagtttcaacaaagttccatccatcttgcatggctatgaccattgaacaggccaaaaaactagatcactttgtttgctcagactgtttgaaagaaaatggttcaaagagactttcaaatgtatatgccacttcatcaaattcttagcccaaggatgaatcaataaggcagacgaggtgaaaactgagtgccaacatccaggggagatgtgctgcttctgtggcgaatcagcccttgcactggcgagagc

SEQ ID NO: 3929 - DNA, 1662 bp, Zea Mays
ccgcttccctccactccaccaccactcgtccactcctcctccacgtcaagcgaagccactcctgatcgccgatcgctcgccaactcacgcggaccgcccctcgagctgcaacgaccggcctcccttgctccggctcccaccgagcctcgatcgatcgccgcagcagtcgccaatggctgatgcagtggagagccgcggcgggcgggcgcgcctggtctcggacctgggccgcgtgcaggacctggtgcgccagctcgagctgcagctgcgcgcgcccggggacgcagcctccgtcgacctctgccgccgcctcgtccaccagatcgtcgcgctcaccgacagctccatcggcatgctccgctcgtccccggacctcgcctcgccgctgcccgccaccgggaccgggagcccgatcagcagcgacgccgcctccgaccaccccttccgcgccgccgccagcgccagcgccagccccaagaagcgcaaggccacggcgcgctggaccagccagcaggcgcgcgtcagcgccgcgggcggcagcggcgccgagggccccgtcgacgacggctacagctggcgcaagtacggccagaaggacatcctcggcgccaagcacccgcgggcctactaccgctgcacgcaccgcaactcgcagaactgcccggccaccaagcaggtgcagcgcaccgacgaccacccggcgctcttcgacgtcgtctaccacggcgagcacacctgcaggcccgccgccgccgccgccggcggcggctccaagagggcggcacagcagcacaacccgcacgcgcaggccgcgctgcagggcctcgccgcgcgcctcacggtggccaccgccacggacgccgccgcgctcccgcccatgacgcccgagagctgccccgtgcggggcgcctcatccccgtggtcgctcgcgtcgtctgtcgcctccgactccaacggctgcatgcaccaggacgtctcgccgtgcccggtacccgggtacagggaatggacctcggacggcgacctccaggaggtggtgtcatctgcgttcgccgccgtctcgtcggttgcgcccctgccggtgctcgacgacgaattcatgcctctcgagtgctttggattcgaccataccttcgacattgacaccgcaatgccaagcctctactatccatgaggagaagagcgtccaatacaagtcgacattattgacaccgcagtgccaagcctctgctatccattaggagaagagcatcaaatacacgtctgatcggatcggcagcagccctgtcgtcgtctccatgacaggagggaggagcagaggagcctcttcctaagaactgtgcagtagcagaagccaacagggcttttagaacatcttaatgaatagcttgtttcattaccttttgtttccttctttctttactttttttgtgtcagttctcaacttgcttgatcgggttttgttgatttcagtcagcaagataaatgttaaattttactacttacggtgcaatcagtttcaatctcataaatgataaatcatcttctcttgaaattgtttcactttcatgtttgcacaccacctaaccttagagagcaacaaatcgtaaaacgcattcaacgaccaagttaaaatcaaacttgcaacatcttaaccataac

SEQ ID NO: 3930 - DNA, 275 bp, Zea Mays
ccacaaaggaagatcctgattagagaacagtatgaacagcccatccaagccagacttacacagctaggctagggattccttaccagtagtagaagaagaagccaatccgggtgcaaaatgggatggggatgtatggatctcgctcaaacgcacgagggcggcggcgcgagagcgggagggagaagtgcgcctatgaaggccgaaagggacacacggcaggccgagtgcctgcgtcgtgtgcagtttcgtgtggatccgcggactggctctacgcg

SEQ ID NO: 3931 - DNA, 2004 bp, Zea Mays
ctaaacctctaatcattttagacccatatgttaactctttatttgttgctttattacttgtagcaaatatttgttcctctctttgccttgcagacaaatagcacacagcaatcaaccgtcgtcttcttcctcgacgcctcataggctcatagggttctccaaattctaaatcgttgcaagcgaaaccaccaaaactgtactcacaaccctcgtctgcgctgcgccaccactcccccgtggcggcttgtagttgtagaagttcccggaaccagacaacccctaggcgctgagttttctgatagcggcttcggatatctcgtcgtgggcggccatggcgggcccgtgctgagtgcggggcgggagcaggtgaaggtctccgagctcgagatctcgatgcagattcgggagggcccggcgcggcggcaggcgccgtccgccgctggggcgctgcggtcgcccatgtccgccatgatgctcgctatgttcgctactatggcctccttctacgtcgccggtcgattgtggcaggatgctcagaaccgacttcatctcattaaggagctcgacagacgaacaggccaggggcaatcagcaatatctgtggatgataccttgaaggttgttgcatgcaggcagcaagggaagcggttggcatcacttgagatggagctggctgcagcaaagcataaaggttttgttggcaaatatactcctgagacaaatggaactcattctgggaaaaagccactgattgttattggaataatgagtagctttgggaggaaaaactaccgtgatgctgtcaggaaatcatggcttccaacaggttcaatgctgaagaaactagaagaagaaaaaggcattgtagtacgttttgttgttggaagaagtgcaaatcgaggtgatactttcgatagggagattgatgacgaaaataggagcaccaaggatttcttgatattggatgatcatatagaatctgatgaagagcttcctaagaagacaaaaagtttctttgctaatgcagcagaaacattcaatgctgcattttatgctaaggtcaatgatgatatatacataaatgtcgatactttgagtgcaatgctcgaaactcactgggacaggcctcgtgtctatataggttgcatgaaatcgggcgaggttttctctgacttaacccacaagtggtacgaatcagactggtggaaatttggtgatgggaaatcgtactttcgacacgcttctggtgaaatgtttgtcatatccagggccatagctcagttcatttctataaacaagtccgctctccggacatatgcccatgatgatgttagtgttggatcgtggatgattggccttgccgtgaatcatgtaaatgaagcaaaactgtgctgttcatcgtggccctcaggcttgattcggaacggctgaatcagcagccaaagttccgctgaactttggcacgacatacataggtggcatccaaacatgccctgaggttcctcactggtcctgatcaaggtgcgttatgttcagcgctataacgagcaacaatgcttaatgaggaagagttttgcaaacactgtgcctgttggatcgaatcggtattgggaaaattttgttttcttctgccatcttgtgtagtcctttggaggaggcttgtacgagccagttcatactgattactggatcggatatcttgtttttcttttccaaaggaaaggtcttgcatattttctttgcaaggccactacactagaatcatgagttctgacgaaaagccctctgcagattgtatcctgttccgcgtgccatttgtagatgccccaccctttaccattcttttttctgacagacactgccattgttggagtgacagaaatcaatagcaattcgggagattactttgctccagaatacatttatgcgtaatgcgtgtcttcagacctgttgccatggttgtgattttttgacacatacataatgatgccctcttgaagtcaa

SEQ ID NO: 3932 - DNA, 1367 bp, Zea Mays
caaatatttgttcctctctttgccttgcagacaaatagcacacagcaatcaaccgtcgtcttcttcctcgacgcctcataggctcatagggttctccaaattctaaatcgttgcaagcgaaaccaccaaaactgtactcacaaccctcgtctgcgctgcgccaccactcccccgtggcggcttgtagttgtagaagttcccggaaccagacaacccctaggcgctgagttttctgatagcggcttcggatatctcgtcgtgggcggccatggcgggcccgtgctgagtgcggggcgggagcaggtgaaggtctccgagctcgagatctcgatgcagattcgggagggcccggcgcggcggcaggcgccgtccgccgctggggcgctgcggtcgcccatgtccgccatgatgctcgctatgttcgctactatggcctccttctacgtcgccggtcgattgtggcaggatgctcagaaccgacttcatctcattaaggagctcgacagacgaacaggccaggggcaatcagcaatatctgtggatgataccttgaaggttgttgcatgcaggcagcaagggaagcggttggcatcacttgagatggagctggctgcagcaaagcataaaggttttgttggcaaatatactcctgagacaaatggaactcattctgggaaaaagccactgattgttattggaataatgagtagctttgggaggaaaaactaccgtgatgctgtcaggaaatcatggcttccaacaggttcaatgctgaagaaactagaagaagaaaaaggcattgtagtacgttttgttgttggaagaagtgcaaatcgaggtgatactttcgatagggagattgatgacgaaaataggagcaccaaggatttcttgatattggatgatcatatagaatctgatgaagagcttcctaagaagacaaaaagtttctttgctaatgcagcagaaacattcaatgctgcattttatgctaaggtcaatgatgatatatacataaatgtcgatactttgagtgcaatgctcgaaactcactgggacaggcctcgtgtctatataggttgcatgaaatcgggcgaggttttctctgacttaacccacaagtggtacgaatcagactggtggaaatttggtgatgggaaatcgtactttcgacacgcttctggtgaaatgtttgtcatatccagggccatagctcagttcatttctataaacaagtccgctctccggacatatgcccatgatgatgttagtgttggatcgtggatgattggccttgccgtgaatcatgtaaatgaagcaaaactgtgctgttcatcgtggccctcaggtcctgggttcgagcccca

SEQ ID NO: 3933 - DNA, 1952 bp, Zea Mays
caaatatttgttcctctctttgccttgcagacaaatagcacacagcaatcaaccgtcgtcttcttcctcgacgcctcataggctcatagggttctccaaattctaaatcgttgcaagcgaaaccaccaaaactgtactcacaaccctcgtctgcgctgcgccaccactcccccgtggcggcttgtagttgtagaagttcccggaaccagacaacccctaggcgctgagttttctgatagcggcttcggatatctcgtcgtgggcggccatggcgggcccgtgctgagtgcggggcgggagcaggtgaaggtctccgagctcgagatctcgatgcagattcgggagggcccggcgcggcggcaggcgccgtccgccgctggggcgctgcggtcgcccatgtccgccatgatgctcgctatgttcgctactatggcctccttctacgtcgccggtcgattgtggcaggatgctcagaaccgacttcatctcattaaggagctcgacagacgaacaggccaggggcaatcagcaatatctgtggatgataccttgaaggttgttgcatgcaggcagcaagggaagcggttggcatcacttgagatggagctggctgcagcaaagcataaaggttttgttggcaaatatactcctgagacaaatggaactcattctgggaaaaagccactgattgttattggaataatgagtagctttgggaggaaaaactaccgtgatgctgtcaggaaatcatggcttccaacaggttcaatgctgaagaaactagaagaagaaaaaggcattgtagtacgttttgttgttggaagaagtgcaaatcgaggtgatactttcgatagggagattgatgacgaaaataggagcaccaaggatttcttgatattggatgatcatatagaatctgatgaagagcttcctaagaagacaaaaagtttctttgctaatgcagcagaaacattcaatgctgcattttatgctaaggtcaatgatgatatatacataaatgtcgatactttgagtgcaatgctcgaaactcactgggacaggcctcgtgtctatataggttgcatgaaatcgggcgaggttttctctgacttaacccacaagtggtacgaatcagactggtggaaatttggtgatgggaaatcgtactttcgacacgcttctggtgaaatgtttgtcatatccagggccatagctcagttcatttctataaacaagtccgctctccggacatatgcccatgatgatgttagtgttggatcgtggatgattggccttgccgtgaatcatgtaaatgaagcaaaactgtgctgttcatcgtggccctcaggcttgattcggaacggctgaatcagcagccaaagttccgctgaactttggcacgacatacataggtggcatccaaacatgccctgaggttcctcactggtcctgatcaaggtcctgtttaggtgcgttatgttcagcgctataacgagcaacaatgcttaatgaggaagagttttgcaaacactgtgcctgttggatcgaatcggtattgggaaaattttgttttcttctgccatcttgtgtagtcctttggaggaggcttgtacgagccagttcatactgattactggatcggatatcttgtttttcttttccaaaggaaaggtcttgcatattttctttgcaaggccactacactagaatcatgagttctgacgaaaagccctctgcagattgtatcctgttccgcgtgccatttgtagatgccccaccctttaccattcttttttctgacagacactgccattgttggagtgacagaaatcaatagcaattcgggagattactttgctccagaatacatttatgcgtaatgcgtgtcttcagacctgttgccatggttgtgattttttgacacatacataatgatgccctcttgaagtcaa

SEQ ID NO: 3934 - DNA, 2060 bp, Zea Mays
caaatatttgttcctctctttgccttgcagacaaatagcacacagcaatcaaccgtcgtcttcttcctcgacgcctcataggctcatagggttctccaaattctaaatcgttgcaagcgaaaccaccaaaactgtactcacaaccctcgtctgcgctgcgccaccactcccccgtggcggcttgtagttgtagaagttcccggaaccagacaacccctaggcgctgagttttctgatagcggcttcggatatctcgtcgtgggcggccatggcgggcccgtgctgagtgcggggcgggagcaggtgaaggtctccgagctcgagatctcgatgcagattcgggagggcccggcgcggcggcaggcgccgtccgccgctggggcgctgcggtcgcccatgtccgccatgatgctcgctatgttcgctactatggcctccttctacgtcgccggtcgattgtggcaggatgctcagaaccgacttcatctcattaaggagctcgacagacgaacaggccaggggcaatcagcaatatctgtggatgataccttgaaggttgttgcatgcaggcagcaagggaagcggttggcatcacttgagatggagctggctgcagcaaagcataaaggttttgttggcaaatatactcctgagacaaatggaactcattctgggaaaaagccactgattgttattggaataatgagtagctttgggaggaaaaactaccgtgatgctgtcaggaaatcatggcttccaacaggttcaatgctgaagaaactagaagaagaaaaaggcattgtagtacgttttgttgttggaagaagtgcaaatcgaggtgatactttcgatagggagattgatgacgaaaataggagcaccaaggatttcttgatattggatgatcatatagaatctgatgaagagcttcctaagaagacaaaaagtttctttgctaatgcagcagaaacattcaatgctgcattttatgctaaggtcaatgatgatatatacataaatgtcgatactttgagtgcaatgctcgaaactcactgggacaggcctcgtgtctatataggttgcatgaaatcgggcgaggttttctctgacttaacccacaagtggtacgaatcagactggtggaaatttggtgatgggaaatcgtactttcgacacgcttctggtgaaatgtttgtcatatccagggccatagctcagttcatttctataaacaagtccgctctccggacatatgcccatgatgatgttagtgttggatcgtggatgattggccttgccgtgaatcatgtaaatgaagcaaaactgtgctgttcatcgtggccctcagccaggccaaatttcatccgttgaccgaggaggctctgccgcttttggatgtgtgctgtttttttgggttatcggactgctatgactaatctccagtttcaaatttgatgcccctcccaggcttgattcggaacggctgaatcagcagccaaagttccgctgaactttggcacgacatacataggtggcatccaaacatgccctgaggttcctcactggtcctgatcaaggtgcgttatgttcagcgctataacgagcaacaatgcttaatgaggaagagttttgcaaacactgtgcctgttggatcgaatcggtattgggaaaattttgttttcttctgccatcttgtgtagtcctttggaggaggcttgtacgagccagttcatactgattactggatcggatatcttgtttttcttttccaaaggaaaggtcttgcatattttctttgcaaggccactacactagaatcatgagttctgacgaaaagccctctgcagattgtatcctgttccgcgtgccatttgtagatgccccaccctttaccattcttttttctgacagacactgccattgttggagtgacagaaatcaatagcaattcgggagattactttgctccagaatacatttatgcgtaatgcgtgtcttcagacctgttgccatggttgtgattttttgacacatacataatgatgccctcttgaagtcaa

SEQ ID NO: 3935 - DNA, 494 bp, Zea Mays
tatggcactgggtgcgttatgttcagcgctataacgagcaacaatgcttaatgaggaagagttttgcaaacactgtgcctgttggatcgaatcggtattgggaaaattttgttttcttctgccatcttgtgtagtcctttggaggaggcttgtacgagccagttcatactgattactggatcggatatcttgtttttcttttccaaaggaaaggtcttgcatattttctttgcaaggccactacactagaatcatgagttctgacgaaaagccctctgcagattgtatcctgttccgcgtgccatttgtagatgccccaccctttaccattcttttttctgacagacactgccattgttggagtgacagaaatcaatagcaattcgggagattactttgctccagaatacatttatgcgtaatgcgtgtcttcagacctgttgccatggttgtgattttttgacacatacataatgatgccctcttgaagtcaa

SEQ ID NO: 3936 - DNA, 1387 bp, Zea Mays
cttctctagaaagcgacaccaaagtcttctccctctccctcccgcggttccgcccgccacgcctcctctattccaggagtcttctagaggtgaagagggaccacaggtccacagccgcggcagcaccgccacctacgccggcagaatccttgatcgagacaggagcggacgtggcctagggtttctgagccaggccggcgccatggtgggctgctctaggggctccctccccacctggatgaccgccgccgccgcgcgggtcgacctctctggcggcgtaacgccttcgcaccagggctcgccctctccacctcactcctcctcgggtcccgctccggccgcgggggcggaccagcagcttgggttgttcgagcgcgcgctctccgccgccggcgccgccttcgtctcagctatcatcgtcaaccctctcgatgttgccaagacgaggctgcaggctcaggccgcaggggtgctgtaccaccagcctgcccagatggcggcgctcggccccgatatcctgtctgaattcagatgttctccttcatgcacacgtggtctcttactaggaagtgagccagtttgtcctcctgattgcttccagtacaagggaacacttgatgtattcttgaaagtggttagacaggagggtttcagtagactatggagaggaacaaatgcaggcttagcattagctgtacccactgttgggatatacttgccttgttatgatatattccgcaacggcattgaggatttcacaagaagtaatgctcctggcttgacaccatatgccccactagtagcaggatcagttgcacgttcgttagcatgcattgcttgttctccaattgagttggcaaggacgcgtatgcaggcatataaagagtttcgtcctggattaaagcctcctggaatgtggaaaaccttggttggtgttctcccaccacttgcaggttctagtcagaatgtacaaaattatcgtgttctgtggactggggtgggtgcacaactggctcgagatgttcctttctccgctatatgctggtcaactcttgagcctattcgaagacaactgcttggtcttcttggagaagacggcaatgcagccagtgtattgggtgcaaattttgctgctggttttgtagcaggcagtcttgctgctggtgctacatgcccgttggatgttgcaaaaacaaggagacagatagagaaggatactgaaaaggcaatgaggatgactacaaggcaaacgttaactgagatatggaggtctggaggcttgaaagggctgttcaccggcgtcggcccacgtgttgcacgtgctggtccatcagttggtatcgtcgtttccttctacgagggagcaggcgtagtgagcagtgtgttg

SEQ ID NO: 3937 - DNA, 1357 bp, Zea Mays
ctctagaaagcgacaccaaagtcttctccctctccctcccgcggttccgcccgccacgcctcctctattccaggagtcttctagaggtgaagagggaccacaggtccacagccgcggcagcaccgccacctacgccggcagaatccttgatcgagacaggagcggacgtggcctagggtttctgagccaggccggcgccatggtgggctgctctaggggctccctccccacctggatgaccgccgccgccgcgcgggtcgacctctctggcggcgtaacgccttcgcaccagggctcgccctctccacctcactcctcctcgggtcccgctccggccgcgggggcggaccagcagcttgggttgttcgagcgcgcgctctccgccgccggcgccgccttcgtctcagctatcatcgtcaaccctctcgatgttgccaagacgaggctgcaggctcaggccgcaggggtgctgtaccaccagcctgcccagatggcggcgctcggccccgatgcaatcctgtctgaattcagatgttctccttcatgcacacgtggtctcttactaggaagtgagccagtttgtcctcctgattgcttccagtacaagggaacacttgatgtattcttgaaagtggttagacaggagggtttcagtagactatggagaggaacaaatgcaggcttagcattagctgtacccactgttgggatatacttgccttgttatgatatattccgcaacggcattgaggatttcacaagaagtaatgctcctggcttgacaccatatgccccactagtagcaggatcagttgcacgttcgttagcatgcattgcttgttctccaattgagttggcaaggacgcgtatgcaggcatataaagagtttcgtcctggattaaagcctcctggaatgtggaaaaccttggttggtgttctcccaccacttgcaggttctagtcagaatgtacaaaattatcgtgttctgtggactggggtgggtgcacaactggctcgagatgttcctttctccgctatatgctggtcaactcttgagcctattcgaagacaactgcttggtcttcttggagaagacggcaatgcagccagtgtattgggtgcaaattttgctgctggttttgtagcaggcagtcttgctgctggtgctacatgcccgttggatgttgcaaaaacaaggagacagatagagaaggatactgaaaaggcaatgaggatgactacaaggcaaacgttaactgagatatggagccaccccttctccagtgtcgtcatcccttcttcatcaccaacgccgtcatctcctgccgccctgttgtgctctggtggccctctgctc

SEQ ID NO: 3938 - DNA, 1351 bp, Zea Mays
ctctagaaagcgacaccaaagtcttctccctctccctcccgcggttccgcccgccacgcctcctctattccaggagtcttctagaggtgaagagggaccacaggtccacagccgcggcagcaccgccacctacgccggcagaatccttgatcgagacaggagcggacgtggcctagggtttctgagccaggccggcgccatggtgggctgctctaggggctccctccccacctggatgaccgccgccgccgcgcgggtcgacctctctggcggcgtaacgccttcgcaccagggctcgccctctccacctcactcctcctcgggtcccgctccggccgcgggggcggaccagcagcttgggttgttcgagcgcgcgctctccgccgccggcgccgccttcgtctcagctatcatcgtcaaccctctcgatgttgccaagacgaggctgcaggctcaggccgcaggggtgctgtaccaccagcctgcccagatggcggcgctcggccccgatatcctgtctgaattcagatgttctccttcatgcacacgtggtctcttactaggaagtgagccagtttgtcctcctgattgcttccagtacaagggaacacttgatgtattcttgaaagtggttagacaggagggtttcagtagactatggagaggaacaaatgcaggcttagcattagctgtacccactgttgggatatacttgccttgttatgatatattccgcaacggcattgaggatttcacaagaagtaatgctcctggcttgacaccatatgccccactagtagcaggatcagttgcacgttcgttagcatgcattgcttgttctccaattgagttggcaaggacgcgtatgcaggcatataaagagtttcgtcctggattaaagcctcctggaatgtggaaaaccttggttggtgttctcccaccacttgcaggttctagtcagaatgtacaaaattatcgtgttctgtggactggggtgggtgcacaactggctcgagatgttcctttctccgctatatgctggtcaactcttgagcctattcgaagacaactgcttggtcttcttggagaagacggcaatgcagccagtgtattgggtgcaaattttgctgctggttttgtagcaggcagtcttgctgctggtgctacatgcccgttggatgttgcaaaaacaaggagacagatagaggatactgaaaaggcaatgaggatgactacaaggcaaacgttaactgagatatggagccaccccttctccagtgtcgtcatcccttcttcatcaccaacgccgtcatctcctgccgccctgttgtgctctggtggccctctgctc

SEQ ID NO: 3939 - DNA, 1891 bp, Zea Mays
ctctagaaagcgacaccaaagtcttctccctctccctcccgcggttccgcccgccacgcctcctctattccaggagtcttctagaggtgaagagggaccacaggtccacagccgcggcagcaccgccacctacgccggcagaatccttgatcgagacaggagcggacgtggcctagggtttctgagccaggccggcgccatggtgggctgctctaggggctccctccccacctggatgaccgccgccgccgcgcgggtcgacctctctggcggcgtaacgccttcgcaccagggctcgccctctccacctcactcctcctcgggtcccgctccggccgcgggggcggaccagcagcttgggttgttcgagcgcgcgctctccgccgccggcgccgccttcgtctcagctatcatcgtcaaccctctcgatgttgccaagacgaggctgcaggctcaggccgcaggggtgctgtaccaccagcctgcccagatggcggcgctcggccccgatgcaatcctgtctgaattcagatgttctccttcatgcacacgtggtctcttactaggaagtgagccagtttgtcctcctgattgcttccagtacaagggaacacttgatgtattcttgaaagtggttagacaggagggtttcagtagactatggagaggaacaaatgcaggcttagcattagctgtacccactgttgggatatacttgccttgttatgatatattccgcaacggcattgaggatttcacaagaagtaatgctcctggcttgacaccatatgccccactagtagcaggatcagttgcacgttcgttagcatgcattgcttgttctccaattgagttggcaaggacgcgtatgcaggcatataaagagtttcgtcctggattaaagcctcctggaatgtggaaaaccttggttggtgttctcccaccacttgcaggttctagtcagaatgtacaaaattatcgtgttctgtggactggggtgggtgcacaactggctcgagatgttcctttctccgctatatgctggtcaactcttgagcctattcgaagacaactgcttggtcttcttggagaagacggcaatgcagccagtgtattgggtgcaaattttgctgctggttttgtagcaggcagtcttgctgctggtgctacatgcccgttggatgttgcaaaaacaaggagacagatagaggatactgaaaaggcaatgaggatgactacaaggcaaacgttaactgagatatggaggtctggaggcttgaaagggctgttcaccggcgtcggcccacgtgttgcacgtgctggtccatcagttggtatcgtcgtttccttctacgaggttgtcaagtatgctattcatcaaaggcacacctcatgatccagtttttagttgaaaaagggatggaagccctttcactttgtaaaaacaacaccgaccccggtttccgaaagtaggcctcgttactctgaccttttggacggtcagggctaggtgtaacatcagagtgctcaacagtcgactcaacagcctttttcgtcgacaatgtccatctcggtggaggataacatatcagttttgcctggcaggttttggatcattgcctaatcttatgtttgggcggatctgaagctgctttgtttaacttgttaggtagtctctgtaattgaaggtgtagtagcgcatacgctgatcaaataataataccctcggaactacagaagaaatcttgcacatcctagtctgatgctttctcccaaccatgtcttagtttcaagtttgcaactaggttattttgtcggttagatgttatatgcgtgtacgatcgttgttcaacaaagtttatattgcttaaagaagcgtttgcagcaaagt

SEQ ID NO: 3940 - DNA, 2695 bp, Zea Mays
aacccagcctagcgtcgcgtggcctccttccgttactctcctcccaccactctcagatctccccacccctccccgtctcgtgtcgccaccgcccccaaaccctatccccgcctcgttggatcgggtcagacctcggcttcacgccacgaggagcagcggtggcgcccgctgcgtcgatgcggagctctatcgcgacctaccgggagagcctgtctcggctcgccggcgaggtcgacgacgccgctgccgacgaggtccctgggccgccgctcgccccggcagctaggggcgtcgacatatccgccacaccaccgtcgtcgggaaggcgccgacggtactcccgccctggccccggctccgatgccaccgagcccgacgagatttctaaactgagggatgacattcaaaagcttcaagcttctgaggctgaaataaaggcactatctttcaattatgctgcaatgttgaaggaaaaagaggagcaactgggaaaacttcgtgaagaaaatgggtctcttaaaagaagcttggagagctgtaaggcagtttcagccaattctaatggcactttggaaagatcacctagagtgcaaaggaatgcagttcaggaaaattcattgaatctcaccaagcagaacggatatggtggtggttcttctcacagtacccagacaaatggtctgcatccaatggcaggttatcagaagggaagtatatcggaggaagagagatcatcctttactaccaagcaggctagtcttgaaaatgaaatcaaacaattgaaacagcagctcagcaataattctgagaaagaaactgaaattaggaggaggctagaagatgaaaccaagcggagtgaatttcttcagcagcaactaaatgagctcaagatggacaaagagaggatgacaactagcatggaagagctacaaaaggaactgagtgagaagaaatcagagtttagacgtgttcaggatgagcaaagcaaaagggacaaggagcacgtctcggacggatctcttcagagcctaagaaatatgttgatggctttacagaaggagaactctagcctaaagatagagaaagtcaagcttgatgcagatctcaagagtatgaagagtacctcacaaaaaactgttgacagtacattagatgctaacaagatttctgacttggaaaagttctactgtgaaggttaagaaagagatggactctttgaaaagagcattacaggatgcttctcgtgagagagacaaagcagtgcaggatctggctcggctgaagcagcatttgttagataaggatcttgaagaccaagaaaagatggatgaagatagtaaactcattgaagagttgcgggtagtatgcgagcagcaaagggctcatataatgcagttagagagggctttaaaggtcgagatggcaaagcaggaggagaacaaaaaggtcataagtgaagagcaccagaggtcaaatgaacaaatagaaaatttgaactacaagcttgcaagctgtatgagtgcacttgaatcaaaaaatgtggagctgctaaatcttcagactgcccttggacagtactatgctgagagtgaagccaaggaccgacttggaggtgatttagctgttgctagggaagaactgtctaaattgtcagagtcattaaaggtggcaaatcaaaccattgagatttcaagaagggaaaaggaagatatggctaccaaactttcacaagcagagaggatgttggcagatgggaaacgatccatgcagaagcttgaggatgacaattcaagattgcgaagagcgctagaacaaagcatgacaactgtgaataggatgtcactagattcagataactccgttgacaggcgcattgtgataaaactgctagtcacctacttccaacgaaatcacagcaaagaggttctggatctcatggtgcgcatgcttggcttctccgaggaagacaagcaaaggattggctttgcacaaagtaatgctggtaggggtgtcgttcgtggtgttttgggtctcccgggacgcctagttggaggaatcgttggtggaggtccatctggcaaatctactcaatcgtcccaggatagccagtccttcgcggacctatgggtggacttcctgctcaaggagacggaagaaagggagaaacgggaagcctcagaagctgcaaggcaatcacagcaagagagccacaccaccaccggtccaagtacatcgtcgagtatccaacagccatcacagcacaacccctcaaacgttgcacctggcccatccacaatgccacacaccgcttgggtctcccagaatcggaatcctcaacagttccgctagcatcatcatgctcgtccgtgctggctccatccccaagaccacctctaagatgatactcgacgatgccaattttctttttatggagtagaaatcaagtgcacactgtacagtatcggatacctttttgttgtgctgggagtgatcccgcatgcggacgccaaggctatttgttccattcgttgacaatgcgatgatgatagtagtagattcaaaaattggcctccttcctggagcatgtaaagagatcgatatgtaaaatggattcctaccctcgacaacagatggaggtaaaatgggagttggttatacgtatgttttgaagtaagaattttgatctgcatccaaa

SEQ ID NO: 3941 - DNA, 2310 bp, Zea Mays
cttgttgattgtctgtcaatccgtcaaaatgttgaactgtaaagtgaactattatttgatttctaaactgagggatgacattcaaaagcttcaagcttctgaggctgaaataaaggcactatctttcaattatgctgcaatgttgaaggaaaaagaggagcaactgggaaaacttcgtgaagaaaatgggtctcttaaaagaagcttggagagctgtaaggcagtttcagccaattctaatggcactttggaaagatcacctagagtgcaaaggaatgcagttcaggaaaattcattgaatctcaccaagcagaacggatatggtggtggttcttctcacagtacccagacaaatggtctgcatccaatggcaggttatcagaagggaagtatatcggaggaagagagatcatcctttactaccaagcaggctagtcttgaaaatgaaatcaaacaattgaaacagcagctcagcaataattctgagaaagaaactgaaattaggaggaggctagaagatgaaaccaagcggagtgaatttcttcagcagcaactaaatgagctcaagatggacaaagagaggatgacaactagcatggaagagctacaaaaggaactgagtgagaagaaatcagagtttagacgtgttcaggatgagcaaagcaaaagggacaaggagcacgtctcggacggatctcttcagagcctaagaaatatgttgatggctttacagaaggagaactctagcctaaagatagagaaagtcaagcttgatgcagatctcaagagtatgaagagtacctcacaaaaaactgttgacagtacattagatgctaacaagatttctgacttggaaaaggttaagaaagagatggactctttgaaaagagcattacaggatgcttctcgtgagagagacaaagcagtgcaggatctggctcggctgaagcagcatttgttagataaggatcttgaagaccaagaaaagatggatgaagatagtaaactcattgaagagttgcgggtagtatgcgagcagcaaagggctcatataatgcagttagagagggctttaaaggtcgagatggcaaagcaggaggagaacaaaaaggtcataagtgaagagcaccagaggtcaaatgaacaaatagaaaatttgaactacaagcttgcaagctgtatgagtgcacttgaatcaaaaaatgtggagctgctaaatcttcagactgcccttggacagtactatgctgagagtgaagccaaggtcagagtcattaaaggtggcaaatcaaaccattgagatttcaagaagggaaaaggaagatatggctaccaaactttcacaagcagagaggatgttggcagatgggaaacgatccatgcagaagcttgaggatgacaattcaagattgcgaagagcgctagaacaaagcatgacaactgtgaataggatgtcactagattcagataactccgttgacaggcgcattgtgataaaactgctagtcacctacttccaacgaaatcacagcaaagaggttctggatctcatggtgcgcatgcttggcttctccgaggaagacaagcaaaggattggctttgcacaaagtaatgctggtaggggtgtcgttcgtggtgttttgggtctcccgggacgcctagttggaggaatcgttggtggaggtccatctggcaaatctactcaatcgtcccaggatagccagtccttcgcggacctatgggtggacttcctgctcaaggagacggaagaaagggagaaacgggaagcctcagaagctgcaaggcaatcacagcaagagagccacaccaccaccggtccaagtacatcgtcgagtatccaacagccatcacagcacaacccctcaaacgttgcacctggcccatccacaatgccacacaccgcttgggtctcccagaatcggaatcctcaacagttccgctagcatcatcatgctcgtccgtgctggctccatccccaagaccacctctaagatgatactcgacgatgccaattttctttttatggagtagaaatcaagtgcacactgtacagtatcggatacctttttgttgtgctgggagtgatcccgcatgcggacgccaaggctatttgttccattcgttgacaatgcgatgatgatagtagtagattcaaaaattggcctccttcctggagcatgtaaagagatcgatatgtaaaatggattcctaccctcgacaacagatggaggtaaaatgggagttggttatacgtatgttttgaagtaagaattttgatctgcatccaaa

SEQ ID NO: 3942 - DNA, 2317 bp, Zea Mays
gaactgtaaagtgaactattatttgatttctaaactgagggatgacattcaaaagcttcaagcttctgaggctgaaataaaggcactatctttcaattatgctgcaatgttgaaggaaaaagaggagcaactgggaaaacttcgtgaagaaaatgggtctcttaaaagaagcttggagagctgtaaggcagtttcagccaattctaatggcactttggaaagatcacctagagtgcaaaggaatgcagttcaggaaaattcattgaatctcaccaagcagaacggatatggtggtggttcttctcacagtacccagacaaatggtctgcatccaatggcaggttatcagaagggaagtatatcggaggaagagagatcatcctttactaccaagcaggctagtcttgaaaatgaaatcaaacaattgaaacagcagctcagcaataattctgagaaagaaactgaaattaggaggaggctagaagatgaaaccaagcggagtgaatttcttcagcagcaactaaatgagctcaagatggacaaagagaggatgacaactagcatggaagagctacaaaaggaactgagtgagaagaaatcagagtttagacgtgttcaggatgagcaaagcaaaagggacaaggagcacgtctcggacggatctcttcagagcctaagaaatatgttgatggctttacagaaggagaactctagcctaaagatagagaaagtcaagcttgatgcagatctcaagagtatgaagagtacctcacaaaaaactgttgacagtacattagatgctaacaagatttctgacttggaaaaggttaagaaagagatggactctttgaaaagagcattacaggatgcttctcgtgagagagacaaagcagtgcaggatctggctcggctgaagcagcatttgttagataagaccaagaaaagatggatgaagatagtaaactcattgaagagttgcgggtagtatgcgagcagcaaagggctcatataatgcagttagagagggctttaaaggtcgagatggcaaagcaggaggagaacaaaaaggtcataagtgaagagcaccagaggtcaaatgaacaaatagaaaatttgaactacaagcttgcaagctgtatgagtgcacttgaatcaaaaaatgtggagctgctaaatcttcagactgcccttggacagtactatgctgagagtgaagccaaggaccgacttggaggtgatttagctgttgctagggaagaactgtctaaattgtcagagtcattaaaggtggcaaatcaaaccattgagatttcaagaagggaaaaggaagatatggctaccaaactttcacaagcagagaggatgttggcagatgggaaacgatccatgcagaagcttgaggatgacaattcaagattgcgaagagcgctagaacaaagcatgacaactgtgaataggatgtcactagattcagataactccgttgacaggcgcattgtgataaaactgctagtcacctacttccaacgaaatcacagcaaagaggttctggatctcatggtgcgcatgcttggcttctccgaggaagacaagcaaaggattggctttgcacaaagtaatgctggtaggggtgtcgttcgtggtgttttgggtctcccgggacgcctagttggaggaatcgttggtggaggtccatctggcaaatctactcaatcgtcccaggatagccagtccttcgcggacctatgggtggacttcctgctcaaggagacggaagaaagggagaaacgggaagcctcagaagctgcaaggcaatcacagcaagagagccacaccaccaccggtccaagtacatcgtcgagtatccaacagccatcacagcacaacccctcaaacgttgcacctggcccatccacaatgccacacaccgcttgggtctcccagaatcggaatcctcaacagttccgctagcatcatcatgctcgtccgtgctggctccatccccaagaccacctctaagatgatactcgacgatgccaattttctttttatggagtagaaatcaagtgcacactgtacagtatcggatacctttttgttgtgctgggagtgatcccgcatgcggacgccaaggctatttgttccattcgttgacaatgcgatgatgatagtagtagattcaaaaattggcctccttcctggagcatgtaaagagatcgatatgtaaaatggattcctaccctcgacaacagatggaggtaaaatgggagttggttatacgtatgttttgaagtaagaattttgatctgcatccaaa

SEQ ID NO: 3943 - DNA, 3348 bp, Zea Mays
ctcaaacctcatattcctcccgtaagctccacgaccggagagagagagagcgcgcgctatccaagccaagaaactccccccgtagtccgcggcccgggctcacgaccgatccggtccgggcccgatggagctcctgagcggcggcgcgctggcgtggcagcagtaccgcgcgctgctccgcaagaacgccacgctcacctggcgcaaccgccgctcggcggcgctgcagctcttctcctcgctcgtattcatcttcctcatcttctgcatcgaccgcgccgtccgctccaggttctccagtaccaccgcctaccgcaacgtgcccgacccggaggcgctcgtcgcgccgccgatcccgccctgcgaggacaagttcttcatcaagtccccatgctacgacttcctctggagcgacggcgggagcgcccgcatcaggggcctcgtcgacgccatccggaggaacaaccccggccgacccatagcacccgaaaaggttttaggttttaggactccagatgatgttgatgcttggttgtttcaaaacccaatgcgttgccctggggctttacattttcaagatataaatgccactcagataaagtatggtattcagacaaactctactccggtagcacggagaggaacatatgaagaccctaccttcaagttccagataccactccaagttgcagctgagagggaaatggcaaggcttctgattggagacccaaattttagctggactgttggatttaaagaatttgctcacccagccacggagaccttctctaccattgctcaagcagggccaactttttttcttgccattgctatgttcggatttgttttccaaatcagtgcattggtggcagagaaagaactaaagcttcgtcaggctatgtctaccatggggctctatgaatcggcttactggttatcgtggtttacctgggaggcctttcttacaacactttcagcactttttactgtgctctttgggatgatgttccagttcgatttcttccttcataataattttggaatcctattcctcctgttcttcctattccaactgaacatgcttagttttgctttcatgatatccacgttcgtagcgaaggcagcatcagctactactgttggatttgcaatattcattattgggttcttgactcagcttgttaccacctttgggttcccttattcgtctgactacaaaaagttgtaccggacattgtggtctttatttcctcctgatttatttgccaaagccctcaacattctaggcaaggcaacagccactcctgaggataaaggttttagctggaatcagcgtggggagtgcccatcttttgagactgactgtgtcattactattgatgatatatataagtggctcatatccacatttttcttgtggtttgtccttgcgatatactttgacaacatacttccaaatgtaaacggcgttcggaagtcagttttctactttcttatgccttcatactggacgggtaaaggaggcaagatggaagagggaggcctctttagcttttttggttcaagccgtcctgcagatgatgctacccctactgacgaggatgtccttgcggagcaaaacctagtaaaggaacaagctgcaaacaatgcggtagatcctaatgttgcagttcaaatacatggtctacgtaagacatatccaggaactttcagcattggatgttgttgcaaatgctctaaatctaagccgtttcattcggttaaaggcttatgggtgaaccttgagaaggaccagctattttgtcttcttggtcccaatggagctggaaaaacaactacaatcagttgtctgactggaatcacaccaattacaggaggtgatgcattcatttatggtcactctgttcgaagcactgtgggaatgtcaaacatccgtaggatgatcggagtctgcccacagtttgatatcctgtgggatgcattaacagctaaagagcacatggaattgtttgccagcatcaagggattgcatccagcagcaatcacatcagtagcagaagagtcattagccaaagtaaagctcagccaagtaactaatgctcgagcaggcagctacagcggaggaatgaagcgccggctaagtgttgcgatcgcactgattggtgacccaaaattggtttttctcgatgaacctactactggcatggatccaataacaaggaggcatgtctgggacatcatagaggaggccaagaaaggaagagctattgtcttgaccacccattccatggaggaggctgatattcttggtgaccggatagctataatggcaaaggggaaactgcggtgcatcgggacatcaataaggctgaagtcgaaatttggaacaggatacattgctaatgttaatttctctggaaatggccacatgcagagccccaacatcaacagcaacactgaggctccggttaatccgaacatagaagctgtcaaatggttcttcaaggaacggcttgatgttaatccaaaagaggagagcaggacattcttgacatttgtcatccctcatcacaaagaaccacttctgacgagattctttggagagttgcaagacagggaaggggagtttggaatatcagacattcaactcggtctgacaacacttgaagaggtgttcctgaacattgcaaagcaggcagagctggagacctctactgctgaaggtaccctggtgactctcaacctgtcatcaggaacaacaattcagattcccaagggggctcgtttcgttggtattcctggaactgagacagaggagcatccaagaggcatcatggttgaggtgtactgggatcaggatgaaaatggatcgctctgcatttctgggcactctgacgagatgcccgtgccagttcatgctgagctgaggaggcctccgtcactttctcgtagggcctcaatggaccgtggacgtccagttgggtatatgattgacctgaaccaggtcccatgaaaaaaaggatgagtccaggtgcaacgtttagattggttttgatgcagattatctggtacatatagtatataggaatcttgtattcgtgtctttgtattagaagtcgtaaccttgtattgcagtagtaattggtaaagacatgctttgtaaaatatcctatagtgtaacacagtattttctgttgtatggcaaacaaaggctcgaaatatgacgcaatagaattacatggtaactacaccctgcgtctcaagatacgtttttactacccatataggaccttttaggagaaggaaattttagcccctccaatctccctcgttccccttctcccaaac

SEQ ID NO: 3944 - DNA, 3277 bp, Zea Mays
cctcccgtaagctccacgaccggagagagagagagcgcgcgctatccaagccaagaaactccccccgtagtccgcggcccgggctcacgaccgatccggtccgggcccgatggagctcctgagcggcggcgcgctggcgtggcagcagtaccgcgcgctgctccgcaagaacgccacgctcacctggcgcaaccgccgctcggcggcgctgcagctcttctcctcgctcgtattcatcttcctcatcttctgcatcgaccgcgccgtccgctccaggttctccagtaccaccgcctaccgcaacgtgcccgacccggaggcgctcgtcgcgccgccgatcccgccctgcgaggacaagttcttcatcaagtccccatgctacgacttcctctggagcgacggcgggagcgcccgcatcaggggcctcgtcgacgccatccggaggaacaaccccggccgacccatagcacccgaaaaggttttaggttttaggactccagatgatgttgatgcttggttgtttcaaaacccaatgcgttgccctggggctttacattttcaagatataaatgccactcagataaagtatggtattcagacaaactctactccggtagcacggagaggaacatatgaagaccctaccttcaagttccagataccactccaagttgcagctgagagggaaatggcaaggcttctgattggagacccaaattttagctggactgttggatttaaagaatttgctcacccagccacggagaccttctctaccattgctcaagcagggccaactttttttcttgccattgctatgttcggatttgttttccaaatcagtgcattggtggcagagaaagaactaaagcttcgtcaggctatgtctaccatggggctctatgaatcggcttactggttatcgtggtttacctgggaggcctttcttacaacactttcagcactttttactgtgctctttgggatgatgttccagttcgatttcttccttcataataattttggaatcctattcctcctgttcttcctattccaactgaacatgcttagttttgctttcatgatatccacgttcgtagcgaaggcagcatcagctactactgttggatttgcaatattcattattgggttcttgactcagcttgttaccacctttgggttcccttattcgtctgactacaaaaagttgtaccggacattgtggtctttatttcctcctgatttatttgccaaagccctcaacattctaggcaaggcaacagccactcctgaggataaaggttttagctggaatcagcgtggggagtgcccatcttttgagactgactgtgtcattactattgatgatatatataagtggctcatatccacatttttcttgtggtttgtccttgcgatatactttgacaacatacttccaaatgtaaacggcgttcggaagtcagttttctactttcttatgccttcatactggacgggtaaaggaggcaagatggaagagggaggcctctttagcttttttggttcaagccgtcctgcagatgatgctacccctactgacgaggatgtccttgcggagcaaaacctagtaaaggaacaagctgcaaacaatgcggtagatcctaatgttgcagttcaaatacatggtctacgtaagacatatccaggaactttcagcattggatgttgttgcaaatgctctaaatctaagccgtttcattcggttaaaggcttatgggtgaaccttgagaaggaccagctattttgtcttcttggtcccaatggagctggaaaaacaactacaatcagttgtctgactggaatcacaccaattacaggaggtgatgcactgtgggaatgtcaaacatccgtaggatgatcggagtctgcccacagctaaagagcacatggaattgtttgccagcatcaagggattgcatccagcagcaatcacatcagtagcagaagagtcattagccaaagtaaagctcagccaagtaactaatgctcgagcaggcagctacagcggaggaatgaagcgccggctaagtgttgcgatcgcactgattggtgacccaaaattggtttttctcgatgaacctactactggcatggatccaataacaaggaggcatgtctgggacatcatagaggaggccaagaaaggaagagctattgtcttgaccacccattccatggaggaggctgatattcttggtgaccggatagctataatggcaaaggggaaactgcggtgcatcgggacatcaataaggctgaagtcgaaatttggaacaggatacattgctaatgttaatttctctggaaatggccacatgcagagccccaacatcaacagcaacactgaggctccggttaatccgaacatagaagctgtcaaatggttcttcaaggaacggcttgatgttaatccaaaagaggagagcaggacattcttgacatttgtcatccctcatcacaaagaaccacttctgacgagattctttggagagttgcaagacagggaaggggagtttggaatatcagacattcaactcggtctgacaacacttgaagaggtgttcctgaacattgcaaagcaggcagagctggagacctctactgctgaaggtaccctggtgactctcaacctgtcatcaggaacaacaattcagattcccaagggggctcgtttcgttggtattcctggaactgagacagaggagcatccaagaggcatcatggttgaggtgtactgggatcaggatgaaaatggatcgctctgcatttctgggcactctgacgagatgcccgtgccagttcatgctgagctgaggaggcctccgtcactttctcgtagggcctcaatggaccgtggacgtccagttgggtatatgattgacctgaaccaggtcccatgaaaaaaaggatgagtccaggtgcaacgtttagattggttttgatgcagattatctggtacatatagtatataggaatcttgtattcgtgtctttgtattagaagtcgtaaccttgtattgcagtagtaattggtaaagacatgctttgtaaaatatcctatagtgtaacacagtattttctgttgtatggcaaacaaaggctcgaaatatgacgcaatagaattacatggtaactacaccctgcgtctcaagatacgtttttactacccatataggaccttttaggagaaggaaattttagcccctccaatctccctcgttccccttctcccaaac

SEQ ID NO: 3945 - DNA, 3380 bp, Zea Mays
cctcccgtaagctccacgaccggagagagagagagcgcgcgctatccaagccaagaaactccccccgtagtccgcggcccgggctcacgaccgatccggtccgggcccgatggagctcctgagcggcggcgcgctggcgtggcagcagtaccgcgcgctgctccgcaagaacgccacgctcacctggcgcaaccgccgctcggcggcgctgcagctcttctcctcgctcgtattcatcttcctcatcttctgcatcgaccgcgccgtccgctccaggttctccagtaccaccgcctaccgcaacgtgcccgacccggaggcgctcgtcgcgccgccgatcccgccctgcgaggacaagttcttcatcaagtccccatgctacgacttcctctggagcgacggcgggagcgcccgcatcaggggcctcgtcgacgccatccggaggaacaaccccggccgacccatagcacccgaaaaggttttaggttttaggactccagatgatgttgatgcttggttgtttcaaaacccaatgcgttgccctggggctttacattttcaagatataaatgccactcagataaagtatggtattcagacaaactctactccggtagcacggagaggaacatatgaagaccctaccttcaagttccagataccactccaagttgcagctgagagggaaatggcaaggcttctgattggagacccaaattttagctggactgttggatttaaagaatttgctcacccagccacggagaccttctctaccattgctcaagcagggccaactttttttcttgccattgctatgttcggatttgttttccaaatcagtgcattggtggcagagaaagaactaaagcttcgtcaggctatgtctaccatggggctctatgaatcggcttactggttatcgtggtttacctgggaggcctttcttacaacactttcagcactttttactgtgctctttgggatgatgttccagttcgatttcttccttcataataattttggaatcctattcctcctgttcttcctattccaactgaacatgcttagttttgctttcatgatatccacgttcgtagcgaaggcagcatcagctactactgttggatttgcaatattcattattgggttcttgactcagcttgttaccacctttgggttcccttattcgtctgactacaaaaagttgtaccggacattgtggtctttatttcctcctgatttatttgccaaagccctcaacattctaggcaaggcaacagccactcctgaggataaaggttttagctggaatcagcgtggggagtgcccatcttttgagactgactgtgtcattactattgatgatatatataagtggctcatatccacatttttcttgtggtttgtccttgcgatatactttgacaacatacttccaaatgtaaacggcgttcggaagtcagttttctactttcttatgccttcatactggacgggtaaaggaggcaagatggaagagggaggcctctttagcttttttggttcaagccgtcctgcagatgatgctacccctactgacgaggatgtccttgcggagcaaaacctagtaaaggaacaagctgcaaacaatgcggtagatcctaatgttgcagttcaaatacatggtctacgtaagacatatccaggaactttcagcattggatgttgttgcaaatgctctaaatctaagccgtttcattcggttaaaggcttatgggtgaaccttgagaaggaccagctattttgtcttcttggtcccaatggagctggaaaaacaactacaatcagttgtctgactggaatcacaccaattacaggaggtgatgcactgtgggaatgtcaaacatccgtaggatgatcggagtctgcccacagtttgatatcctgtgggatgcattaacagctaaagagcacatggaattgtttgccagcatcaagggattgcatccagcagcaatcacatcagtagcagaagagtcattagccaaagtaaagctcagccaagtaactaatgctcgagcaggcagctacagcggaggaatgaagcgccggctaagtgttgcgatcgcactgattggtgacccaaaattggtttttctcgatgaacctactactggcatggatccaataacaaggaggcatgtctgggacatcatagaggaggccaagaaaggaagagctattgtcttgaccacccattccatggaggaggctgatattcttggtgaccggatagctataatggcaaaggggaaactgcggtgcatcgggacatcaataaggctgaagtcgaaatttggaacaggatacattgctaatgttaatttctctggaaatggccacatgcagagccccaacatcaacagcaacactgaggctccggttaatccgaacatagaagctgtcaaatggttcttcaaggaacggcttgatgttaatccaaaagaggagagcaggacattcttgacatttgtcatccctcatcacaaagaaccacttctgacggtaataccttggcaccagagctctagtgtacttcattttttaaaagtaaatgatatattaacactttcacaacagagattctttggagagttgcaagacagggaaggggagtttggaatatcagacattcaactcggtctgacaacacttgaagaggtgttcctgaacattgcaaagcaggcagagctggagacctctactgctgaaggtaccctggtgactctcaacctgtcatcaggaacaacaattcagattcccaagggggctcgtttcgttggtattcctggaactgagacagaggagcatccaagaggcatcatggttgaggtgtactgggatcaggatgaaaatggatcgctctgcatttctgggcactctgacgagatgcccgtgccagttcatgctgagctgaggaggcctccgtcactttctcgtagggcctcaatggaccgtggacgtccagttgggtatatgattgacctgaaccaggtcccatgaaaaaaaggatgagtccaggtgcaacgtttagattggttttgatgcagattatctggtacatatagtatataggaatcttgtattcgtgtctttgtattagaagtcgtaaccttgtattgcagtagtaattggtaaagacatgctttgtaaaatatcctatagtgtaacacagtattttctgttgtatggcaaacaaaggctcgaaatatgacgcaatagaattacatggtaactacaccctgcgtctcaagatacgtttttactacccatataggaccttttaggagaaggaaattttagcccctccaatctccctcgttccccttctcccaaac

SEQ ID NO: 3946 - DNA, 3511 bp, Zea Mays
cctcccgtaagctccacgaccggagagagagagagcgcgcgctatccaagccaagaaactccccccgtagtccgcggcccgggctcacgaccgatccggtccgggcccgatggagctcctgagcggcggcgcgctggcgtggcagcagtaccgcgcgctgctccgcaagaacgccacgctcacctggcgcaaccgccgctcggcggcgctgcagctcttctcctcgctcgtattcatcttcctcatcttctgcatcgaccgcgccgtccgctccaggttctccagtaccaccgcctaccgcaacgtgcccgacccggaggcgctcgtcgcgccgccgatcccgccctgcgaggacaagttcttcatcaagtccccatgctacgacttcctctggagcgacggcgggagcgcccgcatcaggggcctcgtcgacgccatccggaggaacaaccccggccgacccatagcacccgaaaaggttttaggttttaggactccagatgatgttgatgcttggttgtttcaaaacccaatgcgttgccctggggctttacattttcaagatataaatgccactcagataaagtatggtattcagacaaactctactccggtagcacggagaggaacatatgaagaccctaccttcaagttccagataccactccaagttgcagctgagagggaaatggcaaggcttctgattggagacccaaattttagctggactgttggatttaaagaatttgctcacccagccacggagaccttctctaccattgctcaagcagggccaactttttttcttgccattgctatgttcggatttgttttccaaatcagtgcattggtggcagagaaagaactaaagcttcgtcaggttcagacttcactcaccacagtctgcctgcatatctttatgctcaaattcgatttcttccttcataataattttggaatcctattcctcctgttcttcctattccaactgaacatgcttagttttgctttcatgatatccacgttcgtagcgaaggcagcatcagctactactgttggatttgcaatattcattattgggttcttgactcagcttgttaccacctttgggttcccttattcgtctgactacaaaaagttgtaccggacattgtggtctttatttcctcctgatttatttgccaaagccctcaacattctaggcaaggcaacagccactcctgaggataaaggttttagctggaatcagcgtggggagtgcccatcttttgagactgactgtgtcattactattgatgatatatataagtggctcatatccacatttttcttgtggtttgtccttgcgatatactttgacaacatacttccaaatgtaaacggcgttcggaagtcagttttctactttcttatgccttcatactggacgggtaaaggaggcaagatggaagagggaggcctctttagcttttttggttcaagccgtcctgcagatgatgctacccctactgacgaggatgtccttgcggagcaaaacctagtaaaggaacaagctgcaaacaatgcggtagatcctaatgttgcagttcaaatacatggtctacgtaagacatatccaggaactttcagcattggatgttgttgcaaatgctctaaatctaagccgtttcattcggttaaaggcttatgggtgaaccttgagaaggaccagctattttgtcttcttggtcccaatggagctggaaaaacaactacaatcagttgtctgactggaatcacaccaattacaggaggtgatgcactgtgggaatgtcaaacatccgtaggatgatcggagtctgcccacaggtggtgctttatacattttgatattattgatgcaagtggtggtatatttgaaaaaaaaacacataaatatgtgtgttctgttactttacagtttgatatcctgtgggatgcattaacagctaaagagcacatggaattgtttgccagcatcaagggattgcatccagcagcaatcacatcagtagcagaagagtcattagccaaagtaaagctcagccaagtaactaatgctcgagcaggcagctacagcggaggaatgaagcgccggctaagtgttgcgatcgcactgattggtgacccaaaattggtttttctcgatgaacctgtgaggaaatagaaaaaatttcattgttttgttccttagactcccttgtggccctgtcacatatcaatctaactaaatgtatatgctttgtagactactggcatggatccaataacaaggaggcatgtctgggacatcatagaggaggccaagaaaggaagagctattgtcttgaccacccattccatggaggaggctgatattcttggtgaccggatagctataatggcaaaggggaaactgcggtgcatcgggacatcaataaggctgaagtcgaaatttggaacaggatacattgctaatgttaatttctctggaaatggccacatgcagagccccaacatcaacagcaacactgaggctccggttaatccgaacatagaagctgtcaaatggttcttcaaggaagtatgtgtctcatggctaaataagatcatcttaagattttgtctcttaccatcatgatatataaatgcctttctctttcgtgtttaaacagcggcttgatgttaatccaaaagaggagagcaggacattcttgacatttgtcatccctcatcacaaagaaccacttctgacgagattctttggagagttgcaagacagggaaggggagtttggaatatcagacattcaactcggtctgacaacacttgaagaggtgttcctgaacattgcaaagcaggcagagctggagacctctactgctgaaggtaccctggtgactctcaacctgtcatcaggaacaacaattcagattcccaagggggctcgtttcgttggtattcctggaactgagacagaggagcatccaagaggcatcatggttgaggtgtactgggatcaggatgaaaatggatcgctctgcatttctgggcactctgacgagatgcccgtgccagttcatgctgagctgaggaggcctccgtcactttctcgtagggcctcaatggaccgtggacgtccagttgggtatatgattgacctgaaccaggtcccatgaaaaaaaggatgagtccaggtgcaacgtttagattggttttgatgcagattatctggtacatatagtatataggaatcttgtattcgtgtctttgtattagaagtcgtaaccttgtattgcagtagtaattggtaaagacatgctttgtaaaatatcctatagtgtaacacagtattttctgttgtatggcaaacaaaggctcgaaatatgacgcaatagaattacatggtaactacaccctgcgtctcaagatacgtttttactacccatataggaccttttaggagaaggaaattttagcccctccaatctccctcgttccccttctcccaaac

SEQ ID NO: 3947 - DNA, 3285 bp, Zea Mays
cctcccgtaagctccacgaccggagagagagagagcgcgcgctatccaagccaagaaactccccccgtagtccgcggcccgggctcacgaccgatccggtccgggcccgatggagctcctgagcggcggcgcgctggcgtggcagcagtaccgcgcgctgctccgcaagaacgccacgctcacctggcgcaaccgccgctcggcggcgctgcagctcttctcctcgctcgtattcatcttcctcatcttctgcatcgaccgcgccgtccgctccaggttctccagtaccaccgcctaccgcaacgtgcccgacccggaggcgctcgtcgcgccgccgatcccgccctgcgaggacaagttcttcatcaagtccccatgctacgacttcctctggagcgacggcgggagcgcccgcatcaggggcctcgtcgacgccatccggaggaacaaccccggccgacccatagcacccgaaaaggttttaggttttaggactccagatgatgttgatgcttggttgtttcaaaacccaatgcgttgccctggggctttacattttcaagatataaatgccactcagataaagtatggtattcagacaaactctactccggtagcacggagaggaacatatgaagaccctaccttcaagttccagataccactccaagttgcagctgagagggaaatggcaaggcttctgattggagccacggagaccttctctaccattgctcaagcagggccaactttttttcttgccattgctatgttcggatttgttttccaaatcagtgcattggtggcagagaaagaactaaagcttcgtcaggctatgtctaccatggggctctatgaatcggcttactggttatcgtggtttacctgggaggcctttcttacaacactttcagcactttttactgtgctctttgggatgatgttccagttcgatttcttccttcataataattttggaatcctattcctcctgttcttcctattccaactgaacatgcttagttttgctttcatgatatccacgttcgtagcgaaggcagcatcagctactactgttggatttgcaatattcattattgggttcttgactcagcttgttaccacctttgggttcccttattcgtctgactacaaaaagttgtaccggacattgtggtctttatttcctcctgatttatttgccaaagccctcaacattctaggcaaggcaacagccactcctgaggataaaggttttagctggaatcagcgtggggagtgcccatcttttgagactgactgtgtcattactattgatgatatatataagtggctcatatccacatttttcttgtggtttgtccttgcgatatactttgacaacatacttccaaatgtaaacggcgttcggaagtcagttttctactttcttatgccttcatactggacgggtaaaggaggcaagatggaagagggaggcctctttagcttttttggttcaagccgtcctgcagatgatgctacccctactgacgaggatgtccttgcggagcaaaacctagtaaaggaacaagctgcaaacaatgcggtagatcctaatgttgcagttcaaatacatggtctacgtaagacatatccaggaactttcagcattggatgttgttgcaaatgctctaaatctaagccgtttcattcggttaaaggcttatgggtgaaccttgagaaggaccagctattttgtcttcttggtcccaatggagctggaaaaacaactacaatcagttgtctgactggaatcacaccaattacaggaggtgatgcattcatttatggtcactctgttcgaagcactgtgggaatgtcaaacatccgtaggatgatcggagtctgcccacagtttgatatcctgtgggatgcattaacagctaaagagcacatggaattgtttgccagcatcaagggattgcatccagcagcaatcacatcagtagcagaagagtcattagccaaagtaaagctcagccaagtaactaatgctcgagcaggcagctacagcggaggaatgaagcgccggctaagtgttgcgatcgcactgattggtgacccaaaattggtttttctcgatgaacctactactggcatggatccaataacaaggaggcatgtctgggacatcatagaggaggccaagaaaggaagagctattgtcttgaccacccattccatggaggaggctgatattcttggtgaccggatagctataatggcaaaggggaaactgcggtgcatcgggacatcaataaggctgaagtcgaaatttggaacaggatacattgctaatgttaatttctctggaaatggccacatgcagagccccaacatcaacagcaacactgaggctccggttaatccgaacatagaagctgtcaaatggttcttcaaggaacggcttgatgttaatccaaaagaggagagcaggacattcttgacatttgtcatccctcatcacaaagaaccacttctgacgagattctttggagagttgcaagacagggaaggggagtttggaatatcagacattcaactcggtctgacaacacttgaagaggtgttcctgaacattgcaaagcaggcagagctggagacctctactgctgaaggtaccctggtgactctcaacctgtcatcaggaacaacaattcagattcccaagggggctcgtttcgttggtattcctggaactgagacagaggagcatccaagaggcatcatggttgaggtgtactgggatcaggatgaaaatggatcgctctgcatttctgggcactctgacgagatgcccgtgccagttcatgctgagctgaggaggcctccgtcactttctcgtagggcctcaatggaccgtggacgtccagttgggtatatgattgacctgaaccaggtcccatgaaaaaaaggatgagtccaggtgcaacgtttagattggttttgatgcagattatctggtacatatagtatataggaatcttgtattcgtgtctttgtattagaagtcgtaaccttgtattgcagtagtaattggtaaagacatgctttgtaaaatatcctatagtgtaacacagtattttctgttgtatggcaaacaaaggctcgaaatatgacgcaatagaattacatggtaactacaccctgcgtctcaagatacgtttttactacccatataggaccttttaggagaaggaaattttagcccctccaatctccctcgttccccttctcccaaac

SEQ ID NO: 3948 - DNA, 3326 bp, Zea Mays
cctcccgtaagctccacgaccggagagagagagagcgcgcgctatccaagccaagaaactccccccgtagtccgcggcccgggctcacgaccgatccggtccgggcccgatggagctcctgagcggcggcgcgctggcgtggcagcagtaccgcgcgctgctccgcaagaacgccacgctcacctggcgcaaccgccgctcggcggcgctgcagctcttctcctcgctcgtattcatcttcctcatcttctgcatcgaccgcgccgtccgctccaggttctccagtaccaccgcctaccgcaacgtgcccgacccggaggcgctcgtcgcgccgccgatcccgccctgcgaggacaagttcttcatcaagtccccatgctacgacttcctctggagcgacggcgggagcgcccgcatcaggggcctcgtcgacgccatccggaggaacaaccccggccgacccatagcacccgaaaaggttttaggactccagatgatgttgatgcttggttgtttcaaaacccaatgcgttgccctggggctttacattttcaagatataaatgccactcagataaagtatggtattcagacaaactctactccggtagcacggagaggaacatatgaagaccctaccttcaagttccagataccactccaagttgcagctgagagggaaatggcaaggcttctgattggagacccaaattttagctggactgttggatttaaagaatttgctcacccagccacggagaccttctctaccattgctcaagcagggccaactttttttcttgccattgctatgttcggatttgttttccaaatcagtgcattggtggcagagaaagaactaaagcttcgtcaggctatgtctaccatggggctctatgaatcggcttactggttatcgtggtttacctgggaggcctttcttacaacactttcagcactttttactgtgctctttgggatgatgttccagttcgatttcttccttcataataattttggaatcctattcctcctgttcttcctattccaactgaacatgcttagttttgctttcatgatatccacgttcgtagcgaaggcagcatcagctactactgttggatttgcaatattcattattgggttcttgactcagcttgttaccacctttgggttcccttattcgtctgactacaaaaagttgtaccggacattgtggtctttatttcctcctgatttatttgccaaagccctcaacattctaggcaaggcaacagccactcctgaggataaaggttttagctggaatcagcgtggggagtgcccatcttttgagactgactgtgtcattactattgatgatatatataagtggctcatatccacatttttcttgtggtttgtccttgcgatatactttgacaacatacttccaaatgtaaacggcgttcggaagtcagttttctactttcttatgccttcatactggacgggtaaaggaggcaagatggaagagggaggcctctttagcttttttggttcaagccgtcctgcagatgatgctacccctactgacgaggatgtccttgcggagcaaaacctagtaaaggaacaagctgcaaacaatgcggtagatcctaatgttgcagttcaaatacatggtctacgtaagacatatccaggaactttcagcattggatgttgttgcaaatgctctaaatctaagccgtttcattcggttaaaggcttatgggtgaaccttgagaaggaccagctattttgtcttcttggtcccaatggagctggaaaaacaactacaatcagttgtctgactggaatcacaccaattacaggaggtgatgcattcatttatggtcactctgttcgaagcactgtgggaatgtcaaacatccgtaggatgatcggagtctgcccacagtttgatatcctgtgggatgcattaacagctaaagagcacatggaattgtttgccagcatcaagggattgcatccagcagcaatcacatcagtagcagaagagtcattagccaaagtaaagctcagccaagtaactaatgctcgagcaggcagctacagcggaggaatgaagcgccggctaagtgttgcgatcgcactgattggtgacccaaaattggtttttctcgatgaacctactactggcatggatccaataacaaggaggcatgtctgggacatcatagaggaggccaagaaaggaagagctattgtcttgaccacccattccatggaggaggctgatattcttggtgaccggatagctataatggcaaaggggaaactgcggtgcatcgggacatcaataaggctgaagtcgaaatttggaacaggatacattgctaatgttaatttctctggaaatggccacatgcagagccccaacatcaacagcaacactgaggctccggttaatccgaacatagaagctgtcaaatggttcttcaaggaacggcttgatgttaatccaaaagaggagagcaggacattcttgacatttgtcatccctcatcacaaagaaccacttctgacgagattctttggagagttgcaagacagggaaggggagtttggaatatcagacattcaactcggtctgacaacacttgaagaggtgttcctgaacattgcaaagcaggcagagctggagacctctactgctgaaggtaccctggtgactctcaacctgtcatcaggaacaacaattcagattcccaagggggctcgtttcgttggtattcctggaactgagacagaggagcatccaagaggcatcatggttgaggtgtactgggatcaggatgaaaatggatcgctctgcatttctgggcactctgacgagatgcccgtgccagttcatgctgagctgaggaggcctccgtcactttctcgtagggcctcaatggaccgtggacgtccagttgggtatatgattgacctgaaccaggtcccatgaaaaaaaggatgagtccaggtgcaacgtttagattggttttgatgcagattatctggtacatatagtatataggaatcttgtattcgtgtctttgtattagaagtcgtaaccttgtattgcagtagtaattggtaaagacatgctttgtaaaatatcctatagtgtaacacagtattttctgttgtatggcaaacaaaggctcgaaatatgacgcaatagaattacatggtaactacaccctgcgtctcaagatacgtttttactacccatataggaccttttaggagaaggaaattttagcccctccaatctccctcgttccccttctcccaaac

SEQ ID NO: 3949 - DNA, 2307 bp, Zea Mays
aacactttcagcactttttactgtgctctttgggatgatgttccattttgctttcatgatatccacgttcgtagcgaaggcagcatcagctactactgttggatttgcaatattcattattgggttcttgactcagcttgttaccacctttgggttcccttattcgtctgactacaaaaagttgtaccggacattgtggtctttatttcctcctgatttatttgccaaagccctcaacattctaggcaaggcaacagccactcctgaggataaaggttttagctggaatcagcgtggggagtgcccatcttttgagactgactgtgtcattactattgatgatatatataagtggctcatatccacatttttcttgtggtttgtccttgcgatatactttgacaacatacttccaaatgtaaacggcgttcggaagtcagttttctactttcttatgccttcatactggacgggtaaaggaggcaagatggaagagggaggcctctttagcttttttggttcaagccgtcctgcagatgatgctacccctactgacgaggatgtccttgcggagcaaaacctagtaaaggaacaagctgcaaacaatgcggtagatcctaatgttgcagttcaaatacatggtctacgtaagacatatccaggaactttcagcattggatgttgttgcaaatgctctaaatctaagccgtttcattcggttaaaggcttatgggtgaaccttgagaaggaccagctattttgtcttcttggtcccaatggagctggaaaaacaactacaatcagttgtctgactggaatcacaccaattacaggaggtgatgcattcatttatggtcactctgttcgaagcactgtgggaatgtcaaacatccgtaggatgatcggagtctgcccacagtttgatatcctgtgggatgcattaacagctaaagagcacatggaattgtttgccagcatcaagggattgcatccagcagcaatcacatcagtagcagaagagtcattagccaaagtaaagctcagccaagtaactaatgctcgagcaggcagctacagcggaggaatgaagcgccggctaagtgttgcgatcgcactgattggtgacccaaaattggtttttctcgatgaacctactactggcatggatccaataacaaggaggcatgtctgggacatcatagaggaggccaagaaaggaagagctattgtcttgaccacccattccatggaggaggctgatattcttggtgaccggatagctataatggcaaaggggaaactgcggtgcatcgggacatcaataaggctgaagtcgaaatttggaacaggatacattgctaatgttaatttctctggaaatggccacatgcagagccccaacatcaacagcaacactgaggctccggttaatccgaacatagaagctgtcaaatggttcttcaaggaacggcttgatgttaatccaaaagaggagagcaggacattcttgacatttgtcatccctcatcacaaagaaccacttctgacgagattctttggagagttgcaagacagggaaggggagtttggaatatcagacattcaactcggtctgacaacacttgaagaggtgttcctgaacattgcaaagcaggcagagctggagacctctactgctgaaggtaccctggtgactctcaacctgtcatcaggaacaacaattcagattcccaagggggctcgtttcgttggtattcctggaactgagacagaggagcatccaagaggcatcatggttgaggtgtactgggatcaggatgaaaatggatcgctctgcatttctgggcactctgacgagatgcccgtgccagttcatgctgagctgaggaggcctccgtcactttctcgtagggcctcaatggaccgtggacgtccagttgggtatatgattgacctgaaccaggtcccatgaaaaaaaggatgagtccaggtgcaacgtttagattggttttgatgcagattatctggtacatatagtatataggaatcttgtattcgtgtctttgtattagaagtcgtaaccttgtattgcagtagtaattggtaaagacatgctttgtaaaatatcctatagtgtaacacagtattttctgttgtatggcaaacaaaggctcgaaatatgacgcaatagaattacatggtaactacaccctgcgtctcaagatacgtttttactacccatataggaccttttaggagaaggaaattttagcccctccaatctccctcgttccccttctcccaaac

SEQ ID NO: 3950 - DNA, 3006 bp, Zea Mays
tccctaccgtcgccgtttccgcactttcctcgtcacacaagtccacctccaccgccgcacgccgccgctcctccgcatccgcgaccgcgacctcgaggtcgccctccctccgcgccagctgcaatggcggcctcgccggaccaattccgggggcatgcgcgcctcccgcacttcgcggccccgctccgctacgacctccgcctccgcccggacctcgccgcgtgcaccttcacgggcgccgcggccatcgccgttgtcgtgtccgcgcccacccgcttcctcgtcctcaacgctgccgagctggatgtcgatcgcgcctccatccgtttccaggatttggcgccgacagatgtggctcagttcgatgaggatgagatcatggtcatcagcttcgaccgggagctgcccttcggagagggcgtgctcaccatggacttcaccggcacgctcaacgatcagatgaggggattttacaggagcaaatatgtgtacaatggagagtcaagaaatatggcagttacacagtttgaagccgctgatgcacggaggtgctttccatgttgggatgatcctgcatttaaggccaagttcaagctaacactagaagttccatctgacctggtagcattgtccaacatgccagtggctaaggagactgtcagtggacttaccaagactatttattatgaggaatctccacttatgtcaacctatcttgtggctatagttgttggcatctttgattacatagagagttcaacatcagagggaactaaagttcgtgtttatactcaagttggcaagactaatcaaggaaagtttgcactagatgttgctgtaaagtcgctggatttatacaaagattattttgccactccttatccattacctaagttggacatgattgctatcccggatttttctgctggggccatggagaactatgggttagttacttaccgagatacagctttgctgtatgatgagctactatcatcagcatccaacaagcaacaggtagcaataactgttgcacatgagttggcgcaccaatggtttggcaatcttgtgactatggaatggtggactcacttgtggctaaatgagggttttgcttcctgggtaagctatttagcagtagaatctttatttcctgaatggaataactggacacaatttcttgatgagacgacctctggcctcagattggatgcacttgcagagtctcatcctatcgaggttgaggtaaaccatgctagtgaaattgatgcaatttttgattccataagctatgacaagggtgcatctgttattcgtatgctacaaagttaccttggtgcagagtgttttcaggaggaatctggggagcctgttaaggatttgatgactacatggactaagcaacaaggatatcctgttatttatgcaaaaatcaatggacatgatttggaacttgaacaggcacagtttctatctgatggatcgtctggtcctggaatgtggattgttcctgtaacagcatgctgtggctcatatgatgcacagaaaaagttcttattgaaagataaaatggataagataaatattaaagagttttctgactctcaaagtgctgatggggagaagaatcaaatcatttggatcaaattgaatattgatcaaactggattttatagagtgaagtatgatgatgaacttgcagctggacttgtaaatgcaatcaaagcaaagaagctctcattaatggataagattggtatcgtggaagattcatatgcgctctctgttgcttgcaagcaaacactgacgtcattgttgcgactgctgaatgcttataatgatgagtctgattacactgtactttcacatgtaacctctgtatgtttaagcatttctaaaataacagttgacgctactcctgacttgaacaaagatatcaaacagcttttgatcaaccttcttctcccagctgtcataaagttaggctgggaccccaaggatggtgagagtcatcttgatgtaatgcttagatcactgctcttgactgcgctggtcagacttggacataatgaaactataaatgaaggagttcggcgtttccacatcttctttgaagacggcaaaacttcccttcttccaccagatactagaaaggctgcatatcttgccgtgatgcgaactgttagcacctcaagcagatccggttttgatgctctccttaaaatctacagagaagcatctgaaccacaggagaaatcacgtgtcttaggctccctgtcttcatcaccggatcaggatattgttttggaggcattgaactttatgtttactgatgaggtgcggaatcaagattcattttacatccttggtggcattagcttagaaggacgagaaattgcatggacctggttgaaggaaaactgggatcacgtgttgaagacatggaaatcgagttcactcatatcagacttcattgagtccattgtcccacggtttacctccgaggagaaagctgtcgaggttaccgagttctttgctggccaagttaagccatcattcgagagagcactgaagcagagcctggagagggtgcggatcagcgcgagatggatcgagagcattaggagtgagcccaagcttggtcagacagtgcaggagctgctgcaggccgatgcgtaaacatgtggcctggaaggtagcggttcctcagtgtgatcatctcatacgggctgttcgggtcagattaaagtcggttgtttagattgctgcagttataatctatagagataaacattgtagaaacagtagaagtcggtataaattaaacctaaacgaccaggcctataaattcttgaaaaggttcaggtgggcttattctacattgtattggcagttgcttgcgtatgatttgttgagggaaaaaactgatgcaatgacgtttgtttcaaagagtggtgtactgagtccatgattattattatttttatattattgacagtagtaaag

SEQ ID NO: 3951 - DNA, 3003 bp, Zea Mays
tccctaccgtcgccgtttccgcactttcctcgtcacacaagtccacctccaccgccgcacgccgccgctcctccgcatccgcgaccgcgacctcgaggtcgccctccctccgcgccagctgcaatggcggcctcgccggaccaattccgggggcatgcgcgcctcccgcacttcgcggccccgctccgctacgacctccgcctccgcccggacctcgccgcgtgcaccttcacgggcgccgcggccatcgccgttgtcgtgtccgcgcccacccgcttcctcgtcctcaacgctgccgagctggatgtcgatcgcgcctccatccgtttccaggatttggcgccgacagatgtggctcagttcgatgaggatgagatcatggtcatcagcttcgaccgggagctgcccttcggagagggcgtgctcaccatggacttcaccggcacgctcaacgatcagatgaggggattttacaggagcaaatatgtgtacaatggagagtcaagaaatatggcagttacacagtttgaagccgctgatgcacggaggtgctttccatgttgggatgatcctgcatttaaggccaagttcaagctaacactagaagttccatctgacctggtagcattgtccaacatgccagtggctaaggagactgtcagtggacttaccaagactatttattatgaggaatctccacttatgtcaacctatcttgtggctatagttgttggcatctttgattacatagagagttcaacatcagagggaactaaagttcgtgtttatactcaagttggcaagactaatcaaggaaagtttgcactagatgttgctgtaaagtcgctggatttatacaaagattattttgccactccttatccattacctaagttggacatgattgctatcccggatttttctgctggggccatggagaactatgggttagttacttaccgagatacagctttgctgtatgatgagctactatcatcagcatccaacaagcaacaggtagcaataactgttgcacatgagttggcgcaccaatggtttggcaatcttgtgactatggaatggtggactcacttgtggctaaatgagggttttgcttcctgggtaagctatttagcagtagaatctttatttcctgaatggaataactggacacaatttcttgatgagacgacctctggcctcagattggatgcacttgcagagtctcatcctatcgaggttgaggtaaaccatgctagtgaaattgatgcaatttttgattccataagctatgacaagggtgcatctgttattcgtatgctacaaagttaccttggtgcagagtgttttcaggaatctggggagcctgttaaggatttgatgactacatggactaagcaacaaggatatcctgttatttatgcaaaaatcaatggacatgatttggaacttgaacaggcacagtttctatctgatggatcgtctggtcctggaatgtggattgttcctgtaacagcatgctgtggctcatatgatgcacagaaaaagttcttattgaaagataaaatggataagataaatattaaagagttttctgactctcaaagtgctgatggggagaagaatcaaatcatttggatcaaattgaatattgatcaaactggattttatagagtgaagtatgatgatgaacttgcagctggacttgtaaatgcaatcaaagcaaagaagctctcattaatggataagattggtatcgtggaagattcatatgcgctctctgttgcttgcaagcaaacactgacgtcattgttgcgactgctgaatgcttataatgatgagtctgattacactgtactttcacatgtaacctctgtatgtttaagcatttctaaaataacagttgacgctactcctgacttgaacaaagatatcaaacagcttttgatcaaccttcttctcccagctgtcataaagttaggctgggaccccaaggatggtgagagtcatcttgatgtaatgcttagatcactgctcttgactgcgctggtcagacttggacataatgaaactataaatgaaggagttcggcgtttccacatcttctttgaagacggcaaaacttcccttcttccaccagatactagaaaggctgcatatcttgccgtgatgcgaactgttagcacctcaagcagatccggttttgatgctctccttaaaatctacagagaagcatctgaaccacaggagaaatcacgtgtcttaggctccctgtcttcatcaccggatcaggatattgttttggaggcattgaactttatgtttactgatgaggtgcggaatcaagattcattttacatccttggtggcattagcttagaaggacgagaaattgcatggacctggttgaaggaaaactgggatcacgtgttgaagacatggaaatcgagttcactcatatcagacttcattgagtccattgtcccacggtttacctccgaggagaaagctgtcgaggttaccgagttctttgctggccaagttaagccatcattcgagagagcactgaagcagagcctggagagggtgcggatcagcgcgagatggatcgagagcattaggagtgagcccaagcttggtcagacagtgcaggagctgctgcaggccgatgcgtaaacatgtggcctggaaggtagcggttcctcagtgtgatcatctcatacgggctgttcgggtcagattaaagtcggttgtttagattgctgcagttataatctatagagataaacattgtagaaacagtagaagtcggtataaattaaacctaaacgaccaggcctataaattcttgaaaaggttcaggtgggcttattctacattgtattggcagttgcttgcgtatgatttgttgagggaaaaaactgatgcaatgacgtttgtttcaaagagtggtgtactgagtccatgattattattatttttatattattgacagtagtaaag

SEQ ID NO: 3952 - DNA, 3076 bp, Zea Mays
tccctaccgtcgccgtttccgcactttcctcgtcacacaagtccacctccaccgccgcacgccgccgctcctccgcatccgcgaccgcgacctcgaggtcgccctccctccgcgccagctgcaatggcggcctcgccggaccaattccgggggcatgcgcgcctcccgcacttcgcggccccgctccgctacgacctccgcctccgcccggacctcgccgcgtgcaccttcacgggcgccgcggccatcgccgttgtcgtgtccgcgcccacccgcttcctcgtcctcaacgctgccgagctggatgtcgatcgcgcctccatccgtttccaggatttggcgccgacagatgtggctcagttcgatgaggatgagatcatggtcatcagcttcgaccgggagctgcccttcggagagggcgtgctcaccatggacttcaccggcacgctcaacgatcagatgaggggattttacaggagcaaatatgtgtacaatggagagtcaagaaatatggcagttacacagtttgaagccgctgatgcacggaggtgctttccatgttgggatgatcctgcatttaaggccaagttcaagctaacactagaagttccatctgacctggtagcattgtccaacatgccagtggctaaggagactgtcagtggacttaccaagactatttattatgaggaatctccacttatgtcaacctatcttgtggctatagttgttggcatctttgattacatagagagttcaacatcagagggaactaaagttcgtgtttatactcaagttggcaagactaatcaaggaaagtttgcactagatgttgctgtaaagtcgctggatttatacaaagattattttgccactccttatccattacctaagttggacatgattgctatcccggatttttctgctggggccatggagaactatgggttagttacttaccgagatacagctttgctgtatgatgagctactatcatcagcatccaacaagcaacaggtagcaataactgttgcacatgagttggcgcaccaatggtttggcaatcttgtgactatggaatggtggactcacttgtggctaaatgagggttttgcttcctggctatttagcagtagaatctttatttcctgaatggaataactggacacaatttcttgatgagacgacctctggcctcagattggatgcacttgcagagtctcatcctatcgaggttgaggtaaaccatgctagtgaaattgatgcaatttttgattccataagctatgacaagggtgcatctgttattcgtatgctacaaagttaccttggtgcagagtgttttcagaaagctttggcttcatatataaagaaatatgcctactcgaatgctaagactgaagacctatgggttgttcttgaggaggaatctggggagcctgttaaggatttgatgactacatggactaagcaacaaggatatcctgttatttatgcaaaaatcaatggacatgatttggaacttgaacaggcacagtttctatctgatggatcgtctggtcctggaatgtggattgttcctgtaacagcatgctgtggctcatatgatgcacagaaaaagttcttattgaaagataaaatggataagataaatattaaagagttttctgactctcaaagtgctgatggggagaagaatcaaatcatttggatcaaattgaatattgatcaaactggattttatagagtgaagtatgatgatgaacttgcagctggacttgtaaatgcaatcaaagcaaagaagctctcattaatggataagattggtatcgtggaagattcatatgcgctctctgttgcttgcaagcaaacactgacgtcattgttgcgactgctgaatgcttataatgatgagtctgattacactgtactttcacatgtaacctctgtatgtttaagcatttctaaaataacagttgacgctactcctgacttgaacaaagatatcaaacagcttttgatcaaccttcttctcccagctgtcataaagttaggctgggaccccaaggatggtgagagtcatcttgatgtaatgcttagatcactgctcttgactgcgctggtcagacttggacataatgaaactataaatgaaggagttcggcgtttccacatcttctttgaagacggcaaaacttcccttcttccaccagatactagaaaggctgcatatcttgccgtgatgcgaactgttagcacctcaagcagatccggttttgatgctctccttaaaatctacagagaagcatctgaaccacaggagaaatcacgtgtcttaggctccctgtcttcatcaccggatcaggatattgttttggaggcattgaactttatgtttactgatgaggtgcggaatcaagattcattttacatccttggtggcattagcttagaaggacgagaaattgcatggacctggttgaaggaaaactgggatcacgtgttgaagacatggaaatcgagttcactcatatcagacttcattgagtccattgtcccacggtttacctccgaggagaaagctgtcgaggttaccgagttctttgctggccaagttaagccatcattcgagagagcactgaagcagagcctggagagggtgcggatcagcgcgagatggatcgagagcattaggagtgagcccaagcttggtcagacagtgcaggagctgctgcaggccgatgcgtaaacatgtggcctggaaggtagcggttcctcagtgtgatcatctcatacgggctgttcgggtcagattaaagtcggttgtttagattgctgcagttataatctatagagataaacattgtagaaacagtagaagtcggtataaattaaacctaaacgaccaggcctataaattcttgaaaaggttcaggtgggcttattctacattgtattggcagttgcttgcgtatgatttgttgagggaaaaaactgatgcaatgacgtttgtttcaaagagtggtgtactgagtccatgattattattatttttatattattgacagtagtaaag

SEQ ID NO: 3953 - DNA, 667 bp, Zea Mays
ttcccattcacccgcaggtgcggaatcaagattcattttacatccttggtggcattagcttagaaggacgagaaattgcatggacctggttgaaggaaaactgggatcacgtgttgaagacatggaaatcgagttcactcatatcagacttcattgagtccattgtcccacggctgtcgaggttaccgagttctttgctggccaagttaagccatcattcgagagagcactgaagcagagcctggagagggtgcggatcagcgcgagatggatcgagagcattaggagtgagcccaagcttggtcagacagtgcaggagctgctgcaggccgatgcgtaaacatgtggcctggaaggtagcggttcctcagtgtgatcatctcatacgggctgttcgggtcagattaaagtcggttgtttagattgctgcagttataatctatagagataaacattgtagaaacagtagaagtcggtataaattaaacctaaacgaccaggcctataaattcttgaaaaggttcaggtgggcttattctacattgtattggcagttgcttgcgtatgatttgttgagggaaaaaactgatgcaatgacgtttgtttcaaagagtggtgtactgagtccatgattattattatttttatattattgacagtagtaaag

SEQ ID NO: 3954 - DNA, 1879 bp, Zea Mays
gccatcgaccaccgtttcctgattgcctccatttctgtgggactcgtcggattcactcaccatcgatccattgttttcgtctcttgcggccttgccccacccataaagccgatgggttagctcccccgcaccgcacgcccaagaacaaagaggagccgacgccacggcgacggtcgtcctctcccggccagcaccgtcgcggactgcgttgcatccgtgcctttgcttctctcttcaccccgcgtctctctctcttggcgacgactgggggaccactgccgccgctcaacgccagttttgtgatcggtgaaaatggctgctgctgaagcaagggctgcttggcaacgtgctgcaaaccgttgtctggttcaggaggacaggaagagagctccaaaactagcttgctgtccatcatcggctgaacaacatgtgtggttcaacatttttctagcagtagcacaaccggattggaaagcaaacaaacactccggaatggctctgagcgagacatgattttggaggcactccgccattcacaaactcgtgctagagaagctgatatggcggctaagaaggcgtacaatgagaaggacgacgtcatcaagcttttgctccgacaggcctcacatctctttgcgtgcaaccagtggctgaaaataatgcagctggagaatattgtcctgcagctcaagaacaaagagcatcagatagcagccatcatacctgaacttccatggttaaccctaaaagagaagcctacacagggtcaggggcagagagattggactaggaggaaaggtagaaggcagaagaaggcagccgggttcttcgacgcgatcttatttgctgttgggttgggtcttgctggagctgggtttcttcttggctggactcttgggtggcttctgccgaagttttaaagttgttggttatttttattttggggtacccagctaggcatgtattttgctgtgtaggatccagagggaaggccaagtgcactctgtgaaaatggtgtcaaatgatcaaatttgttagaccctagcatctgttcatttggaaacaatgatggcgcaatgagtaaatgaatggctgtccgcattccaccaagagcattttttctaaacattctgtttgttgtaaatatgtgtggtgaactgtattactttgatctgttaggttgtgtgaggtacctagatcaagctttataaaaaatgaggctgaggagaagagtctacgggctcggctatgagcagtaacttaaaagctcttttgtgggttttggtgtttggatgacaactcaattaaaggactaacaagtgtgctaagtgttgaacatgtgcttaatgcaaagctaacagggttcaacacaagtgaacaagtgatggtccaaagactgaattatctatagataatgaacactgcttaagtgagactcggtgtgcgtaacttagagacagccgatcaagccaaggatagaggcaagaagagcttcaaggtactgagtgcacgggagaaggtcaaggagaccaggaacccaaagccaggggtgaagaagaagacttgcaaagtcaaggttgatcgagttaagaagagttatggtgcatcaatgatcactacataaggacatgacttacaaccaatgaggtaacatctacagttatgtggtgtaagtcataaggctcaagatcaagctcgagaagtgaacaagcgagttagatctcagatatgccaatctagatcaagtcaagttgacttaatggtttagagtccaacatcgacctcaaacatgccaaattgggtaaaacgatgaaaaaggttaagtatgtaaggtttgagtgttcaaccatgttgcatacacctcttactacaagtttgg

SEQ ID NO: 3955 - DNA, 2576 bp, Zea Mays
gccatcgaccaccgtttcctgattgcctccatttctgtgggactcgtcggattcactcaccatcgatccattgttttcgtctcttgcggccttgccccacccataaagccgatgggttagctcccccgcaccgcacgcccaagaacaaagaggagccgacgccacggcgacggtcgtcctctcccggccagcaccgtcgcggactgcgttgcatccgtgcctttgcttctctcttcaccccgcgtctctctctcttggcgacgactgggggaccactgccgccgctcaacgccagttttgtgatcggtgaaaatggctgctgctgaagcaagggctgcttggcaacgtgctgcaaaccgttgtctggttcaggaggacaggaagagagctccaaaactagcttgctgtccatcatcggctgaacaacatgggacattcatgagaagcaagtggaagattcagtgccacaacctaaacatgaggaaacattactctgtcaagcagttgacaccagcactgaaaagattggagatgctttggagcctccatggatggtttcgccagccttcacgaagtattcccttgaaacaggcttagaagagatgaagactgttggtagctattctcaagtgtcgaagtgcatagaaactctcagcaattgtttgtacaaggataatgaattcccagattttgaatgtattgacccagcacctttgaagaacccagataaggctaattttgacatagatgcaccttggaaaggtgaaaagactcgaccatggtggcagattgctgacgaggaccagctggcttcactggttgcagaaagagcaacacagcacattgagaattgtgacctaccaaggcctacccagacagtacgcattaacaggacagaaccatatactcaaaaacatataggtgactttgggggaccttcatctcctgcaggaagagtgtcacaccctgttcctggacattgtgaccatatcgagtgtacctatagcacaggaagtacagatgagttggttctgttatatggtaatggagtttgggaacagcatggaagcagtgatacatataggtgtgcgttcttcagcttagctgcattaccctcacgacattagtgtggttcaacatttttctagcagtagcacaaccggattggaaagcaaacaaacactccggaatggctctgagcgagacatgattttggaggcactccgccattcacaaactcgtgctagagaagctgatatggcggctaagaaggcgtacaatgagaaggacgacgtcatcaagcttttgctccgacaggcctcacatctctttgcgtgcaaccagtggctgaaaataatgcagctggagaatattgtcctgcagctcaagaacaaagagcatcagatagcagccatcatacctgaacttccatggttaaccctaaaagagaagcctacacagggtcaggggcagagagattggactaggaggaaaggtagaaggcagaagaaggcagccgggttcttcgacgcgatcttatttgctgttgggttgggtcttgctggagctgggtttcttcttggctggactcttgggtggcttctgccgaagttttaaagttgttggttatttttattttggggtacccagctaggcatgtattttgctgtgtaggatccagagggaaggccaagtgcactctgtgaaaatggtgtcaaatgatcaaatttgttagaccctagcatctgttcatttggaaacaatgatggcgcaatgagtaaatgaatggctgtccgcattccaccaagagcattttttctaaacattctgtttgttgtaaatatgtgtggtgaactgtattactttgatctgttaggttgtgtgaggtacctagatcaagctttataaaaaatgaggctgaggagaagagtctacgggctcggctatgagcagtaacttaaaagctcttttgtgggttttggtgtttggatgacaactcaattaaaggactaacaagtgtgctaagtgttgaacatgtgcttaatgcaaagctaacagggttcaacacaagtgaacaagtgatggtccaaagactgaattatctatagataatgaacactgcttaagtgagactcggtgtgcgtaacttagagacagccgatcaagccaaggatagaggcaagaagagcttcaaggtactgagtgcacgggagaaggtcaaggagaccaggaacccaaagccaggggtgaagaagaagacttgcaaagtcaaggttgatcgagttaagaagagttatggtgcatcaatgatcactacataaggacatgacttacaaccaatgaggtaacatctacagttatgtggtgtaagtcataaggctcaagatcaagctcgagaagtgaacaagcgagttagatctcagatatgccaatctagatcaagtcaagttgacttaatggtttagagtccaacatcgacctcaaacatgccaaattgggtaaaacgatgaaaaaggttaagtatgtaaggtttgagtgttcaaccatgttgcatacacctcttactacaagtttgg

SEQ ID NO: 3956 - DNA, 3028 bp, Zea Mays
gccatcgaccaccgtttcctgattgcctccatttctgtgggactcgtcggattcactcaccatcgatccattgttttcgtctcttgcggccttgccccacccataaagccgatgggttagctcccccgcaccgcacgcccaagaacaaagaggagccgacgccacggcgacggtcgtcctctcccggccagcaccgtcgcggactgcgttgcatccgtgcctttgcttctctcttcaccccgcgtctctctctcttggcgacgactgggggaccactgccgccgctcaacgccagttttgtgatcggtgaaaatggctgctgctgaagcaagggctgcttggcaacgtgctgcaaaccgttgtctggttcaggaggacaggaagagagctccaaaactagcttgctgtccatcatcggctgaacaacatgatgtcagatggtgggttcagtcacagccaaattttgggatccagaaggatattgttagcaagcggttatgttcgttgggcagggacattcatgagaagcaagtggaagattcagtgccacaacctaaacatgaggaaacattactctgtcaagcagttgacaccagcactgaaaagattggagatgctttggagcctccatggatggtttcgccagccttcacgaagtattcccttgaaacaggcttagaagagatgaagactgttggtagctattctcaagtgtcgaagtgcatagaaactctcagcaattgtttgtacaaggataatgaattcccagattttgaatgtattgacccagcacctttgaagaacccagataaggctaattttgacatagatgcaccttggaaaggtgaaaagactcgaccatggtggcagattgctgacgaggaccagctggcttcactggttgcagaaagagcaacacagcacattgagaattgtgacctaccaaggcctacccagacagtacgcattaacaggacagaaccatatactcaaaaacatataggtgactttgggggaccttcatctcctgcaggaagagtgtcacaccctgttcctggacattgtgaccatatcgagtgtacctatagcacaggaagtacagatgagttggttctgttatatggtaatggagtttgggaacagcatggaagcagtgatacatataggtgtgcgttcttcagcttagctgcattaccctcacgacattaggtgtacttttttcgaactgtatctcaacttgcagcttattttgtttccttttatgtatgggtatatgaggtattcaagattttatcaacagcatattacaagtataattagcattcaaggagaaaataaagcttgataacttcggttctgttggtgggatatgcagtctaatttaatattggttttttgttgttcaacaattatcaagccttagtaaattttacatgtctattgtcagcaagagggtacacagttcacatatatactatatgcatcctttcttgaagactttcaaatgtcttcctttttttcataattttgtttagtatccttgtcacatactcattcatctcagtttcatcatgtgcagtgtggttcaacatttttctagcagtagcacaaccggattggaaagcaaacaaacactccggaatggctctgagcgagacatgattttggaggcactccgccattcacaaactcgtgctagagaagctgatatggcggctaagaaggcgtacaatgagaaggacgacgtcatcaagcttttgctccgacaggcctcacatctctttgcgtgcaaccagtggctgaaaataatgcagctggagaatattgtcctgcagctcaagaacaaagagcatcagatagcagccatcatacctgaacttccatggttaaccctaaaagagaagcctacacagggtcaggggcagagagattggactaggaggaaaggtagaaggcagaagaaggcagccgggttcttcgacgcgatcttatttgctgttgggttgggtcttgctggagctgggtttcttcttggctggactcttgggtggcttctgccgaagttttaaagttgttggttatttttattttggggtacccagctaggcatgtattttgctgtgtaggatccagagggaaggccaagtgcactctgtgaaaatggtgtcaaatgatcaaatttgttagaccctagcatctgttcatttggaaacaatgatggcgcaatgagtaaatgaatggctgtccgcattccaccaagagcattttttctaaacattctgtttgttgtaaatatgtgtggtgaactgtattactttgatctgttaggttgtgtgaggtacctagatcaagctttataaaaaatgaggctgaggagaagagtctacgggctcggctatgagcagtaacttaaaagctcttttgtgggttttggtgtttggatgacaactcaattaaaggactaacaagtgtgctaagtgttgaacatgtgcttaatgcaaagctaacagggttcaacacaagtgaacaagtgatggtccaaagactgaattatctatagataatgaacactgcttaagtgagactcggtgtgcgtaacttagagacagccgatcaagccaaggatagaggcaagaagagcttcaaggtactgagtgcacgggagaaggtcaaggagaccaggaacccaaagccaggggtgaagaagaagacttgcaaagtcaaggttgatcgagttaagaagagttatggtgcatcaatgatcactacataaggacatgacttacaaccaatgaggtaacatctacagttatgtggtgtaagtcataaggctcaagatcaagctcgagaagtgaacaagcgagttagatctcagatatgccaatctagatcaagtcaagttgacttaatggtttagagtccaacatcgacctcaaacatgccaaattgggtaaaacgatgaaaaaggttaagtatgtaaggtttgagtgttcaaccatgttgcatacacctcttactacaagtttgg

SEQ ID NO: 3957 - DNA, 2648 bp, Zea Mays
gccatcgaccaccgtttcctgattgcctccatttctgtgggactcgtcggattcactcaccatcgatccattgttttcgtctcttgcggccttgccccacccataaagccgatgggttagctcccccgcaccgcacgcccaagaacaaagaggagccgacgccacggcgacggtcgtcctctcccggccagcaccgtcgcggactgcgttgcatccgtgcctttgcttctctcttcaccccgcgtctctctctcttggcgacgactgggggaccactgccgccgctcaacgccaggtagtcccttcgccggcgacgagcacccactagttttgtgatcggtgaaaatggctgctgctgaagcaagggctgcttggcaacgtgctgcaaaccgttgtctggttcaggaggacaggaagagagctccaaaactagcttgctgtccatcatcggctgaacaacatgatgtcagatggtgggttcagtcacagccaaattttgggatccagaaggatattgttagcaagcggttatgttcgttgggcagggacattcatgagaagcaagtggaagattcagtgccacaacctaaacatgaggaaacattactctgtcaagcagttgacaccagcactgaaaagattggagatgctttggagcctccatggatggtttcgccagccttcacgaagtattcccttgaaacaggcttagaagagatgaagactgttggtagctattctcaagtgtcgaagtgcatagaaactctcagcaattgtttgtacaaggataatgaattcccagattttgaatgtattgacccagcacctttgaagaacccagataaggctaattttgacatagatgcaccttggaaaggtgaaaagactcgaccatggtggcagattgctgacgaggaccagctggcttcactggttgcagaaagagcaacacagcacattgagaattgtgacctaccaaggcctacccagacagtacgcattaacaggacagaaccatatactcaaaaacatataggtgactttgggggaccttcatctcctgcaggaagagtgtcacaccctgttcctggacattgtgaccatatcgagtgtacctatagcacaggaagtacagatgagttggttctgttatatggtaatggagtttgggaacagcatggaagcagtgatacatatagtgtggttcaacatttttctagcagtagcacaaccggattggaaagcaaacaaacactccggaatggctctgagcgagacatgattttggaggcactccgccattcacaaactcgtgctagagaagctgatatggcggctaagaaggcgtacaatgagaaggacgacgtcatcaagcttttgctccgacaggcctcacatctctttgcgtgcaaccagtggctgaaaataatgcagctggagaatattgtcctgcagctcaagaacaaagagcatcagatagcagccatcatacctgaacttccatggttaaccctaaaagagaagcctacacagggtcaggggcagagagattggactaggaggaaaggtagaaggcagaagaaggcagccgggttcttcgacgcgatcttatttgctgttgggttgggtcttgctggagctgggtttcttcttggctggactcttgggtggcttctgccgaagttttaaagttgttggttatttttattttggggtacccagctaggcatgtattttgctgtgtaggatccagagggaaggccaagtgcactctgtgaaaatggtgtcaaatgatcaaatttgttagaccctagcatctgttcatttggaaacaatgatggcgcaatgagtaaatgaatggctgtccgcattccaccaagagcattttttctaaacattctgtttgttgtaaatatgtgtggtgaactgtattactttgatctgttaggttgtgtgaggtacctagatcaagctttataaaaaatgaggctgaggagaagagtctacgggctcggctatgagcagtaacttaaaagctcttttgtgggttttggtgtttggatgacaactcaattaaaggactaacaagtgtgctaagtgttgaacatgtgcttaatgcaaagctaacagggttcaacacaagtgaacaagtgatggtccaaagactgaattatctatagataatgaacactgcttaagtgagactcggtgtgcgtaacttagagacagccgatcaagccaaggatagaggcaagaagagcttcaaggtactgagtgcacgggagaaggtcaaggagaccaggaacccaaagccaggggtgaagaagaagacttgcaaagtcaaggttgatcgagttaagaagagttatggtgcatcaatgatcactacataaggacatgacttacaaccaatgaggtaacatctacagttatgtggtgtaagtcataaggctcaagatcaagctcgagaagtgaacaagcgagttagatctcagatatgccaatctagatcaagtcaagttgacttaatggtttagagtccaacatcgacctcaaacatgccaaattgggtaaaacgatgaaaaaggttaagtatgtaaggtttgagtgttcaaccatgttgcatacacctcttactacaagtttgg

SEQ ID NO: 3958 - DNA, 2691 bp, Zea Mays
gccatcgaccaccgtttcctgattgcctccatttctgtgggactcgtcggattcactcaccatcgatccattgttttcgtctcttgcggccttgccccacccataaagccgatgggttagctcccccgcaccgcacgcccaagaacaaagaggagccgacgccacggcgacggtcgtcctctcccggccagcaccgtcgcggactgcgttgcatccgtgcctttgcttctctcttcaccccgcgtctctctctcttggcgacgactgggggaccactgccgccgctcaacgccaggtagtcccttcgccggcgacgagcacccactagttttgtgatcggtgaaaatggctgctgctgaagcaagggctgcttggcaacgtgctgcaaaccgttgtctggttcaggaggacaggaagagagctccaaaactagcttgctgtccatcatcggctgaacaacatgatgtcagatggtgggttcagtcacagccaaattttgggatccagaaggatattgttagcaagcggttatgttcgttgggcagggacattcatgagaagcaagtggaagattcagtgccacaacctaaacatgaggaaacattactctgtcaagcagttgacaccagcactgaaaagattggagatgctttggagcctccatggatggtttcgccagccttcacgaagtattcccttgaaacaggcttagaagagatgaagactgttggtagctattctcaagtgtcgaagtgcatagaaactctcagcaattgtttgtacaaggataatgaattcccagattttgaatgtattgacccagcacctttgaagaacccagataaggctaattttgacatagatgcaccttggaaaggtgaaaagactcgaccatggtggcagattgctgacgaggaccagctggcttcactggttgcagaaagagcaacacagcacattgagaattgtgacctaccaaggcctacccagacagtacgcattaacaggacagaaccatatactcaaaaacatataggtgactttgggggaccttcatctcctgcaggaagagtgtcacaccctgttcctggacattgtgaccatatcgagtgtacctatagcacaggaagtacagatgagttggttctgttatatggtaatggagtttgggaacagcatggaagcagtgatacatataggtgtgcgttcttcagcttagctgcattaccctcacgacattagtgtggttcaacatttttctagcagtagcacaaccggattggaaagcaaacaaacactccggaatggctctgagcgagacatgattttggaggcactccgccattcacaaactcgtgctagagaagctgatatggcggctaagaaggcgtacaatgagaaggacgacgtcatcaagcttttgctccgacaggcctcacatctctttgcgtgcaaccagtggctgaaaataatgcagctggagaatattgtcctgcagctcaagaacaaagagcatcagatagcagccatcatacctgaacttccatggttaaccctaaaagagaagcctacacagggtcaggggcagagagattggactaggaggaaaggtagaaggcagaagaaggcagccgggttcttcgacgcgatcttatttgctgttgggttgggtcttgctggagctgggtttcttcttggctggactcttgggtggcttctgccgaagttttaaagttgttggttatttttattttggggtacccagctaggcatgtattttgctgtgtaggatccagagggaaggccaagtgcactctgtgaaaatggtgtcaaatgatcaaatttgttagaccctagcatctgttcatttggaaacaatgatggcgcaatgagtaaatgaatggctgtccgcattccaccaagagcattttttctaaacattctgtttgttgtaaatatgtgtggtgaactgtattactttgatctgttaggttgtgtgaggtacctagatcaagctttataaaaaatgaggctgaggagaagagtctacgggctcggctatgagcagtaacttaaaagctcttttgtgggttttggtgtttggatgacaactcaattaaaggactaacaagtgtgctaagtgttgaacatgtgcttaatgcaaagctaacagggttcaacacaagtgaacaagtgatggtccaaagactgaattatctatagataatgaacactgcttaagtgagactcggtgtgcgtaacttagagacagccgatcaagccaaggatagaggcaagaagagcttcaaggtactgagtgcacgggagaaggtcaaggagaccaggaacccaaagccaggggtgaagaagaagacttgcaaagtcaaggttgatcgagttaagaagagttatggtgcatcaatgatcactacataaggacatgacttacaaccaatgaggtaacatctacagttatgtggtgtaagtcataaggctcaagatcaagctcgagaagtgaacaagcgagttagatctcagatatgccaatctagatcaagtcaagttgacttaatggtttagagtccaacatcgacctcaaacatgccaaattgggtaaaacgatgaaaaaggttaagtatgtaaggtttgagtgttcaaccatgttgcatacacctcttactacaagtttgg

SEQ ID NO: 3959 - DNA, 2444 bp, Zea Mays
gtgaagacttatgcatcgcttggataatttttgtgatcggtgaaaatggctgctgctgaagcaagggctgcttggcaacgtgctgcaaaccgttgtctggttcaggaggacaggaagagagctccaaaactagcttgctgtccatcatcggctgaacaacatggtacaaacaatgggaactgtcgaaattctgtagatcgtcctatctgcagtttaatgcctttgagctgcaatcccatgcattctaatctgccaccagatgtcagatggtgggttcagtcacagccaaattttgggatccagaaggatattgttagcaagcggttatgttcgttgggcagggacattcatgagaagcaagtggaagattcagtgccacaacctaaacatgaggaaacattactctgtcaagcagttgacaccagcactgaaaagattggagatgctttggagcctccatggatggtttcgccagccttcacgaagtattcccttgaaacaggcttagaagagatgaagactgttggtagctattctcaagtgtcgaagtgcatagaaactctcagcaattgtttgtacaaggataatgaattcccagattttgaatgtattgacccagcacctttgaagaacccagataaggctaattttgacatagatgcaccttggaaaggtgaaaagactcgaccatggtggcagattgctgacgaggaccagctggcttcactggttgcagaaagagcaacacagcacattgagaattgtgacctaccaaggcctacccagacagtacgcattaacaggacagaaccatatactcaaaaacatataggtgactttgggggaccttcatctcctgcaggaagagtgtcacaccctgttcctggacattgtgaccatatcgagtgtacctatagcacaggaagtacagatgagttggttctgttatatggtaatggagtttgggaacagcatggaagcagtgatacatatagtgtggttcaacatttttctagcagtagcacaaccggattggaaagcaaacaaacactccggaatggctctgagcgagacatgattttggaggcactccgccattcacaaactcgtgctagagaagctgatatggcggctaagaaggcgtacaatgagaaggacgacgtcatcaagcttttgctccgacaggcctcacatctctttgcgtgcaaccagtggctgaaaataatgcagctggagaatattgtcctgcagctcaagaacaaagagcatcagatagcagccatcatacctgaacttccatggttaaccctaaaagagaagcctacacagggtcaggggcagagagattggactaggaggaaaggtagaaggcagaagaaggcagccgggttcttcgacgcgatcttatttgctgttgggttgggtcttgctggagctgggtttcttcttggctggactcttgggtggcttctgccgaagttttaaagttgttggttatttttattttggggtacccagctaggcatgtattttgctgtgtaggatccagagggaaggccaagtgcactctgtgaaaatggtgtcaaatgatcaaatttgttagaccctagcatctgttcatttggaaacaatgatggcgcaatgagtaaatgaatggctgtccgcattccaccaagagcattttttctaaacattctgtttgttgtaaatatgtgtggtgaactgtattactttgatctgttaggttgtgtgaggtacctagatcaagctttataaaaaatgaggctgaggagaagagtctacgggctcggctatgagcagtaacttaaaagctcttttgtgggttttggtgtttggatgacaactcaattaaaggactaacaagtgtgctaagtgttgaacatgtgcttaatgcaaagctaacagggttcaacacaagtgaacaagtgatggtccaaagactgaattatctatagataatgaacactgcttaagtgagactcggtgtgcgtaacttagagacagccgatcaagccaaggatagaggcaagaagagcttcaaggtactgagtgcacgggagaaggtcaaggagaccaggaacccaaagccaggggtgaagaagaagacttgcaaagtcaaggttgatcgagttaagaagagttatggtgcatcaatgatcactacataaggacatgacttacaaccaatgaggtaacatctacagttatgtggtgtaagtcataaggctcaagatcaagctcgagaagtgaacaagcgagttagatctcagatatgccaatctagatcaagtcaagttgacttaatggtttagagtccaacatcgacctcaaacatgccaaattgggtaaaacgatgaaaaaggttaagtatgtaaggtttgagtgttcaaccatgttgcatacacctcttactacaagtttgg

SEQ ID NO: 3960 - DNA, 2083 bp, Zea Mays
ggttggcctccgcccccgcgtcgcctcgtctctgggcctgctcgcctcattgccccccgtgctgcctacgcttttgccagcgcgcgccccaccaccaccggaaaagaaattccccaattctactccacccggcgcgctctccccacgcgcatccggatccgtccgctctgatcgagaagtgagttgatctggactctgtgcctgcctgtgagggcgaggagggcatggacgagttcgagctggaggacaacctcgagttcatcctccagagcatccaggagctgatggaggacccgggggacaacaacgccttcggagacgccaaccagaacgagctcttcgccagcatcgttaactacgaccaggagaacatgctgcccgacgtgtctgcagcggacgttgctgcagggaaggacattcaggggatcccgtgggagaagatgctcttcgggagggataagtaccgggagatgaagatgaagaactacagaaattaccagaatctaagttacgcacgggaggatgctttgcaggagtgcaaacaagtgacgaaggatagtccttactatgatttccactacaacacaaggcgtgctcggccatcaattgtacattttcagctacggaacctagtgtgggcaaccacgaaacatgatgtttatacaatgcatgatcaatcagtgacacactggtcctcactggagcagacaagcactgagctaatcaatgccgatgattgcatcgtcccaaaacagaggggccatggttcacagtcagtggcaatggttcaggtcacaacaatggccgtggatagtaatttattggtagttggtggctttcaaggggagattatatgcaagcgtttggatgatgagggggttgtttacagcacaagggttacagatgatgaaaatgcaatcactaactctttagagatgtatcaggatccgagcggatctagaaggttggtggctgctaacaatgactgctccatcaggatttttgacaccgagtactttgacctcctcaagcactatgtcttcccttggtccgtgaatagtgtttctgtgagcccgaatgggaaactctttgctgtcctgggagatcatgaggatggttgtgtggtggatcccaagtgtggcaaggcaattggctctctcaggggtcacttggattactcatttgcatctgcatggcatcctgatggcaatatcgtggcaactgggagtcaagacactacatgcaggctatgggacatcaggaacctatcccaatcagtagctgtgcttggtggaaggatgggctcaattcggtgtgtgaagttctcttcagacgggcgcttccttgcaacagcagagcccgtagattttgtccacatgtacgatgcttatgcggactacagcagatctcacgagattgacttgtttggcgagattggaggtttagcattcagccctgacaccgaggccttctatgtgggccttgcggaccagacgtacggaggcatgatcgagttcagcaagaggcaccaacatcattacttgaactccttgtggtgataaccacttgagcggaaatttggtcgcacagctgttggaccccattgttgcattgtgtgctccagaggagtgcatggtcctacagaggaggatctcatgagtgcatgcagaagtgtataaaattctggggggtttctttccctgttgctagtaatctgggttttgtcgctcgactcgtggaactgaaggcggtagcatatgtatagcctttctgtttctcgacacctaacaatgtacatagtttgtgtcaggatattatctccccattcaccgtctgcctgacatgtagtagtaggttggagttttatggcttccgaatcgggagccctgcatgagtcccagcattgctgtctgcggcaactactggtcggcaccttgtacgtcgctgtatcagcagttgtatcagcacattgttggtccttacgctgcagttgcagcatcagcaccagcagtggttggtggttgattgtccagtgaccaatgtgtaggagaggaaatgtgacaggcgtcctacaggttacgca

SEQ ID NO: 3961 - DNA, 2047 bp, Zea Mays
ggttggcctccgcccccgcgtcgcctcgtctctgggcctgctcgcctcattgccccccgtgctgcctacgcttttgccagcgcgcgccccaccaccaccggaaaagaaattccccaattctactccacccggcgcgctctccccacgcgcatccggatccgtccgctctgatcgagggcgaggagggcatggacgagttcgagctggaggacaacctcgagttcatcctccagagcatccaggagctgatggaggacccgggggacaacaacgccttcggagacgccaaccagaacgagctcttcgccagcatcgttaactacgaccaggagaacatgctgcccgacgtgtctgcagcggacgttgctgcagggaaggacattcaggggatcccgtgggagaagatgctcttcgggagggataagtaccgggagatgaagatgaagaactacagaaattaccagaatctaagttacgcacgggaggatgctttgcaggagtgcaaacaagtgacgaaggatagtccttactatgatttccactacaacacaaggcgtgctcggccatcaattgtacattttcagctacggaacctagtgtgggcaaccacgaaacatgatgtttatacaatgcatgatcaatcagtgacacactggtcctcactggagcagacaagcactgagctaatcaatgccgatgattgcatcgtcccaaaacagaggggccatggttcacagtcagtggcaatggttcaggtcacaacaatggccgtggatagtaatttattggtagttggtggctttcaaggggagattatatgcaagcgtttggatgatgagggggttgtttacagcacaagggttacagatgatgaaaatgcaatcactaactctttagagatgtatcaggatccgagcggatctagaaggttggtggctgctaacaatgactgctccatcaggatttttgacaccgagtactttgacctcctcaagcactatgtcttcccttggtccgtgaatagtgtttctgtgagcccgaatgggaaactctttgctgtcctgggagatcatgaggatggttgtgtggtggatcccaagtgtggcaaggcaattggctctctcaggggtcacttggattactcatttgcatctgcatggcatcctgatggcaatatcgtggcaactgggagtcaagacactacatgcaggctatgggacatcaggaacctatcccaatcagtagctgtgcttggtggaaggatgggctcaattcggtgtgtgaagttctcttcagacgggcgcttccttgcaacagcagagcccgtagattttgtccacatgtacgatgcttatgcggactacagcagatctcacgagattgacttgtttggcgagattggaggtttagcattcagccctgacaccgaggccttctatgtgggccttgcggaccagacgtacggaggcatgatcgagttcagcaagaggcaccaacatcattacttgaactccttgtggtgataaccacttgagcggaaatttggtcgcacagctgttggaccccattgttgcattgtgtgctccagaggagtgcatggtcctacagaggaggatctcatgagtgcatgcagaagtgtataaaattctggggggtttctttccctgttgctagtaatctgggttttgtcgctcgactcgtggaactgaaggcggtagcatatgtatagcctttctgtttctcgacacctaacaatgtacatagtttgtgtcaggatattatctccccattcaccgtctgcctgacatgtagtagtaggttggagttttatggcttccgaatcgggagccctgcatgagtcccagcattgctgtctgcggcaactactggtcggcaccttgtacgtcgctgtatcagcagttgtatcagcacattgttggtccttacgctgcagttgcagcatcagcaccagcagtggttggtggttgattgtccagtgaccaatgtgtaggagaggaaatgtgacaggcgtcctacaggttacgca

SEQ ID NO: 3962 - DNA, 2140 bp, Zea Mays
ccgggcaccgccgcgggccccacgtctacagattcgcgtcgtgctctagggaggcttggcgccccccaaccccaactataaataacggccgtcctctccccgtcttctacactacacacaccctcctcctccggttctcctcgcaccttctcccacctctgctctgctctgctctgctctcccaggccaggccctgcagctgcaagcaccgaggacagacagagtcgctcgcttcgccaccactagctgttgcttgcctgccacccaaggatttccttccatcgagatcaagtagcgtagcggcttgcctgaccaagaggcagagctctcgatgacgaagcagggcatggtggtgccggtgcctgaagcggccgtggcggtaccgcccaactcggcgccgctgttccagtacccgccgccgcgggccgcgccgggcgtcgccgtgcgcaagaagtgcctgcagatgggcgccggcgccgggcgcatcggcggctgggtggagtccatgcgcgcgtcctcgcccacccacgccaaggcggccgccgcgctcgccgcgggcgtcgaagaggagcggtacgccgcgtggatggtgaaacacccgtcggcgctggccatgttcgaccagctggtagcggcgtccaaggggaagcagatcgtcgtgttcctcgactacgacggcacgctgtcccccatcgtcgacgaccccgacgccgcctacatgtccgacacgatgcggcgggcggtgcggagcgtcgccaagcacttcccgacggcgatcgtgagcgggcggtgccgcgacaaggtgttcgaattcgtgaagctggcagagctgtactacgccggcagccacggcatggacatcaagggccccgccaaagggtcccggcacaccaaggccaaaggaggcggcgttctctttcagccggccagccagttcctgcccatgatagagcaggtgcacgattctctggtggaaaagaccaagtgcatacctggagccaaggtggagaacaacaagttctgtgtgtctgtccacttcagatgcgtcgatgagaagagctggatcacgttggcggatatggtgaagtcggtgctcaaggactacccgaagctgaagctgacgcagggcaggatggtgttcgaggtccgccccaccatcaagtgggacaagggcaaggccctggagttcctcctcgagtccctcgggtacgccgactgcaccgacgtgctgcccgtgtacatcggcgacgaccgcaccgacgaggacgccttcaaggtgctccgcaagcgcgggcagggcgtgggcatcctcgtgtccaagcaccccaaggacacctgcgcctcctactcgctgcaggagcccgccgaggtgatggagttcctgctgcggcttgtcgagtgggagcgcctctccaaggcccgccccaagtggtgatccaatccacgacgacagatgacgatcgagctgggattaattatacactatatatgctcaatatataagttagttatactaagggtgatggattaattagagggatcgggggagccgggagcgagggagtaattaagaccgtacgcacccactccctacttgagctgagctgagctgagctgagacgagagctcgctgcgctgtgcacggcacagtcatgtgcgtccagtccacggcgcctccctatgtttttacgggagccatgtggcggctgctgcgcggcaagggtgaagaatgtacgtgcggctagctgtaacactccagtaattacttcctactctactccagccatgaaccttggctctggatcctgaattctgattgtgtacaagtacaagagagcaactgctgtcgatgcctattacattaagttccagtggaacgaaacgaatgtctacaaggactgtacgtaacagccaaccctgaaggagagaagcctacaccaagtcaccaataggatgctgttttggtttagctttttatgcgccgcaaattggactgcagcaggacatccgtcccatttctgtttctcatacaggtccagtatgatatgtccctgttggaccactctatactcgcgaccagcccagcttgtgttcaatgtatgttatgttatctacccagaaagttgcctgctttcttgtc

SEQ ID NO: 3963 - DNA, 2302 bp, Zea Mays
aaatgtgtttgtccagtattgtatcgatagaacaaacgacgaattcgtccttggattactaggcagatgggttatccaccgataacggatagacgacttcaccaattttttttataaacacacccttaaacatcccaagacatcactgtacatgccgtgaggtggtacaatcctgagtcctaggtcaattggtcaaatccccgctcgagcttgataaaacacgcaaggctgtctgcctgtctctgctcccatctagaaatccacttcgattcgccctggacgctcctgcctcctgctagtcgacgcgcaatccttggcaatctggcagacaggtgaggcgctgagcctgctactactaactaggagccgcggcgggaaatgagggatgcggaggcggcgtcgcgccggcggtggacgctggtgctggtgaacatggcgtcggtgctggagaaggcagacgaggtgttgctgcccgccgtgtacaaggaggtgggcacggcgctgggcgcttctccgaccgcgctgggctccctcaccctctgccgcgcgctcgtccaggccgcctgctacccgctcgccgcctacgcctccgcgcgccacgatcgggcccgtgtcgtcgccgtgggagccttcctctgggccgccgccaccttcctcgtcgccgtctccggcagcttcctccagcaacctgtggctcgcgcgctcgcatacgcatacgcatacgcactgcgcagatggcgatctcgcggggcctcaacggcatcggtctcgcgctggtcctcccggcgatcagctcgctcgtcgccgactacaccgatgaccacacccgtggcgcggccttcgggtggctgcagatgacctgcaacctcggctccatcctggggggctctttcggcgtgctgctcgcgccagtcaccttcctcggcgtcgcagggtggcggctcgccttccactccgtggccgtgatcagcgtcgcgctgggcgtgctcatgtggctcttcgccgcggacccgagcccggccgccaagtgcaagaccgcggcctccgcgggggaggaggccaaagagctgctccagcacgccaggcgcgtcctcggggtgaccacgttccagatcatcgtggcgcaggggatcgccggctccatcccgtggtccgcgctcaacttctccgccatgtggctggagctcgtcgggttcacgaattggcagaccagcgtcatcacggggctgtacctgttcgccaccgctctcggcgcgctctttgggggcctcgtcggagaccctgtcgccagacggttccccaacactggtaggatcgccctggcgcagataagctcagcgtccgcgctcccactcggcgccatcctgctgctggcgttgcccaatgacccgtccaccggtgtggcgcacgccgttacattcttcgtcatggggttcgccatctcctggaacgcatcgtcgaccaacaatcccatcttcgcggagattgtgccggagaaggcgaggacgacggtctacgcactggacaagtgtttcgaagcagtgttcgcgtcgtttgcgtctcccatcgtcggtgttcttgcagagcgcgtgttcggctataagccggtctcgtccgacacgagcgtggacacggacagggagaatgctgccgcattggcaaaggctgtctacacggagatcgccgtgcccatggccatctgttgcctgacctacaccttcctgtactacacgtacccccgagacagggagcgtgctcgaaaggaccttctgatggcatcggatgaccacctcggtggagaagccaatgacaatgagtcaagtgcggttcatacactggtagacgaagaatcttctgtcagctccttaaatcagaggctaatatcttgaggaggctagctgcaggtggagatggggaagtccaccatcgtttcctggactctgtctctctcattcatgtgtggctccacggtttcagattcgccgaaaccgtcattaccggttaccacgcatggaaatgcgaaatctacagaccatatttgcatctaaactcttaggcctactttggaaactcaacccccttcggaattgaaggatgttcagagaaaaataaactaatttctctctcaataagaaacgcaactctttagacatgataaaaaagagcgtttgagttttcaacctaacccttattaaatttgatttcacaaaactaggtaggaataaatttggtcgagtttttttttcatatgtttgcatacaaaaagtaactgtaatagaaaaacaattcagtttctcttgat

SEQ ID NO: 3964 - DNA, 1422 bp, Zea Mays
cttcaccaattttttttataaacacacccttaaacatcccaagacatcactgtacatgccgtgaggtggtacaatcctgagtcctaggtcaattggtcaaatccccgctcgagcttgataaaacacgcaaggctgtctgcctgtctctgctcccatctagaaatccacttcgattcgccctggacgctcctgcctcctgctagtcgacgcgcaatccttggcaatctggcagacaggtgaggcgctgagcctgctactactaactaggagccgcggcgggaaatgagggatgcggaggcggcgtcgcgccggcggtggacgctggtgctggtgaacatggcgtcggtgctggagaaggcagacgaggtgttgctgcccgccgtgtacaaggaggtgggcacggcgctgggcgcttctccgaccgcgctgggctccctcaccctctgccgcgcgctcgtccaggccgcctgctacccgctcgccgcctacgcctccgcgcgccacgatcgggcccgtgtcgtcgccgtgggagccttcctctgggccgccgccaccttcctcgtcgccgtctccggcagcttcctccagtcccatcttcgcggagattgtgccggagaaggcgaggacgacggtctacgcactggacaagtgtttcgaagcagtgttcgcgtcgtttgcgtctcccatcgtcggtgttcttgcagagcgcgtgttcggctataagccggtctcgtccgacacgagcgtggacacggacagggagaatgctgccgcattggcaaaggctgtctacacggagatcgccgtgcccatggccatctgttgcctgacctacaccttcctgtactacacgtacccccgagacagggagcgtgctcgaaaggaccttctgatggcatcggatgaccacctcggtggagaagccaatgacaatgagtcaagtgcggttcatacactggtagacgaagaatcttctgtcagctccttaaatcagaggctaatatcttgaggaggctagctgcaggtggagatggggaagtccaccatcgtttcctggactctgtctctctcattcatgtgtggctccacggtttcagattcgccgaaaccgtcattaccggttaccacgcatggaaatgcgaaatctacagaccatatttgcatctaaactcttaggcctactttggaaactcaacccccttcggaattgaaggatgttcagagaaaaataaactaatttctctctcaataagaaacgcaactctttagacatgataaaaaagagcgtttgagttttcaacctaacccttattaaatttgatttcacaaaactaggtaggaataaatttggtcgagtttttttttcatatgtttgcatacaaaaagtaactgtaatagaaaaacaattcagtttctcttgat

SEQ ID NO: 3965 - DNA, 2031 bp, Zea Mays
tggccctcgcctagcccagcggcccctcctctctctctcccttgtgtcccccccccccccccccccccccccccccccccgcagctcgccccatctctctgagctccgtgcgcgcgcccctggttcctactccctattcccctcgcctctccctggtgctttcctgcgtgcgtcctccattgtccaagtgtccgaccagagcttcctctgctcgaccttgctccttcccatggtgcccggcgacctcttcttccccatgacgctaaccgctgttgtccttctctggcgcgtgtcggctccctgctcggccccgtgccccatcttcctggcgcgccctctccttgctagccgtgtgctcttcaagctcggagctccctgctcgccctctcctgcatcgcccgcccaaatccatggagcattggatgaccggtcgtcacatccctggtcgcactctggttttcctctctttgccttgatgtccaagcgcctcgcctctcatgttcctgtcatgtccttcgtcgcctcggcacgctcgcatcccttgggcccgctttgcctccgcgcgacgccggctgcgagctgagttcgattttgccgggttgctcggattgagtccgattggtgtggagagttcgtcatgttggtgtgtggcgtggagatacagaaggaagggtcctggctggttatggagaaatttgttgaatattggatatttacttatggttcatggccatggacgctggtgagcttgccctctggtctgaccagcaccttttccccaatgctctcctcggtcgcaccctgtttcgccatccatactcgcccagtgccaccgcgctcggctcccctatgcatggcctcgccaggatctcagtggttgcccaccttggaagctcagtatgtcgagttccacaacacactccatcgtgctcagacaacgaagcttggttgtgtcgattgctagttgcttgatgaaatgcctaacaagaaattgaagaatcaatcgaccccgtgtttgaccctggcgtcttgccccgtgatggttctcgttgctgattcctcggtattgtcctgttcgtcgcatgggcgctctggctgcgggctgttccttcgcaacggacacagcctcgccttgcagccgcgaacatcatcgtctccagttcttttgctaatatgtgccatcaaccgtcgtcgttcttgtgatttcagatcgatctgatcttggtacgtttattaaccatgtgatgcggagaaccaaagttgagtcgaccacaagatatcgctgcgcataagcttctccacgagatgatgttgatggaccaacctgaagatggataatctaaacaaatgccaagacaaaggatggtcgccaagtgatcgacgtctaacaaacactaacgtagtgtttattcgaggcaagccccggtgcatttgccacctccttgctgttttaaaatctttatcaccttatatgatgcattaggcgataggagttgtgtgctaaacaattgatgcatttctttccttggaaaattgaatacccttccttgatacccttttatgaaaaggatttttatgatgcttagccttgctttagaaaaataaaatgttttgttttaaaaacaaaaggtgatgcttcacagtggatgggaatttttacaaagaaaagacttatgatggtggatccatcacgaccgagatgggttcaacatctgaaaagatgcacctctgccaggtaccaaactttggattttaaataataaagctgagatcaggcgggtgacttgcacgagaaggaagtcttggtgtagtgtctccgtctgagtcgattaaggaccgtgtcgatgtaggcttgatggttgaggaccttttaactagccacatgcctcgtcatgggtaagatttgcctcggccggaccaataccagaaaggccaacacgcaatgggagtggagagatggcgagagtagcgtgtaccctccatggcaagaggttggacggtggtgtatctgtgctctcggttggcgtgaac

SEQ ID NO: 3966 - DNA, 1065 bp, Zea Mays
ccagagcttcctctgctcgaccttgctccttcccatggtgcccggcgacctcttcttccccatgacgctaaccgctgttgtccttctctggcgcgtgtcggctccctgctcggccccgtgccccatcttcctggcgcgccctctccttgctagccgtgtgctcttcaagctcggagctccctgctcgccctctcctgcatcgcccgcccaaatccatggagcattggatgaccggtcgtcacatccctggtcgcactctggttttcctctctttgccttgatgtccaagcgcctcgcctctcatgttcctgtcatgtccttcgtcgcctcggcacgctcgcatcccttgggcccgctttgcctccgcgcgacgccggctgcgagctgagttcgattttgccgggttgctcggattgagtccgattggtgtggagagttcgtcatgttggtgtgtggcgtggagatacagaaggaagggtcctggctggttatggagaaatttgttgaatattggatatttacttatggttcatggccatggacgctggtgagcttgccctctggtctgaccagcaccttttccccaatgctctcctcggtcgcaccctgtttcgccatccatactcgcccagtgccaccgcgctcggctcccctatgcatggcctcgccaggatctcagtggttgcccaccttggaagctcagtatgtcgagttccacaacacactccatcgtgctcagacaacgaagcttggttgtgtcgattgctagttgcttgatgaaatgcctaacaagaaattgaagaatcaatcgaccccgtgtttgaccctggcgtcttgccccgtgatggttctcgttgctgattcctcggtattgtcctgttcgtcgcatgggcgctctggctgcgggctgttccttcgcaacggacacagcctcgccttgcagccgcgaacatcatcgtctccagttcttttgctaatatgtgccatcaaccgtcgtcgttcttgtgatttcagatcgatctgatcttggtactagatttgtgatgatgttgatggtgttaagcg

SEQ ID NO: 3967 - DNA, 1555 bp, Zea Mays
ctgagccagcgcttttttttttctcgagcggtgccacacggccacattgccacaagcccacaaccagacggggagagagcgaaaaacggggcgaccgagctagctcgccgtcgtttccggctcccctccctcctcccataccgttgccctacccccactaccgcgccccgcggccccgccgggtcctcctccctccgctcgctcggaaccagaggcctcgcgacgtctcgcgccatgcgggctcgcgatctgctagggtttcctccggcgggcgcggccatgtcgtcggcggcggcgctcctcctcctccccctcctcaccgttgctggccaggggccggtctgccagaggccgcccgtcgccgccgtcatcctgcagcaggcgtccacctgtcgagcggtggacgccccagggctccggggtcaccgcgccggcttcgtggagagtattgtcaaggtatggagttcgtgcattcccgacgattttccttctgaactctacagtgcgtgtgcgttatcatggatctcgggccatgaattccgttgctatgttctataaagatgttacaggcctgaatcctgtgtcattggacgctacatgcctggagagaatggaggattcagttactatagttgatcatggcaaaaaggctgaaaaggatgattctctgttatcgtgggcaaggtcaccagaccgattacttcatcaagatacatgtcttgcattggctagctcctttgtcctcttgaggttgcttcatttccttcttcctaagcttaatgcatgtatgaagcaagcctggaggatgcgactgtatgaattgaataggttgtttcctagcttgtcttgaggaaggcaatatggaactagaaaacttgaactgactctcgaataaggcagcatacttataagaagtgatgcagacaacaaaccggatcactaggaagccagtgtcaagttaatccacattggtgattcagtttgagtagtgaaaatataccgctaccaactctcaatatcctgaagttcaggaggtctcatcaatggatgcactgtattacatccatgtcgaactcattctgtgtcaactatgtttggtctttccttgggagatatcttgatgcaagcataagtgacattcatggaaatgctgacttaatagtaagtcatctgtaccactgtaccattagccatctcagtctgagttcagatttgtatcttggtgttactcataaacacaaaaggcatgtattataagaaagattgttcattcattttagtcataggcatgattgatgttggggacttgttctcaaatgctatgagttaagaacaaggcaacacaaaaaatgttaaacgttaaagtccttcgtccttcgaagcattattttctttggggatataataatttttggacgaaagttatgaaggacatatcttcataaacacaacatataataatgaagaagaaaacatatgaaatatagaggataacacaaacaattatatattattatcaactcatttctatattattattatggaaaaatagaaa

SEQ ID NO: 3968 - DNA, 1656 bp, Zea Mays
ctgagccagcgcttttttttttctcgagcggtgccacacggccacattgccacaagcccacaaccagacggggagagagcgaaaaacggggcgaccgagctagctcgccgtcgtttccggctcccctccctcctcccataccgttgccctacccccactaccgcgccccgcggccccgccgggtcctcctccctccgctcgctcggaaccagaggcctcgcgacgtctcgcgccatgcgggctcgcgatctgctagggtttcctccggcgggcgcggccatgtcgtcggcggcggcgctcctcctcctccccctcctcaccgttgctggccaggggccggtctgccagaggccgcccgtcgccgccgtcatcctgcagcaggcagtagcacttgtgctgcagaacagggaggattttgtcgctattcttttttatgcttcgtggtgccctttttctaaaattttcaggacagattttcaaaaactgtcatcctttttcccaacaattgctcatttttcttttgaagaatctaatatcaaaccaagagtattgtcaaggtatggagttcgtgcattcccgacgattttccttctgaactctacagtgcgtgtgcgttatcatggatctcgggccatgaattccgttgctatgttctataaagatgttacaggcctgaatcctgtgtcattggacgctacatgcctggagagaatggaggattcagttactatagttgatcatggcaaaaaggctgaaaaggatgattctctgttatcgtgggcaaggtcaccagaccgattacttcatcaagatacatgtcttgcattggctagctcctttgtcctcttgaggttgcttcatttccttcttcctaagcttaatgcatgtatgaagcaagcctggaggatgcgactgtatgaattgaataggttgtttcctagcttgtcttgaggaaggcaatatggaactagaaaacttgaactgactctcgaataaggcagcatacttataagaagtgatgcagacaacaaaccggatcactaggaagccagtgtcaagttaatccacattggtgattcagtttgagtagtgaaaatataccgctaccaactctcaatatcctgaagttcaggaggtctcatcaatggatgcactgtattacatccatgtcgaactcattctgtgtcaactatgtttggtctttccttgggagatatcttgatgcaagcataagtgacattcatggaaatgctgacttaatagtaagtcatctgtaccactgtaccattagccatctcagtctgagttcagatttgtatcttggtgttactcataaacacaaaaggcatgtattataagaaagattgttcattcattttagtcataggcatgattgatgttggggacttgttctcaaatgctatgagttaagaacaaggcaacacaaaaaatgttaaacgttaaagtccttcgtccttcgaagcattattttctttggggatataataatttttggacgaaagttatgaaggacatatcttcataaacacaacatataataatgaagaagaaaacatatgaaatatagaggataacacaaacaattatatattattatcaactcatttctatattattattatggaaaaatagaaa

SEQ ID NO: 3969 - DNA, 1421 bp, Zea Mays
caacaatataaggcttccactttttacctattccttgggggatgatggggccctgcaaaaggcagtagcacttgtgctgcagaacagggaggattttgtcgctattcttttttatgcttcgtggtgccctttttctaaaattttcaggacagattttcaaaaactgtcatcctttttcccaacaattgctcatttttcttttgaagaatctaatatcaaaccaaggtgcgtctttctaaaacagataaacactgctgttagatttaactatatttagtatgcaactcaaacttcaatatctgaattgcagagtattgtcaaggtatggagttcgtgcattcccgacgattttccttctgaactctacagtgcgtgtgcgttatcatggatctcgggccatgaattccgttgctatgttctataaagatgttacaggcctgaatcctgtgtcattggacgctacatgcctggagagaatggaggattcagttactatagttgatcatggcaaaaaggctgaaaaggatgattctctgttatcgtgggcaaggtcaccagaccgattacttcatcaagatacatgtcttgcattggctagctcctttgtcctcttgaggttgcttcatttccttcttcctaagcttaatgcatgtatgaagcaagcctggaggatgcgactgtatgaattgaataggttgtttcctagcttgtcttgaggaaggcaatatggaactagaaaacttgaactgactctcgaataaggcagcatacttataagaagtgatgcagacaacaaaccggatcactaggaagccagtgtcaagttaatccacattggtgattcagtttgagtagtgaaaatataccgctaccaactctcaatatcctgaagttcaggaggtctcatcaatggatgcactgtattacatccatgtcgaactcattctgtgtcaactatgtttggtctttccttgggagatatcttgatgcaagcataagtgacattcatggaaatgctgacttaatagtaagtcatctgtaccactgtaccattagccatctcagtctgagttcagatttgtatcttggtgttactcataaacacaaaaggcatgtattataagaaagattgttcattcattttagtcataggcatgattgatgttggggacttgttctcaaatgctatgagttaagaacaaggcaacacaaaaaatgttaaacgttaaagtccttcgtccttcgaagcattattttctttggggatataataatttttggacgaaagttatgaaggacatatcttcataaacacaacatataataatgaagaagaaaacatatgaaatatagaggataacacaaacaattatatattattatcaactcatttctatattattattatggaaaaatagaaa

SEQ ID NO: 3970 - DNA, 2129 bp, Zea Mays
cataaagggggtttcgttttcagaagtgtcgggaaacttctttccccactcctgtagcgccgccgccgcgtgcccgtgaacctcccgccttcgttctcccctcccgcttgccccggtagtgattttcttccttggttcacggcggatcccatgccgatcgacgggatggtgtccgtggtcgcgaccgtgagtgggtaccacggcgacgagcggcacaggctcgtgaacctcatcgcggagaccggcgccagctacgtaggatccatgagccggtccatcacccacctggtgtgctggaggctcgaggggaaaaagtacgacatcgcgaggaggctggggacgctcgtcgtgagccattggtggtttacggagtgccttagggaggggaggcgcctcccagtggactcttacttgatgtggtgaagaagcagggccagtcccagagttgcctactcgttcccgtacacaaggcaaaaaaagtgccatcatggaggaccgagttttccaagagttacctgatgatttctgggacactcctctagccagaaccagctataaaaattctgttggtgatggagattctaagaaaaatcgttcatcagatgttaagaaaagaaagcgtatgaagcatgtcaatacatcaacggacagaaatgtcttaaactcgcaggacaatgtgtcaagtgtcatggaaagacattttcttcatttgtcaagtcatacaacgtccaagagcacatcaaagcagaaggaaaacttgtcacacttgcttcacaatgaagttcctatcaggatgggagaaaggaatgatcttactgaaaactttgaaaatgatagtttgtctgacagcttcagtgaacctcaaatttcagatactctgtgtgtagaagctcaaagaaaatttaccaaaacaagtgcaccatcatcatcacttcgacaaagtaccatggattctttatatgaatttggtgaaactagtaggcatgaaccagcaggaaaaaaagaacaagacaatgttgaattaaggaagacttcaagaagcttccttccatttgatatgtcaggacaggaaccacctttctgtactcaggagcaagtagataaatgtagctttggcactctagctgatgatgaaatgggatatgataacaaacccatggaaaagtcatctaatttagaaaggcaaacagaattatcatgcgtcatatgctggacagatttttcttctacaaggggcatcttaccatgtggacatcgattctgttattcatgcattcaaggatggtcggattgtctggcttctaggggtaaagtctcaacatgtcccctttgcaaagccagtttcacatggatcagtaaggtggacgaggcaggcaccttagatcagaaagtatactcgcagaccattccttgtgaagcttctaccgatgtttttgtgctgggcagtgaaggctacgatttctctggaccaacgtctgggcaaggagcatgctaccagtgccacttccgtgagcctgaggagcttcttctaagctgccacgtctgcagatcactgtgggtacactcgtactgccttgatcctccgctgactccttggacatgcatgcactgcagagatctgcgggtgctgtttcatcggtatcgttagccccacttactgtactagtcaaaccttaattgttgaaggaaattatcagaaggcttgaacaccgtagcggcttgtcttactgaaggactattaaggggtgtttgaatgcactagagataataattagtggctaaaattagttgaaacatctaaacaacctagctaatagttcagctattagctatttttggtaaattagttaatagttagataattatttgttagctagctaatttcactaataatttttagtcaactaactattagttctagtatattcaaacactccctaagtttgcaatgtaattttctagttccatttgatgctataccctagcattgtgttaacgacatatactagtggtactcgaggtggaagatatatgtagggtctccggatcctcatagcgtagatcttgtatatgtgccgttgggtcctcatatcgtagatcttaactcgagaactgaaaggaacctagat

SEQ ID NO: 3971 - DNA, 2134 bp, Zea Mays
cataaagggggtttcgttttcagaagtgtcgggaaacttctttccccactcctgtagcgccgccgccgcgtgcccgtgaacctcccgccttcgttctcccctcccgcttgccccggtagtgattttcttccttggttcacggcggatcccatgccgatcgacgggatggtgtccgtggtcgcgaccgtgagtgggtaccacggcgacgagcggcacaggctcgtgaacctcatcgcggagaccggcgccagctacgtaggatccatgagccggtccatcacccacctggtgtgctggaggctcgaggggaaaaagtacgacatcgcgaggaggctggggacgctcgtcgtgagccattggtggtttacggagtgccttagggaggggaggcgcctcccagtggactcttacttgatggtaagtggtgaagaagcagggccagtcccagagttgcctactcgttcccgtacacaaggcaaaaaaagtgccatcatggaggaccgagttttccaagagttacctgatgatttctgggacactcctctagccagaaccagctataaaaattctgttggtgatggagattctaagaaaaatcgttcatcagatgttaagaaaagaaagcgtatgaagcatgtcaatacatcaacggacagaaatgtcttaaactcgcaggacaatgtgtcaagtgtcatggaaagacattttcttcatttgtcaagtcatacaacgtccaagagcacatcaaagcagaaggaaaacttgtcacacttgcttcacaatgaagttcctatcaggatgggagaaaggaatgatcttactgaaaactttgaaaatgatagtttgtctgacagcttcagtgaacctcaaatttcagatactctgtgtgtagaagctcaaagaaaatttaccaaaacaagtgcaccatcatcatcacttcgacaaagtaccatggattctttatatgaatttggtgaaactagtaggcatgaaccagcaggaaaaaaagaacaagacaatgttgaattaaggaagacttcaagaagcttccttccatttgatatgtcaggacaggaaccacctttctgtactcaggagcaagtagataaatgtagctttggcactctagctgatgatgaaatgggatatgataacaaacccatggaaaagtcatctaatttagaaaggcaaacagaattatcatgcgtcatatgctggacagatttttcttctacaaggggcatcttaccatgtggacatcgattctgttattcatgcattcaaggatggtcggattgtctggcttctaggggtaaagtctcaacatgtcccctttgcaaagccagtttcacatggatcagtaaggtggacgaggcaggcaccttagatcagaaagtatactcgcagaccattccttgtgaagcttctaccgatgtttttgtgctgggcagtgaaggctacgatttctctggaccaacgtctgggcaaggagcatgctaccagtgccacttccgtgagcctgaggagcttcttctaagctgccacgtctgcagatcactgtgggtacactcgtactgccttgatcctccgctgactccttggacatgcatgcactgcagagatctgcgggtgctgtttcatcggtatcgttagccccacttactgtactagtcaaaccttaattgttgaaggaaattatcagaaggcttgaacaccgtagcggcttgtcttactgaaggactattaaggggtgtttgaatgcactagagataataattagtggctaaaattagttgaaacatctaaacaacctagctaatagttcagctattagctatttttggtaaattagttaatagttagataattatttgttagctagctaatttcactaataatttttagtcaactaactattagttctagtatattcaaacactccctaagtttgcaatgtaattttctagttccatttgatgctataccctagcattgtgttaacgacatatactagtggtactcgaggtggaagatatatgtagggtctccggatcctcatagcgtagatcttgtatatgtgccgttgggtcctcatatcgtagatcttaactcgagaactgaaaggaacctagat

SEQ ID NO: 3972 - DNA, 2180 bp, Zea Mays
cataaagggggtttcgttttcagaagtgtcgggaaacttctttccccactcctgtagcgccgccgccgcgtgcccgtgaacctcccgccttcgttctcccctcccgcttgccccggtagtgattttcttccttggttcacggcggatcccatgccgatcgacgggatggtgtccgtggtcgcgaccgtgagtgggtaccacggcgacgagcggcacaggctcgtgaacctcatcgcggagaccggcgccagctacgtaggatccatgagccggtccatcacccacctggtgtgctggaggctcgaggggaaaaagtacgacatcgcgaggaggctggggacgctcgtcgtgagccattggtggtttacggagtgccttagggaggggaggcgcctcccagtggactcttacttgatgtggtgaagaagcagggccagtcccagagttgcctactcgttcccgtacacaaggcaaaaaaagtgccatcatggaggaccgagttttccaagagttacctgatgatttctgggacactcctctagccagaaccagctataaagttaagtttgatgattctgattctgattttgagtctgccctactaaaagaaaattctgttggtgatggagattctaagaaaaatcgttcatcagatgttaagaaaagaaagcgtatgaagcatgtcaatacatcaacggacagaaatgtcttaaactcgcaggacaatgtgtcaagtgtcatggaaagacattttcttcatttgtcaagtcatacaacgtccaagagcacatcaaagcagaaggaaaacttgtcacacttgcttcacaatgaagttcctatcaggatgggagaaaggaatgatcttactgaaaactttgaaaatgatagtttgtctgacagcttcagtgaacctcaaatttcagatactctgtgtgtagaagctcaaagaaaatttaccaaaacaagtgcaccatcatcatcacttcgacaaagtaccatggattctttatatgaatttggtgaaactagtaggcatgaaccagcaggaaaaaaagaacaagacaatgttgaattaaggaagacttcaagaagcttccttccatttgatatgtcaggacaggaaccacctttctgtactcaggagcaagtagataaatgtagctttggcactctagctgatgatgaaatgggatatgataacaaacccatggaaaagtcatctaatttagaaaggcaaacagaattatcatgcgtcatatgctggacagatttttcttctacaaggggcatcttaccatgtggacatcgattctgttattcatgcattcaaggatggtcggattgtctggcttctaggggtaaagtctcaacatgtcccctttgcaaagccagtttcacatggatcagtaaggtggacgaggcaggcaccttagatcagaaagtatactcgcagaccattccttgtgaagcttctaccgatgtttttgtgctgggcagtgaaggctacgatttctctggaccaacgtctgggcaaggagcatgctaccagtgccacttccgtgagcctgaggagcttcttctaagctgccacgtctgcagatcactgtgggtacactcgtactgccttgatcctccgctgactccttggacatgcatgcactgcagagatctgcgggtgctgtttcatcggtatcgttagccccacttactgtactagtcaaaccttaattgttgaaggaaattatcagaaggcttgaacaccgtagcggcttgtcttactgaaggactattaaggggtgtttgaatgcactagagataataattagtggctaaaattagttgaaacatctaaacaacctagctaatagttcagctattagctatttttggtaaattagttaatagttagataattatttgttagctagctaatttcactaataatttttagtcaactaactattagttctagtatattcaaacactccctaagtttgcaatgtaattttctagttccatttgatgctataccctagcattgtgttaacgacatatactagtggtactcgaggtggaagatatatgtagggtctccggatcctcatagcgtagatcttgtatatgtgccgttgggtcctcatatcgtagatcttaactcgagaactgaaaggaacctagat

SEQ ID NO: 3973 - DNA, 1601 bp, Zea Mays
cccccttagctaagccctaggggcttttctgaattctgttggtgatggagattctaagaaaaatcgttcatcagatgttaagaaaagaaagcgtatgaagcatgtcaatacatcaacggacagaaatgtcttaaactcgcaggacaatgtgtcaagtgtcatggaaagacattttcttcatttgtcaagtcatacaacgtccaagagcacatcaaagcagaaggaaaacttgtcacacttgcttcacaatgaagttcctatcaggatgggagaaaggaatgatcttactgaaaactttgaaaatgatagtttgtctgacagcttcagtgaacctcaaatttcagatactctgtgtgtagaagctcaaagaaaatttaccaaaacaagtgcaccatcatcatcacttcgacaaagtaccatggattctttatatgaatttggtgaaactagtaggcatgaaccagcaggaaaaaaagaacaagacaatgttgaattaaggaagacttcaagaagcttccttccatttgatatgtcaggacaggaaccacctttctgtactcaggagcaagtagataaatgtagctttggcactctagctgatgatgaaatgggatatgataacaaacccatggaaaagtcatctaatttagaaaggcaaacagaattatcatgcgtcatatgctggacagatttttcttctacaaggggcatcttaccatgtggacatcgattctgttattcatgcattcaaggatggtcggattgtctggcttctaggggtaaagtctcaacatgtcccctttgcaaagccagtttcacatggatcagtaaggtggacgaggcaggcaccttagatcagaaagtatactcgcagaccattccttgtgaagcttctaccgatgtttttgtgctgggcagtgaaggctacgatttctctggaccaacgtctgggcaaggagcatgctaccagtgccacttccgtgagcctgaggagcttcttctaagctgccacgtctgcagatcactgtgggtacactcgtactgccttgatcctccgctgactccttggacatgcatgcactgcagagatctgcgggtgctgtttcatcggtatcgttagccccacttactgtactagtcaaaccttaattgttgaaggaaattatcagaaggcttgaacaccgtagcggcttgtcttactgaaggactattaaggggtgtttgaatgcactagagataataattagtggctaaaattagttgaaacatctaaacaacctagctaatagttcagctattagctatttttggtaaattagttaatagttagataattatttgttagctagctaatttcactaataatttttagtcaactaactattagttctagtatattcaaacactccctaagtttgcaatgtaattttctagttccatttgatgctataccctagcattgtgttaacgacatatactagtggtactcgaggtggaagatatatgtagggtctccggatcctcatagcgtagatcttgtatatgtgccgttgggtcctcatatcgtagatcttaactcgagaactgaaaggaacctagat

SEQ ID NO: 3974 - DNA, 1325 bp, Zea Mays
gtcgtcggcgtcctaggccccctcttcttcgttgtcacgcagttctctggctccgactctccctcttccccacacctaaagatccgaatctagggagcgggttccaccaccccaagattctcgtggcgacctcgcaacaacctttttcagctcttcccatctcttcggttgccgaatctctctcgccttctctccttgaggcttttataatcagcctgttcttggttcatctcgtttctgtggagtggagacaattttttcgggtgatagatttcgtctcagaaactcttaaactaccgttgctttctacttgctcctctgatttgcgccgagaaacaaccactatataattatcagcgatttctttcgttccactcgatccaaccttgttgatttcctttaaaggcagcgcctttgccaatctacttttgttgagacagatgtctagttagttcttgaagaagataaggcttcctcgcagattattctgttgctttactttgattttgtcagttttgccctcaatttccacccggataggacccgagcattcttttatttctttctttccccataatggccatgtcgctgagccgcttctcccagtggatatggccggggagcagaactagaaatcctagaggccgcgagccaccggcggggagcacggccttgacggaaggcctcttcccggactccccgtcggggttccgggatccagaccctggttctggcgcggcacagcggcgtaagggcaagagccgccgtcgcggtggccgcgtggaggcgaaggtcgatggcgagcacggcatggttatcgtgcagtccgacggtgacggctgcctgtctgactcggactccgacggctccgactggtccatcggctggctcgagccgctcgcgccggacctccagagtgacgttgactccgagggaagcttcgccgtcctcgtgcggtgctatcgccgcggccgcgctgaccggcctgaccgtcctgatggcaagttccctgctcctggtggtgtcgctcacggtcacggtggtgtttctggtactataaaagaataagtgaaattgatcttcatctgaagcaacacgtgaagcggagtcgaagctagaaagcttcagctccgtagactggcacaaagattggaaccgaaggaggcagcttcggtcccacgggcaccagcgcacgaagcaaaagtggagaagaatccagaaacgtgaccaacagaacatgggaaaaagacgatgctacccttccaagatttgtaatccaagataaataggatatgcagacatgtttgtaatttcaaacgaagttc

SEQ ID NO: 3975 - DNA, 1520 bp, Zea Mays
gcattcggctgcaaacaattttttccccagaacctcagccttccgacatcaccgccgacgccatggccggctctccccgccacctctccctctttcccctgcgcctcctgttacttcttccgctgctcgctgcgggtaaacccgtcctcgaggacggttacacggtcaccaccttcgccgacctcaacccgctcccggcctccgggccacacccctacgcagtcctcccgcggtcccgcgccggcgacctcctcctcctcgactccgccggctccgcgctctacactatctccctctcctcctcccccggcgagccgcgcaggctggcagggggcaaacgaggctccgggttcaacgacggcgggcccggcgacgccgcctttgaccgcccgcgcagcgtcgccgtcgatgccgccgacaacgtatacgtcgccgaccgcctccatggtgccgtccgcaaggtcgcgccctccggttacactactacaattgctggagggttctcatcagggcctggtcacagggatggaccagcacagaatgctactttctcgccagattttgcacttgtttatgtcccgaagatttgtgccttgttagtagctgacagaggaaatcgaatggttagacaaattaatctaaagccagaagattgtgcacatgaaaaacaatcaggcttgggaaatacattggtgtcgttcattgcagtattgtgtacattgctcggttcattgatcggattcttagctcgtcatttttaccctgtcaatgatacggaagcaattcctgaggacacagaggaaggcaactccgatcagcttctgcgacataaaaagcgcagttgctagcttcgtgccctacaccctcctgctgaaactagtaagacttggttccggttatctacacgtgatgttatctagtgttaggttacagcaagaagttcaccgaaagccttctcgtcgacctgagttacacaagaccatcaatgctcctaacattggtcttaacaacaaagctcccgttcctcctactgagcaactgggtgatctgataagctttgccggagatgctggtgttaaggaggatagtggtaatgccgatagtcaggagggtaaggtgtcatcctatcatggtgacttgatggggcttccctacaccccaccgtgcagcgttaagaaaattgatcacatgatagaggccaacctatcgagcttttcaagtcacgagaaacgttgtagattaactgttagtggttgtagtgtaagcaggagggtgcatggagacaaataagagggtgtttggtttgatcatgacatgtaatgttaccctgggcattgtgggttcgtgtgatgatgcctaagaattctgttctggcataacagctttgtagcaaacccaattactccataatgttctcttattgcatggttgatggagttcttatggatgattgatcctgtctaaagcttatattgcttaagggattgagtttttgttggcagagctcctctggtctgctc

SEQ ID NO: 3976 - DNA, 2848 bp, Zea Mays
ccacattaaacaccactgtacatgcccttagcaccctagtgaagatacacccagagagataaagtagagagggaggggttttgttttttgtttcacgtccaccgtttttcttcacagttcacaccacaatctctttccctctgggctgtctggctggcctgtgccgtcgcctttccggtgcaaaagattttgttggccttgggaagcgcggagcgtgttttcctccctccgttccggtggggggtggcaactggcaacgcaaaagcctgactccaatcccattgctgctggaaagcacaaagcagcgatggtaaaagaggatgaaggccatggcgacagagtggccgccgacgctcctttccgtgtggtgtagggctgcagattccttcgcgctcctcctgctcccagcgaggaaaagagagcacgaactaaactaggaaccatccctccccggcattcattcccttgcccttttttcaccgaattgtagcggttgttgctttcctgttcaggtgccttgttcttggcctccttcgcacgcaaagaaccgccggtcgtattgctctccgcactcacccaccgcgctgctgctgctcgactgctcgtggaagggttcttattggccgcctgttcctgctttgcggtttcttgctctgcttttgagtggagccgctgtggagtggacggtgtggtgtggtgtgggtcggcggtgaggtgaaaggcttggtttctttctttcttgcgagggaggataagggaaagggaaggcgaagaggaggatggccggaggaggggcggcgccgccgccgaagcaggaggagctgcagccgcacccggtgaaggaccagcttcccagcgtgtcctactgcatcacaagcccaccgccctggcctgaggctgtcatccttggattccagcactacattgtgatgctgggcacatccgtcatcataccaagtgctcttgttccccagatgggaggaggaaacgaggagaaggccagggtgattcagacgctgctgttcgttgccggcatcaacaccctatgccagtcattctttgggactcgcctcccagcggtgatgggtggatcctacaccatcgtcgcacccaccatttccatcatcatggccggccgttacagcaacgaagcagaccctcgtgagaaattcttgcggaccatgcgaggaacacaaggcgctctcatcatcgcgtcgacaattcagatcgtgcttggtttcagtggcctttggcgcaatgtcgttaaagttctcacctctgccacagattgctgagcccattgtctgctgtacctttggtttcgctagctggatttgggctatatgagctaggttttccaggggttgctaagtgtgtggaaattgggcttccggaaatcatcctaatgctcatattttctcagtacttacctcatgctgtccatgcggcaaagcctgtgttcgaccggttttctgtgattttcacaattgcgattgtatggctgtatgcgtacattctcacggttagcggtgcctacaagagtgcccgaacaaagacacaactccattgccgtgttgaccgctctgggcttgttggtggagctccttggattagtgtcccatatcctttccaatggggggccccaacatttgatgctggtgaatcatttgcaatgatggtggccgcatttgttgctcttgttgagtcatctggggccttcattgctgtgtcaagatatgcaagcgcgactatgatacctccttcagttcttggtcgtggcattggttggcagggcatcggtactttactgggtgcgttttttgggacagctaatggaactgcagtgtcagttgagaatgctggtctgcttgctttgacacatgttggcagccggagagtagtccagatatctgcaggcttcatgatcttcttctctgtccttgggaaattcggggcgatctttgcttcaatcccactgccgatattcgctgccctgtattgcattctctttgcatacattggtgcttgtggcctgagcttccttcagttctgcaacctgaacagcttcaggaccaagttcatcatggggttctccttgttcatgggcctgtcagtaccccaatacttcaacgagtacacgtccgtggctggctatggccccgtgcacaccggcgcccgatggttcaacgacatgatcaacgtgcccttctcgtcgaagccgttcgtggctgtgctggtggccttcttactggacaacacgatccaggtgcgtgacagcggcgtgaggagggacaggggctaccactggtgggacaagttccggagcttcaagacggacagccgcagcgaggagttctactcgctgcccttcaacctcaacaagtttttcccttccgtctgatcctgcagggtctgcacactcttcctcgcagccgcagtagccctgactggagtcaggcaagaaatgatcctatgcagatgatgctggagcatggactgatggcgttttgtacattcaggggtgaactgaactgtgcaggttgcaggggatagtgctctgggtagcatcagtattccctagtaaccgaaattgaaaaggccgcctgttaaacttctgcaaacactagcatgattacgtctcctagtgctactgttgtttagattggaaaacatggaactcaaccgtaagcatagatttaccttgaagcaacccttttcttttgcttagaaataatttgtgttggggattttttttcaccatgtaagaactgagagcacttagattagaggggagggtgaataggtgagcctccaaaaaatactttaaataatacaaacttggtctaat

SEQ ID NO: 3977 - DNA, 2720 bp, Zea Mays
cgtttttcttcacagttcacaccacaatctctttccctctgggctgtctggctggcctgtgccgtcgcctttccggtgcaaaagattttgttggccttgggaagcgcggagcgtgttttcctccctccgttccggtggggggtggcaactggcaacgcaaaagcctgactccaatcccattgctgctggaaagcacaaagcagcgatggtaaaagaggatgaaggccatggcgacagagtggccgccgacgctcctttccgtgtggtgtagggctgcagattccttcgcgctcctcctgctcccagcgaggaaaagagagcacgaactaaactaggaaccatccctccccggcattcattcccttgcccttttttcaccgaattgtagcggttgttgctttcctgttcaggtgccttgttcttggcctccttcgcacgcaaagaaccgccggtcgtattgctctccgcactcacccaccgcgctgctgctgctcgactgctcgtggaagggttcttattggccgcctgttcctgctttgcggtttcttgctctgcttttgagtggagccgctgtggagtggacggtgtggtgtggtgtgggtcggcggtgaggtgaaaggcttggtttctttctttcttgcgagggaggataagggaaagggaaggcgaagaggaggatggccggaggaggggcggcgccgccgccgaagcaggaggagctgcagccgcacccggtgaaggaccagcttcccagcgtgtcctactgcatcacaagcccaccgccctggcctgaggctgtcatccttggattccagcactacattgtgatgctgggcacatccgtcatcataccaagtgctcttgttccccagatgggaggaggaaacgaggagaaggccagggtgattcagacgctgctgttcgttgccggcatcaacaccctatgccagtcattctttgggactcgcctcccagcggtgatgggtggatcctacaccatcgtcgcacccaccatttccatcatcatggccggccgttacagcaacgaagcagaccctcgtgagaaattcttgcggaccatgcgaggaacacaaggcgctctcatcatcgcgtcgacaattcagatcgtgcttggtttcagtggcctttggcgcaatgtcgttaaattgctgagcccattgtctgctgtacctttggtttcgctagctggatttgggctatatgagctaggttttccaggggttgctaagtgtgtggaaattgggcttccggaaatcatcctaatgctcatattttctcagtacttacctcatgctgtccatgcggcaaagcctgtgttcgaccggttttctgtgattttcacaattgcgattgtatggctgtatgcgtacattctcacggttagcggtgcctacaagagtgcccgaacaaagacacaactccattgccgtgttgaccgctctgggcttgttggtggagctccttgtgtcccatatcctttccaatggggggccccaacatttgatgctggtgaatcatttgcaatgatggtggccgcatttgttgctcttgttgagtcatctggggccttcattgctgtgtcaagatatgcaagcgcgactatgatacctccttcagttcttggtcgtggcattggttggcagggcatcggtactttactgggtgcgttttttgggacagctaatggaactgcagtgtcagttgagaatgctggtctgcttgctttgacacatgttggcagccggagagtagtccagatatctgcaggcttcatgatcttcttctctgtccttgggaaattcggggcgatctttgcttcaatcccactgccgatattcgctgccctgtattgcattctctttgcatacattggtgcttgtggcctgagcttccttcagttctgcaacctgaacagcttcaggaccaagttcatcatggggttctccttgttcatgggcctgtcagtaccccaatacttcaacgagtacacgtccgtggctggctatggccccgtgcacaccggcgcccgatggttcaacgacatgatcaacgtgcccttctcgtcgaagccgttcgtggctgtgctggtggccttcttactggacaacacgatccaggtgcgtgacagcggcgtgaggagggacaggggctaccactggtgggacaagttccggagcttcaagacggacagccgcagcgaggagttctactcgctgcccttcaacctcaacaagtttttcccttccgtctgatcctgcagggtctgcacactcttcctcgcagccgcagtagccctgactggagtcaggcaagaaatgatcctatgcagatgatgctggagcatggactgatggcgttttgtacattcaggggtgaactgaactgtgcaggttgcaggggatagtgctctgggtagcatcagtattccctagtaaccgaaattgaaaaggccgcctgttaaacttctgcaaacactagcatgattacgtctcctagtgctactgttgtttagattggaaaacatggaactcaaccgtaagcatagatttaccttgaagcaacccttttcttttgcttagaaataatttgtgttggggattttttttcaccatgtaagaactgagagcacttagattagaggggagggtgaataggtgagcctccaaaaaatactttaaataatacaaacttggtctaat

SEQ ID NO: 3978 - DNA, 2742 bp, Zea Mays
cgtttttcttcacagttcacaccacaatctctttccctctgggctgtctggctggcctgtgccgtcgcctttccggtgcaaaagattttgttggccttgggaagcgcggagcgtgttttcctccctccgttccggtggggggtggcaactggcaacgcaaaagcctgactccaatcccattgctgctggaaagcacaaagcagcgatggtaaaagaggatgaaggccatggcgacagagtggccgccgacgctcctttccgtgtggtgtagggctgcagattccttcgcgctcctcctgctcccagcgaggaaaagagagcacgaactaaactaggaaccatccctccccggcattcattcccttgcccttttttcaccgaattgtagcggttgttgctttcctgttcaggtgccttgttcttggcctccttcgcacgcaaagaaccgccggtcgtattgctctccgcactcacccaccgcgctgctgctgctcgactgctcgtggaagggttcttattggccgcctgttcctgctttgcggtttcttgctctgcttttgagtggagccgctgtggagtggacggtgtggtgtggtgtgggtcggcggtgaggtgaaaggcttggtttctttctttcttgcgagggaggataagggaaagggaaggcgaagaggaggatggccggaggaggggcggcgccgccgccgaagcaggaggagctgcagccgcacccggtgaaggaccagcttcccagcgtgtcctactgcatcacaagcccaccgccctggcctgaggctgtcatccttggattccagcactacattgtgatgctgggcacatccgtcatcataccaagtgctcttgttccccagatgggaggaggaaacgaggagaaggccagggtgattcagacgctgctgttcgttgccggcatcaacaccctatgccagtcattctttgggactcgcctcccagcggtgatgggtggatcctacaccatcgtcgcacccaccatttccatcatcatggccggccgttacagcaacgaagcagaccctcgtgaggtagtcgagttctccgaaattcttgcggaccatgcgaggaacacaaggcgctctcatcatcgcgtcgacaattcagatcgtgcttggtttcagtggcctttggcgcaatgtcgttaaattgctgagcccattgtctgctgtacctttggtttcgctagctggatttgggctatatgagctaggttttccaggggttgctaagtgtgtggaaattgggcttccggaaatcatcctaatgctcatattttctcagtacttacctcatgctgtccatgcggcaaagcctgtgttcgaccggttttctgtgattttcacaattgcgattgtatggctgtatgcgtacattctcacggttagcggtgcctacaagagtgcccgaacaaagacacaactccattgccgtgttgaccgctctgggcttgttggtggagctccttggattagtgtcccatatcctttccaatggggggccccaacatttgatgctggtgaatcatttgcaatgatggtggccgcatttgttgctcttgttgagtcatctggggccttcattgctgtgtcaagatatgcaagcgcgactatgatacctccttcagttcttggtcgtggcattggttggcagggcatcggtactttactgggtgcgttttttgggacagctaatggaactgcagtgtcagttgagaatgctggtctgcttgctttgacacatgttggcagccggagagtagtccagatatctgcaggcttcatgatcttcttctctgtccttgggaaattcggggcgatctttgcttcaatcccactgccgatattcgctgccctgtattgcattctctttgcatacattggtgcttgtggcctgagcttccttcagttctgcaacctgaacagcttcaggaccaagttcatcatggggttctccttgttcatgggcctgtcagtaccccaatacttcaacgagtacacgtccgtggctggctatggccccgtgcacaccggcgcccgatggttcaacgacatgatcaacgtgcccttctcgtcgaagccgttcgtggctgtgctggtggccttcttactggacaacacgatccaggtgcgtgacagcggcgtgaggagggacaggggctaccactggtgggacaagttccggagcttcaagacggacagccgcagcgaggagttctactcgctgcccttcaacctcaacaagtttttcccttccgtctgatcctgcagggtctgcacactcttcctcgcagccgcagtagccctgactggagtcaggcaagaaatgatcctatgcagatgatgctggagcatggactgatggcgttttgtacattcaggggtgaactgaactgtgcaggttgcaggggatagtgctctgggtagcatcagtattccctagtaaccgaaattgaaaaggccgcctgttaaacttctgcaaacactagcatgattacgtctcctagtgctactgttgtttagattggaaaacatggaactcaaccgtaagcatagatttaccttgaagcaacccttttcttttgcttagaaataatttgtgttggggattttttttcaccatgtaagaactgagagcacttagattagaggggagggtgaataggtgagcctccaaaaaatactttaaataatacaaacttggtctaat

SEQ ID NO: 3979 - DNA, 2515 bp, Zea Mays
aaccgaagacagacacaacggtttgctttcaaatcatacaatccgaggtctcaaagtcgaagagggttaatcccctcccgttccactgttgcccaagtccaaccaccagcgagatggcggggaccgtgaccgcgaccgcaaccacggccaccaccgaggtcgggaccacagtgaccgcagccacctccgagatggaggccaccgcgaccgcagccacctccgagctggaggccaccgcgaccgcagccgccatcgggccgccttcagccatccccgataaatatatgcataaaaaccggttgcagtcatttgctgaacgaacatataagaaaacgccaatctacaaggttgagtctgaaggccagtctcatcagcctaagttcacatgcacagtggaagtgggtgatcaacagttctcatcaactggtagttttagtcgtaagaaggaagcagagcaggacgctgcgagagttgcttatgagatcttgacaacagttagtgagagtgacgttaaggaggcatttgagctaattgatcagcctttgaccctgttcgctgcaattgtggtgtttgatggaaatgcatatcatggtgaatctgcacccaacaagaaagatgcagagcagaatgcagctcgtgttgtgatcaagtcgattttagctaagcatgacacttgtatggtgagaattgttagatcgaagaaacaacttataactgctgtcagatcttctggaaacaccccagctacttttactcctatacagtttacacggcctgtttcatatgcagcatatggcagaccagatgatacaacacctgttttgccaaatgaatcttcctcattagctgttcaacgaggcatcaatgttgtacctgcagttgggacatctgtgaacccatcgtcagcaaatgtaagtcgctcaaagaagcgcaagggcagagttgaaggagcaggaggcaacgacacatgggttgccaagggtcattaacttctcagccatcaacatctaggatcctgtggtcaaccttttggcattcgattcgtcttggtacctctgcctgtcatgttgtttgctcaaaccactgcatatcgttgtaggttgcttttttaaccttaactttaattcgtaaccactgcattttgtaactgcataacaattcggctggatcagtttccaccaaagatataacgaacgaatggtaacagcctttatctacggaaagattgaacagtgatgccgacgaacggcccttgcgcactcgtggcactgaggcagctgccggctgcactcaaatctttttagtaaagtttgtggatttggcagccagagtctacggattaccatcagtactcactgagttctcgttttagtttgttatgggctgaaatatgaaatatttttaacgtgcctacaactctagttgtccatgtaaatcgaagatccttccacccaccctataaacccttctctgctccatcacgtatgaccgtagtttatccatatactcaactaaattctaaaacaccattttgcattgtagtttgtactgttcgcaaagtaaatatgagtataagaacgagtaacctgctagagatagtataaggtcattttttaaacacaatttctcatctatccattatatataattttagcatattgatttttcagactacgctgtagttgaaataaaaaattctcggtgaagatttgctctgtgattgagtttgatcaatctcatgtaaatgcgtattgttacttctgaaaagaggttgatcacatattgggaattggttaacttctgattaaccaggaattgttacttcagtcatattctcagctgtaatttcattgtcagcctcatccacaattttattactgcgacttgaatgaagccactctaacagggatgaaattatcctcaacactgactaactccatgtcaaaagaagaaaagcataattctgggtacatgtacacaaaaattgctcagctactgattaaaaatgtagcttaagaaactaggctgtaatcatttcctctcactcagaagagcctctgtatgtgtcgatcatgctgggtccaggactaacgagtgcaagaataacaaggctgctcaacaacaccagcagcattcccagggagttcataaacatggcttctgtggagaagcgctcaatcattttggcgctctgcataaagattgacttctccaggagtccagtcacacttgtggcgatagcaagaacatagatgaatataccaaagaagacatgccagggaagcaaaaatgcacggccacttcttgatccaccggggtaccaaaaggtccaaaacccagcagcccactgcagagattcgaacacaaggacaaaagaggagaaaatgtgaaaaacacatgagaagaactgaacagaagaattcatatctcatggggtgtttggtttgaggaatgaactagtctattatcttctcactcctcactatttttgtttggtttgtggaatagaatgagt

SEQ ID NO: 3980 - DNA, 5028 bp, Zea Mays
aaaaaacagcgtgtggatcgggcgcaagtttgtgaagagcagtgttggaggtgttagggtaacaggcacaaccaagacgtggaggtacgtataggaagggacggtgcaaagagggcgaagagtgggtgactaaccgccttggaggaggcggttcaggaggtaagtggcattatgtagacccacaacccaataacaagcagaaaaggaggcataaacaggagggtgcggatgagattggtgatgtgcgaatcatgcgcttagccttgccattctgaggggagtgtaaggacacgacattcgttctcggtgagtccccatggagacatcttcgtgcaattgttgtcggccatggggaacgaaggcttcaccagtggcatgcacttgtcggagtttctggttacacttggtcctgtattcaaacatggttagttttagcttaggggcttattcgcgaagggtcaaacaaggtctagtttggcctcggtcccaacacttacgatggaggggaaatgtccacaggtagtaagaagtcatccaagatgaccagatagtaccggtaaccaaaaatgctcggtattggggatgtccaaaggtcacagtggacgagatgaaaagggtgagcgattcgagacatggaagaggggaaggataaggagtgtggtgcccaagctaacaagcatggcaaggcaagacagcgttgccatgaggcaggggatggtcgaggtgcctgagagtctagagaggatgtgtggccgaggtggccaagacgacggtgttaagtagaggcagaggcaacgtcggcgagggcataaggtgtgacaacacgagatgagggaagtagggcagggaagcaaataggatatagtggggtcaaagctgtcgcatcgggtgaccacaacatgattggtacctagggatcgaactccatggaacaatggttgtcagtggagaagggacgaaccgagagaagattttatatgatattgggggcaacaaggatgttgtcgaggtataaaggatcaggaagaatagtgtcgcctactgaggtgacaggcagagtcaacccattaccgacaatgatgggagaagggaaggtggggctacggggatggggtaaaaaacaaaaccagggtcaagagtggtgtggtacgaggcatcggagtcagcaacccatgccccagcggcgagcagactgacggcatgcatgggcgatggagaaggcaaggctccggccgtcatggagacaatctcggcaccgcagaacagaaatggccctagagcatggtgccccgccagagggtggaaagaggttagagagtggcagagctcgacgtagtcacagagaagggagaaccggtttcatgtctcgatcaaaggccatgaacatgcactcgatgaagagatacatgcacactatagggaggcacatggaccgcggcatagcgaaggacgggcatggagggagcggtcgcaaggagaggggaggagtgtacgcctgtaccgggctcacgtggaacgagggcaggcggggatcgagcaaccaggacagcgctgtagggcacccaggcgctgtggtaggtgtgccagtagtaggtggcagaggggcaggtgtggccgcacgtggcattgcggtggtctccgaaagtcctgcaggtatagaaaaatgtgctagtcgaattggagcaggcacgattcagattcgagaactcgaaagcggaggcgtcatgacggttccgctgccgccctctgaccttccccctcccgacgcctcgtttactccctccactggcctctcgccggcccttattccaagaccggcgaccacccctcttcctttcccagcgtcggaggtttatccccttggtgttcagcgtggtggaagatcgaaggagcagcgctggcgggaggacggcggagtatgtgcctcctctgccgcgtcactggtccaggatgacgtgtttaggaaatcctataaggaggccctgtcttcatccaagtatgctgcttccagggatgatgatggatgggtgagggtggttcgtcgtcgttcgagcaccttgaagcccctccccagaccagtcccggtggatttgcgcgggagatgcttcaactgtttctcgtctgagcatcgtgcggcggagtgccgaaatcgtgtgcggtgctttttctgtcggttgccggggcaccgtgtcggcgtgtgcccgcaccggcggacgaccccgcccatccccggacgcattttagtgtggcggcctgtggctaagaagtcttcgggagagattggttacggcctgggtatggctggtggtcaggtggccgggtctgggtctgctgctggtgaaggcgcgaagaagagaactcgtcgtggtcagaggaaaaggaagtcgggcgctggggccggttggctccttcgcctgccttcgacctggctaggccggagtgctttgtcgggcgatgtggaagaattgatcgggctgaggaggagctctgtcgtgcactgattgtcagtgttgtcagacaggaagattctggctacgccgcggaggtgcgtgatgcgattgcctcgaggttttgccttgaagtagggtcgctccgcttacgtcgtgctacgccaaattctttactcgtcttcttcccctcagttgtcgtggctgatcaggtggttaaaggggggcaatctcttcatgcccctccactcaggttacatattcgaaggtggtctcgtcaggctttcgctattggaagtggtcggtcgctggtgcccattggcgttgagctacgaggaattcctgcgcatctctgggggattgagtctgcggaggctgtgcttggtgctttctgtttgattcatggactgttacccgactcagtcacggaggaagacatgtatgttctcagactgaaagtctagtgccggtcacctgagctgctgccggtggtagtggatctccatgctgaagagccggttgtcttaggagaggatgggagttggactcctcgcacgttggtgttccttgtttcggtggtggttcttcgttcggatggaaattcagcttctggtgaggattttccttcgccacccccttcgggctttgcccccaactggaaggctcgtttgctcaatctggccggtaggacaacgttagtgaggcatgtgctttcggcaattcctgtttatatccttatggccatgagtgttcccagatgggtgatcaaatccattgataaaatccggagggggtttctatggaaaagaaggaagaatgttaacggtggaagctatcttgttccttgggagatagttataaggcctctaaaatatggcagccttggagtttctaatttacaatacaaaagttgggcattacaggtgaaatggttatggctgcaaaaaactgactcgtccagaccatggcatggaatgaatcttcctatttcaatctttcggtcttaactatggtcggaaatgggaccaacactcttttttggttagataaatggttgaatgggaaggctatctttgatattgcaccagatgttgtctgtttggtggacaatagagttagctctaccaggacagttgctcaggctatggataactggcgatgggttagggatattgggagtcatctttctctggttgggctgcatcaatcaggatcagaccttcccaatgtgtctgatacagattgatccctacatcaatcaaggcatctcctaccataatagccctggattctatctatactaagcacacaccattacaggaaaagaaacatgcactgctaacaatgagaacgccatgggaggatgagagggagggtagggtgagccatcaagggcgacgaacagcgggtgttcactgctattgggaatgagaggtgcagggaggagagggagccgccatagatttggtgagagaggaaaagagagaacaggggcagcggtcatgtcgtgttgcgtgtggcccgcctggtggtgatgctggtgaagcgcgagagccggatgatggctcccatctgcgccgccttttgcaacagtgtcatggccgacaggtgcgtagaggccgcaaacagttatggctgcagctcgaacatggccgagctctgagttgtggcggcgttgcatagcggccccatcagcgggttgtcgtaggtcatcgccggccacggtggtatctctgtcttcatggcgtagttgcagggatgttgcggtggcagttgcatgacctcctgctggtggtggtgagggcgacgtcctgctgctgcatgatgtgtgcgaaaggcgtcgagaagaggattggggtggtggtagtgcaccggcgcggccatggcgttgacgctgatggccttggcgctctccccagtgagtgtgtgtcgtagaaggcatggtgcgtgagggtggcttcgggttggaccgcgtgccaccacgagtggggcgccctaaccgatgtcacggccaacaacaccgaaaggcaggagggcgtgcgggatacgacgaaggcgagggtcggcatgctcgtggagaggatagggcgaggggcacatgccgacactctagggtgaggcgagggtggccaggcctaggctgcacgtggcgagagtgtgcgtgtggccgggtgcaggtgtgccggtgccggggaggctaggcgcatgggcgacggcgctgccagaggtctcgatcgggggaaagaagcggtcggcagcctccatggctgacggcaaggatcaggaggctaggggagaggagaggtagccgacggctggctagggaggagggagggagagagatggcttgataccatgttagattggaaaccctaaccctaaatgggtaggtgatatattaatatatatatccaagtacataggccaaggcgcattatggtgacacaaacacaaaatactaacaatccatagaataaaacatatcattagggcaacacaatgataaaagtgataaaagctctgtcctagaaaccttgttgatgccctaaaggagaagtaaataagactggagggactagtt

SEQ ID NO: 3981 - DNA, 4493 bp, Zea Mays
attaagtctctttcagtcaaaaaaaaggaaggatttttaatcccttaattccctctaatcactgtacaaatctctctaatccccttgctgcaaacaacaagaccgtaggtatttctgctggctcgctgatggaaacagtggaaacgcaggtcaactagtcttacaccacaggagagcaaccgtttagagacttcgggtaagacacgagcccaataccacggccctgccagcgatggccacattggcgccaccggcggtggaggtggagccggaggccgatgccatggccctggcgtcggaagccgcggcgcctgagctcccatcgtcgcattcgcagctcgattttttcaagaccagagttcaattattgtgtgaaagtaacacgagagattttgatgcttgggtatcattaataaatgctgcagagggaacatcagcagatgacatagaagttatgagcttggtataccataacttcttgttggaatttcctttgtgctacggttactggatcaaatatgcagctcataaggcacgactatgcacaaccagatatgtaatggatgtttatgaacaagctgtccatgctgtacctcattctgttgatatttgggtcaactactgtgagtttggtatatgtgcatttgaagaacctgctcatgtcagaagtttatttgagagggctttatctcttgttggaaaggactatttgtgttatcacctgtgggacaagtatatagaatttgaaagctctcagaagcagctgattcatcttgccaccatttttatcaacacactaaaatttcccacaaagaagttgcacatgtattatgaaagttttagaaagtttgtaacattattggaacaagaggtgacaagttgtgttgctgaaatattatcagaaaaagtgcatgcttctgaaatgtcctgaagcattgaagcattacttatctgctggggagaagctctacaaaatgtccagcaagatttacaaagaaatctgttatttcgaggcatccataaaaaggcctttttttaatgtcaagacacttgatgatgatcagcttgaaaactggcaccagtatcttgactttgttgagaagaatggggattttgactgggctgtaaaactttatgagaggtgtttgatcccttgcgctaattattcggaattttggatccgctattcagagtatgttgacgctaaaggtggccgagaaattgcaaaccatgctctgggtcgagcatcatcatgttttgcgaaggaggttccagctttctgcatgtattatgcgttgtttaaagagcaaattggtgatgcactggttgcacgctctgtttttactaaaacaagaagttacttcacttcagggttttatgcaaatattaataggctggccaacatggaaaaacgaatgggaaatactaaagcagcttctgagatatacgagacagcaattgaggatgcaatgcagaagaacaacatagagttgcttcctgacctgtacagcaattttgctcagttcatatatgtggcaagtcatagcattattcaggctaaacaagtctttgtcgacggaataaatcgtgcaccttgtaaaccattgattaagggattcatacagttcatgagtacacatggagggcctaaagacatacctcttcttgattctgttatttctaatgccgtgactccaggatctgacgtatccacagctttaagcagagaggaccgcgaagatatctcactgttgtttttggagtttgttgatctctatgggggtattaaagaactcagaaaggcatgggctcggcatagtatactgtttcctcacagcactgggaacatttcacgacattattctactatggggaatagccttcaagagactaagaagaggagaaacacagaacctttgatgattgctcgtgatcattctttagaagatacaatgaaactgaaacagacactcaaaaccgatgatttttctcttatagttgataaagagagtgagccacaagtagacaaggacattgtggattcaggaaaaagacatggggatgcgggagcgcagaaagctttagatttggtcaattcacacaaagagaccatcacgacagctcaggaatgcactgacatggtttacagtgaacatatcctggacaaaaacagaatagagaagcaaatgaattcacatgccaaagaagatattaatcaagacctaatcttgcatgaacaaaatgatgagaaaacaaattctcatgaggcggagactcctgtagctgagtcaggtgactgtgattctccttccaaagcaattgctagctctgagaacatcaattttcagggcaaggtcattgaggtatctgcaagcagccatctagaaacagtatgctcaaaatatgactcgccgtctggaccaaacatgcacaaagaaggaagttcttctggtccagctcgaatatctccagagctggaggaaaggcaccatgtggaggttcaggtaaaagtcgacacagagcatcatttttctgtcagtaatgcaaacctagagatatcttttgatggtccaaatccaactgaatgtgacaaggaaatctctgccattggtcatgggagtcaagactatattcaatcttcgcagtcacatcaactctcagcctgtgcaaaaccttggagcttggactcagcgaaaacaaaatcggatactgtcagtattcaagctcaacttcgaaaccagttggagaatgctcaaacatatcaatctaataacctttcacaaaacatgcaacaacaagagcttacaatgcctcacaatgttcaaacatctgcacaaattcaagatcaattgcttgcacagcctaatcacagaaaccaacagtatctccaaatgatgcaagggtatgcaacacaaatgggggaatattaccaacaacaactgtattacctgcaggctcagcacaatcaacagatgcagagtctgcaacagcaacagctcccgactgagcatcttcagcaaacttttatgcagcaagtacagcagctgaaccagcaattggtactttggcagcaacaagtgcaacagcagccacaagtagtactgcaacaggcactgccagttcagcaacttcctgacgaaaaacagggtcagtgtccttccggggatagcaaacacggccaaaataaacagcagcaacaagcacctcaaatggatcaacaaagccagcagttgcagcaacaacagcttctttatcttcagcagcaacaacaaatgtatcttatacagcagcagcagatgtatcaacaacagcaagctcagcagcaacagctcttacagcagcagttaatgcaacaacaacagtatgtactgcagatgccacagcaccagcaagactcagttcggcagcaacaacagcaactgtttgagcaacagcagcagcagatgatgcttcttcagcgacagcaacaacatattatgcaacaacagatccaaccgtacgtgcaacagcaacaaaaccaacaagggcccaaggatcagacttacaagtcaaatcatcaggatggaaggaacaggcaaatggagcatggacaactgtctgaagcttcacagagcgatggttccaaactgcgcagcggtgagcaatctgagttatcctacccgtcaactcctcagtcagaacgctcaaatcactaaggccttgttcggttattcccaatacacatgaattggatgagattggaaaaaattaagaagtttgacttgtttgggattcaaacccatccaatcctactcaatccacatagattgagagctaaccgaacaagcactaaatcactcaggatcatgtatcaaggaacatacttaagaaacatggaagcatgcatccatttccttgccctgctgccagtggaggctgattccatactgtgtcagagtgatgatgatgtgctgaccttcccgaatggtgatgaagctccatctccacggtgctctcttctttctaaattataaggcatttcaactttttttgagagtcaaaacatctcaattataatgccagctatggtttgatagcttggtattagattctcagtaatgctcgcatgtaaggggcgatgtgatgtgttggagacttcagtcaagcagttacatatcaagaacatatttggatgaagcgtgtgatatcttgtcatgactcatatgtatatgtatacgatatcctttatggtatagctctcggcatctgcactggcacgatagggctgattagacagcaactagcataagcctggaaatttacagttctgtcgtcagcctggtggtacacatttttgcctggatcaaactgccgttgtgctcattcattcacaggaattcacctcggcatattagcgatgtgtcaacgtcatgggtggatgcgcgtgcgatgaagccggaagagcaagcttgtaaaccattatggtccaatgaatccaaactgatgattagttg

SEQ ID NO: 3982 - DNA, 3276 bp, Zea Mays
caaccgtttagagacttcgggtaagacacgagcccaataccacggccctgccagcgatggccacattggcgccaccggcggtggaggtggagccggaggccgatgccatggccctggcgtcggaagccgcggcgcctgagctcccatcgtcgcattcgcagctcgattttttcaagaccagagttcaattattgtgtgaaagtaacacgagagattttgatgcttgggtatcattaataaatgctgcagagggaacatcagcagatgacatagaagttatgagcttggtataccataacttcttgttggaatttcctttgtgctacggttactggatcaaatatgcagctcataaggcacgactatgcacaaccagatatgtaatggatgtttatgaacaagctgtccatgctgtacctcattctgttgatatttgggtcaactactgtgagtttggtatatgtgcatttgaagaacctgctcatgtcagaagtttatttgagagggctttatctcttgttggaaaggactatttgtgttatcacctgtgggacaagtatatagaatttgaaagctctcagaagcagctgattcatcttgccaccatttttatcaacacactaaaatttcccacaaagaagttgcacatgtattatgaaagttttagaaagtttgtaacattattggaacaagaggtgacaagttgtgttgctgaaatattatcagaaaaagtgcatgcttctgaaatggtaggcactgaaggttctgaattagatatatcaactattattgctgacttatttgaccaaaaaggctgtaaaactttatgagaggtgtttgatcccttgcgctaattattcggaattttggatccgctattcagagtatgttgacgctaaaggtggccgagaaattgcaaaccatgctctgggtcgagcatcatcatgttttgcgaaggaggttccagctttctgcatgtattatgcgttgtttaaagagcaaattggtgatgcactggttgcacgctctgtttttactaaaacaagaagttacttcacttcagggttttatgcaaatattaataggctggccaacatggaaaaacgaatgggaaatactaaagcagcttctgagatatacgagacagcaattgaggatgcaatgcagaagaacaacatagagttgcttcctgacctgtacagcaattttgctcagttcatatatgtggcaagtcatagcattattcaggctaaacaagtctttgtcgacggaataaatcgtgcaccttgtaaaccattgattaagggattcatacagttcatgagtacacatggagggcctaaagacatacctcttcttgattctgttatttctaatgccgtgactccaggatctgacgtatccacagctttaagcagagaggaccgcgaagatatctcactgttgtttttggagtttgttgatctctatgggggtattaaagaactcagaaaggcatgggctcggcatagtatactgtttcctcacagcactgggaacatttcacgacattattctactatggggaatagccttcaagagactaagaagaggagaaacacagaacctttgatgattgctcgtgatcattctttagaagatacaatgaaactgaaacagacactcaaaaccgatgatttttctcttatagttgataaagagagtgagccacaagtagacaaggacattgtggattcaggaaaaagacatggggatgcgggagcgcagaaagctttagatttggtcaattcacacaaagagaccatcacgacagctcaggaatgcactgacatggtttacagtgaacatatcctggacaaaaacagaatagagaagcaaatgaattcacatgccaaagaagatattaatcaagacctaatcttgcatgaacaaaatgatgagaaaacaaattctcatgaggcggagactcctgtagctgagtcaggtgactgtgattctccttccaaagcaattgctagctctgagaacatcaattttcagggcaaggtcattgaggtatctgcaagcagccatctagaaacagtatgctcaaaatatgactcgccgtctggaccaaacatgcacaaagaaggaagttcttctggtccagctcgaatatctccagagctggaggaaaggcaccatgtggaggttcaggtaaaagtcgacacagagcatcatttttctgtcagtaatgcaaacctagagatatcttttgatggtccaaatccaactgaatgtgacaaggaaatctctgccattggtcatgggagtcaagactatattcaatcttcgcagtcacatcaactctcagcctgtgcaaaaccttggagcttggactcagcgaaaacaaaatcggatactgtcagtattcaagctcaacttcgaaaccagttggagaatgctcaaacatatcaatctaataacctttcacaaaacatgcaacaacaagagcttacaatgcctcacaatgttcaaacatctgcacaaattcaagatcaattgcttgcacagcctaatcacagaaaccaacagtatctccaaatgatgcaagggtatgcaacacaaatgggggaatattaccaacaacaactgtattacctgcaggctcagcacaatcaacagatgcagagtctgcaacagcaacagctcccgactgagcatcttcagcaaacttttatgcagcaagtacagcagctgaaccagcaattggtactttggcagcaacaagtgcaacagcagccacaagtagtactgcaacaggcactgccagttcagcaacttcctgacgaaaaacagggtcagtgtccttccggggatagcaaacacggccaaaataaacagcagcaacaagcacctcaaatggatcaacaaagccagcagttgcagcaacaacagcttctttatcttcagcagcaacaacaaatgtatcttatacagcagcagcagatgtatcaacaacagcaagctcagcagcaacagctcttacagcagcagttaatgcaacaacaacagtatgtactgcagatgccacagcaccagcaagactcagttcggcagcaacaacagcaactgtttgagcaacagcagcagcagatgatgcttcttcagcgacagcaacaacatattatgcaacaacagatccaaccgtacgtgcaacagcaacaaaaccaacaagggcccaaggatcagacttacaagtcaaatcatcagatacaactggtgcatcactttgca

SEQ ID NO: 3983 - DNA, 4124 bp, Zea Mays
caaccgtttagagacttcgggtaagacacgagcccaataccacggccctgccagcgatggccacattggcgccaccggcggtggaggtggagccggaggccgatgccatggccctggcgtcggaagccgcggcgcctgagctcccatcgtcgcattcgcagctcgattttttcaagaccagagttcaattattgtgtgaaagtaacacgagagattttgatgcttgggtatcattaataaatgctgcagagggaacatcagcagatgacatagaagttatgagcttggtataccataacttcttgttggaatttcctttgtgctacggttactggatcaaatatgcagctcataaggcacgactatgcacaaccagatatgtaatggatgtttatgaacaagctgtccatgctgtacctcattctgttgatatttgggtcaactactgtgagtttggtatatgtgcatttgaagaacctgctcatgtcagaagtttatttgagagggctttatctcttgttggaaaggactatttgtgttatcacctgtgggacaagtatatagaatttgaaagctctcagaagcagctgattcatcttgccaccatttttatcaacacactaaaatttcccacaaagaagttgcacatgtattatgaaagttttagaaagtttgtaacattattggaacaagaggtgacaagttgtgttgctgaaatattatcagaaaaagtgcatgcttctgaaatggtaggcactgaaggttctgaattagatatatcaactattattgctgacttatttgaccaaaaaggtgggcatcttagtcctgaagcattgaagcattacttatctgctggggagaagctctacaaaatgtccagcaagatttacaaagaaatctgttatttcgaggcatccataaaaaggcctttttttaatgtcaagacacttgatgatgatcagcttgaaaactggcaccagtatcttgactttgttgagaagaatggggattttgactgggctgtaaaactttatgagaggtgtttgatcccttgcgctaattattcggaattttggatccgctattcagagtatgttgacgctaaaggtggccgagaaattgcaaaccatgctctgggtcgagcatcatcatgttttgcgaaggcaagtcatagcattattcaggctaaacaagtctttgtcgacggaataaatcgtgcaccttgtaaaccattgattaagggattcatacagttcatgagtacacatggagggcctaaagacatacctcttcttgattctgttatttctaatgccgtgactccaggatctgacgtatccacagctttaagcagagaggaccgcgaagatatctcactgttgtttttggagtttgttgatctctatgggggtattaaagaactcagaaaggcatgggctcggcatagtatactgtttcctcacagcactgggaacatttcacgacattattctactatggggaatagccttcaagagactaagaagaggagaaacacagaacctttgatgattgctcgtgatcattctttagaagatacaatgaaactgaaacagacactcaaaaccgatgatttttctcttatagttgataaagagagtgagccacaagtagacaaggacattgtggattcaggaaaaagacatggggatgcgggagcgcagaaagctttagatttggtcaattcacacaaagagaccatcacgacagctcaggaatgcactgacatggtttacagtgaacatatcctggacaaaaacagaatagagaagcaaatgaattcacatgccaaagaagatattaatcaagacctaatcttgcatgaacaaaatgatgagaaaacaaattctcatgaggcggagactcctgtagctgagtcaggtgactgtgattctccttccaaagcaattgctagctctgagaacatcaattttcagggcaaggtcattgaggtatctgcaagcagccatctagaaacagtatgctcaaaatatgactcgccgtctggaccaaacatgcacaaagaaggaagttcttctggtccagctcgaatatctccagagctggaggaaaggcaccatgtggaggttcaggtaaaagtcgacacagagcatcatttttctgtcagtaatgcaaacctagagatatcttttgatggtccaaatccaactgaatgtgacaaggaaatctctgccattggtcatgggagtcaagactatattcaatcttcgcagtcacatcaactctcagcctgtgcaaaaccttggagcttggactcagcgaaaacaaaatcggatactgtcagtattcaagctcaacttcgaaaccagttggagaatgctcaaacatatcaatctaataacctttcacaaaacatgcaacaacaagagcttacaatgcctcacaatgttcaaacatctgcacaaattcaagatcaattgcttgcacagcctaatcacagaaaccaacagtatctccaaatgatgcaagggtatgcaacacaaatgggggaatattaccaacaacaactgtattacctgcaggctcagcacaatcaacagatgcagagtctgcaacagcaacagctcccgactgagcatcttcagcaaacttttatgcagcaagtacagcagctgaaccagcaattggtactttggcagcaacaagtgcaacagcagccacaagtagtactgcaacaggcactgccagttcagcaacttcctgacgaaaaacagggtcagtgtccttccggggatagcaaacacggccaaaataaacagcagcaacaagcacctcaaatggatcaacaaagccagcagttgcagcaacaacagcttctttatcttcagcagcaacaacaaatgtatcttatacagcagcagcagatgtatcaacaacagcaagctcagcagcaacagctcttacagcagcagttaatgcaacaacaacagtatgtactgcagatgccacagcaccagcaagactcagttcggcagcaacaacagcaactgtttgagcaacagcagcagcagatgatgcttcttcagcgacagcaacaacatattatgcaacaacagatccaaccgtacgtgcaacagcaacaaaaccaacaagggcccaaggatcagacttacaagtcaaatcatcaggatggaaggaacaggcaaatggagcatggacaactgtctgaagcttcacagagcgatggttccaaactgcgcagcggtgagcaatctgagttatcctacccgtcaactcctcagtcagaacgctcaaatcactaaggccttgttcggttattcccaatacacatgaattggatgagattggaaaaaattaagaagtttgacttgtttgggattcaaacccatccaatcctactcaatccacatagattgagagctaaccgaacaagcactaaatcactcaggatcatgtatcaaggaacatacttaagaaacatggaagcatgcatccatttccttgccctgctgccagtggaggctgattccatactgtgtcagagtgatgatgatgtgctgaccttcccgaatggtgatgaagctccatctccacggtgctctcttctttctaaattataaggcatttcaactttttttgagagtcaaaacatctcaattataatgccagctatggtttgatagcttggtattagattctcagtaatgctcgcatgtaaggggcgatgtgatgtgttggagacttcagtcaagcagttacatatcaagaacatatttggatgaagcgtgtgatatcttgtcatgactcatatgtatatgtatacgatatcctttatggtatagctctcggcatctgcactggcacgatagggctgattagacagcaactagcataagcctggaaatttacagttctgtcgtcagcctggtggtacacatttttgcctggatcaaactgccgttgtgctcattcattcacaggaattcacctcggcatattagcgatgtgtcaacgtcatgggtggatgcgcgtgcgatgaagccggaagagcaagcttgtaaaccattatggtccaatgaatccaaactgatgattagttg

SEQ ID NO: 3984 - DNA, 4442 bp, Zea Mays
caaccgtttagagacttcgggtaagacacgagcccaataccacggccctgccagcgatggccacattggcgccaccggcggtggaggtggagccggaggccgatgccatggccctggcgtcggaagccgcggcgcctgagctcccatcgtcgcattcgcagctcgattttttcaagaccagagttcaattattgtgtgaaagtaacacgagagattttgatgcttgggtatcattaataaatgctgcagagggaacatcagcagatgacatagaagttatgagcttggtataccataacttcttgttggaatttcctttgtgctacggttactggatcaaatatgcagctcataaggcacgactatgcacaaccagatatgtaatggatgtttatgaacaagctgtccatgctgtacctcattctgttgatatttgggtcaactactgtgagtttggtatatgtgcatttgaagaacctgctcatgtcagaagtttatttgagagggctttatctcttgttggaaaggactatttgtgttatcacctgtgggacaagtatatagaatttgaaagctctcagaagcagctgattcatcttgccaccatttttatcaacacactaaaatttcccacaaagaagttgcacatgtattatgaaaggtatatcctcatatgatatcacaatgatttagcatttgcacttcaggaattatggtactccaattaggctgctctcacaatattattattacttatgagtatgaagggtttggctgctgctcctgttagttgttatcctcgctattttactcttttcactatttcttagaagaagcctctccgcatttgcgggcgaagacttgccccaatttatcccttgcccagaccccactcatgtcggagcctctggcttcgggtctgcccttaactaatgttttagaaagtttgtaacattattggaacaagaggtgacaagttgtgttgctgaaatattatcagaaaaagtgcatgcttctgaaatggtgggcatcttagtcctgaagcattgaagcattacttatctgctggggagaagctctacaaaatgtccagcaagatttacaaagaaatctgttatttcgaggcatccataaaaaggcctttttttaatgtcaagacacttgatgatgatcagcttgaaaactggcaccagtatcttgactttgttgagaagaatggggattttgactgggctgtaaaactttatgagaggtgtttgatcccttgcgctaattattcggaattttggatccgctattcagagtatgttgacgctaaaggtggccgagaaattgcaaaccatgctctgggtcgagcatcatcatgttttgcgaaggaggttccagctttctgcatgtattatgcgttgtttaaagagcaaattggtgatgcactggttgcacgctctgtttttactaaaacaagaagttacttcacttcagggttttatgcaaatattaataggctggccaacatggaaaaacgaatgggaaatactaaagcagcttctgagatatacgagacagcaattgaggatgcaatgcagaagaacaacatagagttgcttcctgacctgtacagcaattttgctcagttcatatatgtggcaagtcatagcattattcaggctaaacaagtctttgtcgacggaataaatcgtgcaccttgtaaaccattgattaagggattcatacagttcatgagtacacatggagggcctaaagacatacctcttcttgattctgttatttctaatgccgtgactccaggatctgacgtatccacagctttaagcagagaggaccgcgaagatatctcactgttgtttttggagtttgttgatctctatgggggtattaaagaactcagaaaggcatgggctcggcatagtatactgtttcctcacagcactgggaacatttcacgacattattctactatggggaatagccttcaagagactaagaagaggagaaacacagaacctttgatgattgctcgtgatcattctttagaagatacaatgaaactgaaacagacactcaaaaccgatgatttttctcttatagttgataaagagagtgagccacaagtagacaaggacattgtggattcaggaaaaagacatggggatgcgggagcgcagaaagctttagatttggtcaattcacacaaagagaccatcacgacagctcaggaatgcactgacatggtttacagtgaacatatcctggacaaaaacagaatagagaagcaaatgaattcacatgccaaagaagatattaatcaagacctaatcttgcatgaacaaaatgatgagaaaacaaattctcatgaggcggagactcctgtagctgagtcaggtgactgtgattctccttccaaagcaattgctagctctgagaacatcaattttcagggcaaggtcattgaggtatctgcaagcagccatctagaaacagtatgctcaaaatatgactcgccgtctggaccaaacatgcacaaagaaggaagttcttctggtccagctcgaatatctccagagctggaggaaaggcaccatgtggaggttcaggtaaaagtcgacacagagcatcatttttctgtcagtaatgcaaacctagagatatcttttgatggtccaaatccaactgaatgtgacaaggaaatctctgccattggtcatgggagtcaagactatattcaatcttcgcagtcacatcaactctcagcctgtgcaaaaccttggagcttggactcagcgaaaacaaaatcggatactgtcagtattcaagctcaacttcgaaaccagttggagaatgctcaaacatatcaatctaataacctttcacaaaacatgcaacaacaagagcttacaatgcctcacaatgttcaaacatctgcacaaattcaagatcaattgcttgcacagcctaatcacagaaaccaacagtatctccaaatgatgcaagggtatgcaacacaaatgggggaatattaccaacaacaactgtattacctgcaggctcagcacaatcaacagatgcagagtctgcaacagcaacagctcccgactgagcatcttcagcaaacttttatgcagcaagtacagcagctgaaccagcaattggtactttggcagcaacaagtgcaacagcagccacaagtagtactgcaacaggcactgccagttcagcaacttcctgacgaaaaacagggtcagtgtccttccggggatagcaaacacggccaaaataaacagcagcaacaagcacctcaaatggatcaacaaagccagcagttgcagcaacaacagcttctttatcttcagcagcaacaacaaatgtatcttatacagcagcagcagatgtagcaacaacatattatgcaacaacagatccaaccgtacgtgcaacagcaacaaaaccaacaagggcccaaggatcagacttacaagtcaaatcatcaggatggaaggaacaggcaaatggagcatggacaactgtctgaagcttcacagagcgatggttccaaactgcgcagcggtgagcaatctgagttatcctacccgtcaactcctcagtcagaacgctcaaatcactaaggccttgttcggttattcccaatacacatgaattggatgagattggaaaaaattaagaagtttgacttgtttgggattcaaacccatccaatcctactcaatccacatagattgagagctaaccgaacaagcactaaatcactcaggatcatgtatcaaggaacatacttaagaaacatggaagcatgcatccatttccttgccctgctgccagtggaggctgattccatactgtgtcagagtgatgatgatgtgctgaccttcccgaatggtgatgaagctccatctccacggtgctctcttctttctaaattataaggcatttcaactttttttgagagtcaaaacatctcaattataatgccagctatggtttgatagcttggtattagattctcagtaatgctcgcatgtaaggggcgatgtgatgtgttggagacttcagtcaagcagttacatatcaagaacatatttggatgaagcgtgtgatatcttgtcatgactcatatgtatatgtatacgatatcctttatggtatagctctcggcatctgcactggcacgatagggctgattagacagcaactagcataagcctggaaatttacagttctgtcgtcagcctggtggtacacatttttgcctggatcaaactgccgttgtgctcattcattcacaggaattcacctcggcatattagcgatgtgtcaacgtcatgggtggatgcgcgtgcgatgaagccggaagagcaagcttgtaaaccattatggtccaatgaatccaaactgatgattagttg

SEQ ID NO: 3985 - DNA, 2597 bp, Zea Mays
caaccgtttagagacttcgggtaagacacgagcccaataccacggccctgccagcgatggccacattggcgccaccggcggtggaggtggagccggaggccgatgccatggccctggcgtcggaagccgcggcgcctgagctcccatcgtcgcattcgcagctcgattttttcaagaccagagttcaattattgtgtgaaagtaacacgagagattttgatgcttgggtatcattaataaatgctgcagagggaacatcagcagatgacatagaagttatgagcttggtataccataacttcttgttggaatttcctttgtgctacggttactggatcaaatatgcagctcataaggcacgactatgcacaaccagatatgtaatggatgtttatgaacaagctgtccatgctgtacctcattctgttgatatttgggtcaactactgtgagtttggtatatgtgcatttgaagaacctgctcatgtcagaagtttatttgagagggctttatctcttgttggaaaggactatttgtgttatcacctgtgggacaagtatatagaatttgaaagctctcagaagcagctgattcatcttgccaccatttttatcaacacactaaaatttcccacaaagaagttgcacatgtattatgaaagttttagaaagtttgtaacattattggaacaagaggtgacaagttgtgttgctgaaatattatcagaaaaagtgcatgcttctgaaatggtaggcactgaaggttctgaattagatatatcaactattattgctgacttatttgaccaaaaaggtgggcatcttagtcctgaagcattgaagcattacttatctgctggggagaagctctacaaaatgtccagcaagatttacaaagaaatctgttatttcgaggcatccataaaaaggcctttttttaatgtcaagacacttgatgatgatcagcttgaaaactggcaccagtatcttgactttgttgagaagaatggggattttgactgggctgtaaaactttatgagaggtgtttgatcccttgcgctaattattcggaattttggatccgctattcagagtatgttgacgctaaaggtggccgagaaattgcaaaccatgctctgggtcgagcatcatcatgttttgcgaaggaggttccagctttctgcatgtattatgcgttgtttaaagagcaaattggtgatgcactggttgcacgctctgtttttactaaaacaagaagttacttcacttcagggttttatgcaaatattaataggctggccaacatggaaaaacgaatgggaaatactaaagcagcttctgagatatacgagacagcaattgaggatgcaatgcagaagaacaacatagagttgcttcctgacctgtacagcaattttgctcagttcatatatgtggcaagtcatagcattattcaggctaaacaagtctttgtcgacggaataaatcgtgcaccttgtaaaccattgattaagggattcatacagttcatgagtacacatggagggcctaaagacatacctcttcttgattctgttatttctaatgccgtgactccaggatctgacgtatccacagctttaagcagagaggaccgcgaagatatctcactgttgtttttggaggatggaaggaacaggcaaatggagcatggacaactgtctgaagcttcacagagcgatggttccaaactgcgcagcggtgagcaatctgagttatcctacccgtcaactcctcagtcagaacgctcaaatcactaaggccttgttcggttattcccaatacacatgaattggatgagattggaaaaaattaagaagtttgacttgtttgggattcaaacccatccaatcctactcaatccacatagattgagagctaaccgaacaagcactaaatcactcaggatcatgtatcaaggaacatacttaagaaacatggaagcatgcatccatttccttgccctgctgccagtggaggctgattccatactgtgtcagagtgatgatgatgtgctgaccttcccgaatggtgatgaagctccatctccacggtgctctcttctttctaaattataaggcatttcaactttttttgagagtcaaaacatctcaattataatgccagctatggtttgatagcttggtattagattctcagtaatgctcgcatgtaaggggcgatgtgatgtgttggagacttcagtcaagcagttacatatcaagaacatatttggatgaagcgtgtgatatcttgtcatgactcatatgtatatgtatacgatatcctttatggtatagctctcggcatctgcactggcacgatagggctgattagacagcaactagcataagcctggaaatttacagttctgtcgtcagcctggtggtacacatttttgcctggatcaaactgccgttgtgctcattcattcacaggaattcacctcggcatattagcgatgtgtcaacgtcatgggtggatgcgcgtgcgatgaagccggaagagcaagcttgtaaaccattatggtccaatgaatccaaactgatgattagttg

SEQ ID NO: 3986 - DNA, 4282 bp, Zea Mays
caaccgtttagagacttcgggtaagacacgagcccaataccacggccctgccagcgatggccacattggcgccaccggcggtggaggtggagccggaggccgatgccatggccctggcgtcggaagccgcggcgcctgagctcccatcgtcgcattcgcagctcgattttttcaagaccagagttcaattattgtgtgaaagtaacacgagagattttgatgcttgggtatcattaataaatgctgcagagggaacatcagcagatgacatagaagttatgagcttggtataccataacttcttgttggaatttcctttgtgctacggttactggatcaaatatgcagctcataaggcacgactatgcacaaccagatatgtaatggatgtttatgaacaagctgtccatgctgtacctcattctgttgatatttgggtcaactactgtgagtttggtatatgtgcatttgaagaacctgctcatgtcagaagtttatttgagagggctttatctcttgttggaaaggactatttgtgttatcacctgtgggacaagtatatagaatttgaaagctctcagaagcagctgattcatcttgccaccatttttatcaacacactaaaatttcccacaaagaagttgcacatgtattatgaaagttttagaaagtttgtaacattattggaacaagaggtgacaagttgtgttgctgaaatattatcagaaaaagtgcatgcttctgaaatggtgggcatcttagtcctgaagcattgaagcattacttatctgctggggagaagctctacaaaatgtccagcaagatttacaaagaaatctgttatttcgaggcatccataaaaaggcctttttttaatgtcaagacacttgatgatgatcagcttgaaaactggcaccagtatcttgactttgttgagaagaatggggattttgactgggctgtaaaactttatgagaggtgtttgatcccttgcgctaattattcggaattttggatccgctattcagagtatgttgacgctaaaggtggccgagaaattgcaaaccatgctctgggtcgagcatcatcatgttttgcgaagggttttatgcaaatattaataggctggccaacatggaaaaacgaatgggaaatactaaagcagcttctgagatatacgagacagcaattgaggatgcaatgcagaagaacaacatagagttgcttcctgacctgtacagcaattttgctcagttcatatatgtggcaagtcatagcattattcaggctaaacaagtctttgtcgacggaataaatcgtgcaccttgtaaaccattgattaagggattcatacagttcatgagtacacatggagggcctaaagacatacctcttcttgattctgttatttctaatgccgtgactccaggatctgacgtatccacagctttaagcagagaggaccgcgaagatatctcactgttgtttttggagtttgttgatctctatgggggtattaaagaactcagaaaggcatgggctcggcatagtatactgtttcctcacagcactgggaacatttcacgacattattctactatggggaatagccttcaagagactaagaagaggagaaacacagaacctttgatgattgctcgtgatcattctttagaagatacaatgaaactgaaacagacactcaaaaccgatgatttttctcttatagttgataaagagagtgagccacaagtagacaaggacattgtggattcaggaaaaagacatggggatgcgggagcgcagaaagctttagatttggtcaattcacacaaagagaccatcacgacagctcaggaatgcactgacatggtttacagtgaacatatcctggacaaaaacagaatagagaagcaaatgaattcacatgccaaagaagatattaatcaagacctaatcttgcatgaacaaaatgatgagaaaacaaattctcatgaggcggagactcctgtagctgagtcaggtgactgtgattctccttccaaagcaattgctagctctgagaacatcaattttcagggcaaggtcattgaggtatctgcaagcagccatctagaaacagtatgctcaaaatatgactcgccgtctggaccaaacatgcacaaagaaggaagttcttctggtccagctcgaatatctccagagctggaggaaaggcaccatgtggaggttcaggtaaaagtcgacacagagcatcatttttctgtcagtaatgcaaacctagagatatcttttgatggtccaaatccaactgaatgtgacaaggaaatctctgccattggtcatgggagtcaagactatattcaatcttcgcagtcacatcaactctcagcctgtgcaaaaccttggagcttggactcagcgaaaacaaaatcggatactgtcagtattcaagctcaacttcgaaaccagttggagaatgctcaaacatatcaatctaataacctttcacaaaacatgcaacaacaagagcttacaatgcctcacaatgttcaaacatctgcacaaattcaagatcaattgcttgcacagcctaatcacagaaaccaacagtatctccaaatgatgcaagggtatgcaacacaaatgggggaatattaccaacaacaactgtattacctgcaggctcagcacaatcaacagatgcagagtctgcaacagcaacagctcccgactgagcatcttcagcaaacttttatgcagcaagtacagcagctgaaccagcaattggtactttggcagcaacaagtgcaacagcagccacaagtagtactgcaacaggcactgccagttcagcaacttcctgacgaaaaacagggtcagtgtccttccggggatagcaaacacggccaaaataaacagcagcaacaagcacctcaaatggatcaacaaagccagcagttgcagcaacaacagcttctttatcttcagcagcaacaacaaatgtatcttatacagcagcagcagatgtatcaacaacagcaagctcagcagcaacagctcttacagcagcagttaatgcaacaacaacagtatgtactgcagatgccacagcaccagcaagactcagttcggcagcaacaacagcaactgtttgagcaacagcagcagcagatgatgcttcttcagcgacagcaacaacatattatgcaacaacagatccaaccgtacgtgcaacagcaacaaaaccaacaagggcccaaggatcagacttacaagtcaaatcatcagacttgtgaggtccaggggcaccacaataagcaacaaagctgcgcctatggaccgtcaggatggaaggaacaggcaaatggagcatggacaactgtctgaagcttcacagagcgatggttccaaactgcgcagcggtgagcaatctgagttatcctacccgtcaactcctcagtcagaacgctcaaatcactaaggccttgttcggttattcccaatacacatgaattggatgagattggaaaaaattaagaagtttgacttgtttgggattcaaacccatccaatcctactcaatccacatagattgagagctaaccgaacaagcactaaatcactcaggatcatgtatcaaggaacatacttaagaaacatggaagcatgcatccatttccttgccctgctgccagtggaggctgattccatactgtgtcagagtgatgatgatgtgctgaccttcccgaatggtgatgaagctccatctccacggtgctctcttctttctaaattataaggcatttcaactttttttgagagtcaaaacatctcaattataatgccagctatggtttgatagcttggtattagattctcagtaatgctcgcatgtaaggggcgatgtgatgtgttggagacttcagtcaagcagttacatatcaagaacatatttggatgaagcgtgtgatatcttgtcatgactcatatgtatatgtatacgatatcctttatggtatagctctcggcatctgcactggcacgatagggctgattagacagcaactagcataagcctggaaatttacagttctgtcgtcagcctggtggtacacatttttgcctggatcaaactgccgttgtgctcattcattcacaggaattcacctcggcatattagcgatgtgtcaacgtcatgggtggatgcgcgtgcgatgaagccggaagagcaagcttgtaaaccattatggtccaatgaatccaaactgatgattagttg

SEQ ID NO: 3987 - DNA, 4395 bp, Zea Mays
caaccgtttagagacttcgggtaagacacgagcccaataccacggccctgccagcgatggccacattggcgccaccggcggtggaggtggagccggaggccgatgccatggccctggcgtcggaagccgcggcgcctgagctcccatcgtcgcattcgcagctcgattttttcaagaccagagttcaattattgtgtgaaagtaacacgagagattttgatgcttgggtatcattaataaatgctgcagagggaacatcagcagatgacatagaagttatgagcttggtataccataacttcttgttggaatttcctttgtgctacggttactggatcaaatatgcagctcataaggcacgactatgcacaaccagatatgtaatggatgtttatgaacaagctgtccatgctgtacctcattctgttgatatttgggtcaactactgtgagtttggtatatgtgcatttgaagaacctgctcatgtcagaagtttatttgagagggctttatctcttgttggaaaggactatttgtgttatcacctgtgggacaagtatatagaatttgaaagctctcagaagcagctgattcatcttgccaccatttttatcaacacactaaaatttcccacaaagaagttgcacatgtattatgaaagttttagaaagtttgtaacattattggaacaagaggtgacaagttgtgttgctgaaatattatcagaaaaagtgcatgcttctgaaatggtaggcactgaaggttctgaattagatatatcaactattattgctgacttatttgaccaaaaaggtgggcatcttagtcctgaagcattgaagcattacttatctgctggggagaagctctacaaaatgtccagcaagatttacaaagaaatctgttatttcgaggcatccataaaaaggcctttttttaatgtcaagacacttgatgatgatcagcttgaaaactggcaccagtatcttgactttgttgagaagaatggggattttgactgggctgtaaaactttatgagaggtgtttgatcccttgcgctaattattcggaattttggatccgctattcagagtatgttgacgctaaaggtggccgagaaattgcaaaccatgctctgggtcgagcatcatcatgttttgcgaaggaggttccagctttctgcatgtattatgcgttgtttaaagagcaaattggtgatgcactggttgcacgctctgtttttactaaaacaagaagttacttcacttcagggttttatgcaaatattaataggctggccaacatggaaaaacgaatgggaaatactaaagcagcttctgagatatacgagacagcaattgaggatgcaatgcagaagaacaacatagagttgcttcctgacctgtacagcaattttgctcagttcatatatgtggcaagtcatagcattattcaggctaaacaagtctttgtcgacggaataaatcgtgcaccttgtaaaccattgattaagggattcatacagttcatgagtacacatggagggcctaaagacatacctcttcttgattctgttatttctaatgccgtgactccaggatctgacgtatccacagctttaagcagagaggaccgcgaagatatctcactgttgtttttggaggtttgttgatctctatgggggtattaaagaactcagaaaggcatgggctcggcatagtatactgtttcctcacagcactgggaacatttcacgacattattctactatggggaatagccttcaagagactaagaagaggagaaacacagaacctttgatgattgctcgtgatcattctttagaagatacaatgaaactgaaacagacactcaaaaccgatgatttttctcttatagttgataaagagagtgagccacaagtagacaaggacattgtggattcaggaaaaagacatggggatgcgggagcgcagaaagctttagatttggtcaattcacacaaagagaccatcacgacagctcaggaatgcactgacatggtttacagtgaacatatcctggacaaaaacagaatagagaagcaaatgaattcacatgccaaagaagatattaatcaagacctaatcttgcatgaacaaaatgatgagaaaacaaattctcatgaggcggagactcctgtagctgagtcaggtgactgtgattctccttccaaagcaattgctagctctgagaacatcaattttcagggcaaggtcattgaggtatctgcaagcagccatctagaaacagtatgctcaaaatatgactcgccgtctggaccaaacatgcacaaagaaggaagttcttctggtccagctcgaatatctccagagctggaggaaaggcaccatgtggaggttcaggtaaaagtcgacacagagcatcatttttctgtcagtaatgcaaacctagagatatcttttgatggtccaaatccaactgaatgtgacaaggaaatctctgccattggtcatgggagtcaagactatattcaatcttcgcagtcacatcaactctcagcctgtgcaaaaccttggagcttggactcagcgaaaacaaaatcggatactgtcagtattcaagctcaacttcgaaaccagttggagaatgctcaaacatatcaatctaataacctttcacaaaacatgcaacaacaagagcttacaatgcctcacaatgttcaaacatctgcacaaattcaagatcaattgcttgcacagcctaatcacagaaaccaacagtatctccaaatgatgcaagggtatgcaacacaaatgggggaatattaccaacaacaactgtattacctgcaggctcagcacaatcaacagatgcagagtctgcaacagcaacagctcccgactgagcatcttcagcaaacttttatgcagcaagtacagcagctgaaccagcaattggtactttggcagcaacaagtgcaacagcagccacaagtagtactgcaacaggcactgccagttcagcaacttcctgacgaaaaacagggtcagtgtccttccggggatagcaaacacggccaaaataaacagcagcaacaagcacctcaaatggatcaacaaagccagcagttgcagcaacaacagcttctttatcttcagcagcaacaacaaatgtatcttatacagcagcagcagatgtatcaacaacagcaagctcagcagcaacagctcttacagcagcagttaatgcaacaacaacagtatgtactgcagatgccacagcaccagcaagactcagttcggcagcaacaacagcaactgtttgagcaacagcagcagcagatgatgcttcttcagcgacagcaacaacatattatgcaacaacagatccaaccgtacgtgcaacagcaacaaaaccaacaagggcccaaggatcagacttacaagtcaaatcatcaggatggaaggaacaggcaaatggagcatggacaactgtctgaagcttcacagagcgatggttccaaactgcgcagcggtgagcaatctgagttatcctacccgtcaactcctcagtcagaacgctcaaatcactaaggccttgttcggttattcccaatacacatgaattggatgagattggaaaaaattaagaagtttgacttgtttgggattcaaacccatccaatcctactcaatccacatagattgagagctaaccgaacaagcactaaatcactcaggatcatgtatcaaggaacatacttaagaaacatggaagcatgcatccatttccttgccctgctgccagtggaggctgattccatactgtgtcagagtgatgatgatgtgctgaccttcccgaatggtgatgaagctccatctccacggtgctctcttctttctaaattataaggcatttcaactttttttgagagtcaaaacatctcaattataatgccagctatggtttgatagcttggtattagattctcagtaatgctcgcatgtaaggggcgatgtgatgtgttggagacttcagtcaagcagttacatatcaagaacatatttggatgaagcgtgtgatatcttgtcatgactcatatgtatatgtatacgatatcctttatggtatagctctcggcatctgcactggcacgatagggctgattagacagcaactagcataagcctggaaatttacagttctgtcgtcagcctggtggtacacatttttgcctggatcaaactgccgttgtgctcattcattcacaggaattcacctcggcatattagcgatgtgtcaacgtcatgggtggatgcgcgtgcgatgaagccggaagagcaagcttgtaaaccattatggtccaatgaatccaaactgatgattagttg

SEQ ID NO: 3988 - DNA, 4396 bp, Zea Mays
caaccgtttagagacttcgggtaagacacgagcccaataccacggccctgccagcgatggccacattggcgccaccggcggtggaggtggagccggaggccgatgccatggccctggcgtcggaagccgcggcgcctgagctcccatcgtcgcattcgcagctcgattttttcaagaccagagttcaattattgtgtgaaagtaacacgagagattttgatgcttgggtatcattaataaatgctgcagagggaacatcagcagatgacatagaagttatgagcttggtataccataacttcttgttggaatttcctttgtgctacggttactggatcaaatatgcagctcataaggcacgactatgcacaaccagatatgtaatggatgtttatgaacaagctgtccatgctgtacctcattctgttgatatttgggtcaactactgtgagtttggtatatgtgcatttgaagaacctgctcatgtcagaagtttatttgagagggctttatctcttgttggaaaggactatttgtgttatcacctgtgggacaagtatatagaatttgaaagctctcagaagcagctgattcatcttgccaccatttttatcaacacactaaaatttcccacaaagaagttgcacatgtattatgaaagttttagaaagtttgtaacattattggaacaagaggtgacaagttgtgttgctgaaatattatcagaaaaagtgcatgcttctgaaatggtaggcactgaaggttctgaattagatatatcaactattattgctgacttatttgaccaaaaaggtgggcatcttagtcctgaagcattgaagcattacttatctgctggggagaagctctacaaaatgtccagcaagatttacaaagaaatctgttatttcgaggcatccataaaaaggcctttttttaatgtcaagacacttgatgatgatcagcttgaaaactggcaccagtatcttgactttgttgagaagaatggggattttgactgggctgtaaaactttatgagaggtgtttgatcccttgcgctaattattcggaattttggatccgctattcagagtatgttgacgctaaaggtggccgagaaattgcaaaccatgctctgggtcgagcatcatcatgttttgcgaaggaggttccagctttctgcatgtattatgcgttgtttaaagagcaaattggtgatgcactggttgcacgctctgtttttactaaaacaagaagttacttcacttcagggttttatgcaaatattaataggctggccaacatggaaaaacgaatgggaaatactaaagcagcttctgagatatacgagacagcaattgaggatgcaatgcagaagaacaacatagagttgcttcctgacctgtacagcaattttgctcagttcatatatgtggcaagtcatagcattattcaggctaaacaagtctttgtcgacggaataaatcgtgcaccttgtaaaccattgattaagggattcatacagttcatgagtacacatggagggcctaaagacatacctcttcttgattctgttatttctaatgccgtgactccaggatctgacgtatccacagctttaagcagagaggaccgcgaagatatctcactgttgtttttggagagtttgttgatctctatgggggtattaaagaactcagaaaggcatgggctcggcatagtatactgtttcctcacagcactgggaacatttcacgacattattctactatggggaatagccttcaagagactaagaagaggagaaacacagaacctttgatgattgctcgtgatcattctttagaagatacaatgaaactgaaacagacactcaaaaccgatgatttttctcttatagttgataaagagagtgagccacaagtagacaaggacattgtggattcaggaaaaagacatggggatgcgggagcgcagaaagctttagatttggtcaattcacacaaagagaccatcacgacagctcaggaatgcactgacatggtttacagtgaacatatcctggacaaaaacagaatagagaagcaaatgaattcacatgccaaagaagatattaatcaagacctaatcttgcatgaacaaaatgatgagaaaacaaattctcatgaggcggagactcctgtagctgagtcaggtgactgtgattctccttccaaagcaattgctagctctgagaacatcaattttcagggcaaggtcattgaggtatctgcaagcagccatctagaaacagtatgctcaaaatatgactcgccgtctggaccaaacatgcacaaagaaggaagttcttctggtccagctcgaatatctccagagctggaggaaaggcaccatgtggaggttcaggtaaaagtcgacacagagcatcatttttctgtcagtaatgcaaacctagagatatcttttgatggtccaaatccaactgaatgtgacaaggaaatctctgccattggtcatgggagtcaagactatattcaatcttcgcagtcacatcaactctcagcctgtgcaaaaccttggagcttggactcagcgaaaacaaaatcggatactgtcagtattcaagctcaacttcgaaaccagttggagaatgctcaaacatatcaatctaataacctttcacaaaacatgcaacaacaagagcttacaatgcctcacaatgttcaaacatctgcacaaattcaagatcaattgcttgcacagcctaatcacagaaaccaacagtatctccaaatgatgcaagggtatgcaacacaaatgggggaatattaccaacaacaactgtattacctgcaggctcagcacaatcaacagatgcagagtctgcaacagcaacagctcccgactgagcatcttcagcaaacttttatgcagcaagtacagcagctgaaccagcaattggtactttggcagcaacaagtgcaacagcagccacaagtagtactgcaacaggcactgccagttcagcaacttcctgacgaaaaacagggtcagtgtccttccggggatagcaaacacggccaaaataaacagcagcaacaagcacctcaaatggatcaacaaagccagcagttgcagcaacaacagcttctttatcttcagcagcaacaacaaatgtatcttatacagcagcagcagatgtatcaacaacagcaagctcagcagcaacagctcttacagcagcagttaatgcaacaacaacagtatgtactgcagatgccacagcaccagcaagactcagttcggcagcaacaacagcaactgtttgagcaacagcagcagcagatgatgcttcttcagcgacagcaacaacatattatgcaacaacagatccaaccgtacgtgcaacagcaacaaaaccaacaagggcccaaggatcagacttacaagtcaaatcatcaggatggaaggaacaggcaaatggagcatggacaactgtctgaagcttcacagagcgatggttccaaactgcgcagcggtgagcaatctgagttatcctacccgtcaactcctcagtcagaacgctcaaatcactaaggccttgttcggttattcccaatacacatgaattggatgagattggaaaaaattaagaagtttgacttgtttgggattcaaacccatccaatcctactcaatccacatagattgagagctaaccgaacaagcactaaatcactcaggatcatgtatcaaggaacatacttaagaaacatggaagcatgcatccatttccttgccctgctgccagtggaggctgattccatactgtgtcagagtgatgatgatgtgctgaccttcccgaatggtgatgaagctccatctccacggtgctctcttctttctaaattataaggcatttcaactttttttgagagtcaaaacatctcaattataatgccagctatggtttgatagcttggtattagattctcagtaatgctcgcatgtaaggggcgatgtgatgtgttggagacttcagtcaagcagttacatatcaagaacatatttggatgaagcgtgtgatatcttgtcatgactcatatgtatatgtatacgatatcctttatggtatagctctcggcatctgcactggcacgatagggctgattagacagcaactagcataagcctggaaatttacagttctgtcgtcagcctggtggtacacatttttgcctggatcaaactgccgttgtgctcattcattcacaggaattcacctcggcatattagcgatgtgtcaacgtcatgggtggatgcgcgtgcgatgaagccggaagagcaagcttgtaaaccattatggtccaatgaatccaaactgatgattagttg

SEQ ID NO: 3989 - DNA, 2772 bp, Zea Mays
gtttattcctctcaccatgggtacctaacccaccctgctatatttgttgatctctatgggggtattaaagaactcagaaaggcatgggctcggcatagtatactgtttcctcacagcactgggaacatttcacgacattattctactatggggaatagccttcaagagactaagaagaggagaaacacagaacctttgatgattgctcgtgatcattctttagaagatacaatgaaactgaaacagacactcaaaaccgatgatttttctcttatagttgataaagagagtgagccacaagtagacaaggacattgtggattcaggaaaaagacatggggatgcgggagcgcagaaagctttagatttggtcaattcacacaaagagaccatcacgacagctcaggaatgcactgacatggtttacagtgaacatatcctggacaaaaacagaatagagaagcaaatgaattcacatgccaaagaagatattaatcaagacctaatcttgcatgaacaaaatgatgagaaaacaaattctcatgaggcggagactcctgtagctgagtcaggtgactgtgattctccttccaaagcaattgctagctctgagaacatcaattttcagggcaaggtcattgaggtatctgcaagcagccatctagaaacagtatgctcaaaatatgactcgccgtctggaccaaacatgcacaaagaaggaagttcttctggtccagctcgaatatctccagagctggaggaaaggcaccatgtggaggttcaggtaaaagtcgacacagagcatcatttttctgtcagtaatgcaaacctagagatatcttttgatggtccaaatccaactgaatgtgacaaggaaatctctgccattggtcatgggagtcaagactatattcaatcttcgcagtcacatcaactctcagcctgtgcaaaaccttggagcttggactcagcgaaaacaaaatcggatactgtcagtattcaagctcaacttcgaaaccagttggagaatgctcaaacatatcaatctaataacctttcacaaaacatgcaacaacaagagcttacaatgcctcacaatgttcaaacatctgcacaaattcaagatcaattgcttgcacagcctaatcacagaaaccaacagtatctccaaatgatgcaagggtatgcaacacaaatgggggaatattaccaacaacaactgtattacctgcaggctcagcacaatcaacagatgcagagtctgcaacagcaacagctcccgactgagcatcttcagcaaacttttatgcagcaagtacagcagctgaaccagcaattggtactttggcagcaacaagtgcaacagcagccacaagtagtactgcaacaggcactgccagttcagcaacttcctgacgaaaaacagggtcagtgtccttccggggatagcaaacacggccaaaataaacagcagcaacaagcacctcaaatggatcaacaaagccagcagttgcagcaacaacagcttctttatcttcagcagcaacaacaaatgtatcttatacagcagcagcagatgtatcaacaacagcaagctcagcagcaacagctcttacagcagcagttaatgcaacaacaacagtatgtactgcagatgccacagcaccagcaagactcagttcggcagcaacaacagcaactgtttgagcaacagcagcagcagatgatgcttcttcagcgacagcaacaacatattatgcaacaacagatccaaccgtacgtgcaacagcaacaaaaccaacaagggcccaaggatcagacttacaagtcaaatcatcaggatggaaggaacaggcaaatggagcatggacaactgtctgaagcttcacagagcgatggttccaaactgcgcagcggtgagcaatctgagttatcctacccgtcaactcctcagtcagaacgctcaaatcactaaggccttgttcggttattcccaatacacatgaattggatgagattggaaaaaattaagaagtttgacttgtttgggattcaaacccatccaatcctactcaatccacatagattgagagctaaccgaacaagcactaaatcactcaggatcatgtatcaaggaacatacttaagaaacatggaagcatgcatccatttccttgccctgctgccagtggaggctgattccatactgtgtcagagtgatgatgatgtgctgaccttcccgaatggtgatgaagctccatctccacggtgctctcttctttctaaattataaggcatttcaactttttttgagagtcaaaacatctcaattataatgccagctatggtttgatagcttggtattagattctcagtaatgctcgcatgtaaggggcgatgtgatgtgttggagacttcagtcaagcagttacatatcaagaacatatttggatgaagcgtgtgatatcttgtcatgactcatatgtatatgtatacgatatcctttatggtatagctctcggcatctgcactggcacgatagggctgattagacagcaactagcataagcctggaaatttacagttctgtcgtcagcctggtggtacacatttttgcctggatcaaactgccgttgtgctcattcattcacaggaattcacctcggcatattagcgatgtgtcaacgtcatgggtggatgcgcgtgcgatgaagccggaagagcaagcttgtaaaccattatggtccaatgaatccaaactgatgattagttg

SEQ ID NO: 3990 - DNA, 416 bp, Zea Mays
cggagttcccttgttgcgaacagcgcgacctcatgccgtggattgctgtgtcgtcacgcgaatcgagacgagcaagctattgaggacctaggtgttcggcaggtggagactgctgagcaggagctcgttgaaggcaagttgtgcccttgatcacttctttttacccaataatgttcttattatcataatgatctgtataggttaattttgatgggacccaataggttaccctagtttggctatctttataccttgtctatcactaaatttttgggtagtacctgccattgctttatgtggttttgggtattgagatacacattattcatgatcatacatgtattattagtttgttatttactgttcatgataagatcattttgttaattggaacatggagaaccacccggaaaaac

SEQ ID NO: 3991 - DNA, 1922 bp, Zea Mays
caaacggagccatattagaaaaacaaaggacataaaaaccctccctcccaacccccgcgtcagtccttccgcgccgcaatcctccgtccatgccaggtccaacgccgtcttccacgccgccggcggcagccgcaaaccccagccacaactcgaggcggaagcggaagcccaggccgaaaacagcgcccccctctgccctaaatcctaactgggcgctgctccagtccaagctcccccaccgccccgctgcgacccacctcggcaagcgcaagcacgacggtgccactccggcgcccgcggagccgtctccaccacccacagcgcaggaggtcagactcgagccaacctccgacgataccaggttaattcctttggcaatattgtatatgatgaatatgttcgcgccgtggagcgaattgtggactaccggacatggattagtgggattagacctaagcacatgaacaaagccaaagaattctgggctgtgcagaaggaagtagctgagctgattaaaggaagaattcttgttggtcatgcactgcacaatgacctcaaggtgctgctactaagccacccaaagaaggacatcagggatacatcagaatatgaggttttcagaagggagagaaagaggcgatcattgaaggatcttgctgctgaagtccttggtgctaaaatacaacagaatgaacactgccccatcgaggatgcgagagctgcgatgctcatttacaacaagcacaagaaagcatgggagaagaacatgaaggaacagttcagattcaaaaagaagctcaagaagcgaggcaagaagaaaactactgagtccaatgggaatgatcccaatgtccccactgttcttctatgaagataaagaagtaacaaagggagaacttgtcctagttttggaaacaatatctgtaatgaaatttttgtagttcaacattaatgaaaattcaggttctgcaatgattgtctcaagtgaaaaaggtaacaggtgacaagaccgggttgctgagcattgggttctgcggactggtctgctgtctcgtagtcgtggcgatggttggcgtgagagcttgccgtttcctaactgtgaattggtgttggtgcaggggcagggagttggtgtccagcatgtgcaggatgagcaccatgagcacggagcaggcgaacatgggtatgggcccgaagacccacatgagcagcgtggtggccaggtagagcgcccggaggcccatggaccagaagttgccgccccggatgacggcgtgctgcacgtaggtcgccggcacgtcggagtcgagggtggtgacgaggaagctggcctgcacgtagtacctggcggagtggatgaagcaggtgaaggaggcgaggaagcagacgaggagggagatgtacttgacggtggccgtggactggctgcggtcgccgtagacgagctccgtcatgaacatcttggtggtgctgctgacccaggcgccgatgagggagcccagcgcgatggacagcgacgccaggttggtggacgccgagatgttgctggagatgacgctcagcgccagccccgtctcgtcgggggtcgcctgcaccatgcgccgcacccaggcgagcttgttgtggttctcgtagccgatcacggtcgtggcgggatgccggagaatgcggtagaggagtaggaggtggtagctcagcatcaccaccagcccgcatggcaccagcaccaggtccagggaccccttctccagctgcatcgtctcgtctcgtctctcttcaggctttctgctccctagctactaggcttcatttgctattgctttagcatttcgatgctatttcttggttggagttggagttgatctgtgcagactgaactgccctcatggcttgtggcttgcgctttcatttggattgctagt

SEQ ID NO: 3992 - DNA, 1975 bp, Zea Mays
caaacggagccatattagaaaaacaaaggacataaaaaccctccctcccaacccccgcgtcagtccttccgcgccgcaatcctccgtccatgccaggtccaacgccgtcttccacgccgccggcggcagccgcaaaccccagccacaactcgaggcggaagcggaagcccaggccgaaaacagcgcccccctctgccctaaatcctaactgggcgctgctccagtccaagctcccccaccgccccgctgcgacccacctcggcaagcgcaagcacgacggtgccactccggcgcccgcggagccgtctccaccacccacagcgcaggaggtcagactcgagccaacctccgacgataccagcttgactaaggtggtggcgattgattgcgagatggtcggggtaggatttgatggcggtaaaagcgccctcggcagggttaccttggttaattcctttggcaatattgtatatgatgaatatgttcgcgccgtggagcgaattgtggactaccggacatggattagtgggattagacctaagcacatgaacaaagccaaagaattctgggctgtgcagaaggaagtagctgagctgattaaaggaagaattcttgttggtcatgcactgcacaatgacctcaaggtgctgctactaagccacccaaagaaggacatcagggatacatcagaatatgaggttttcagaagggagagaaagaggcgatcattgaaggatcttgctgctgaagtccttgatcgaggatgcgagagctgcgatgctcatttacaacaagcacaagaaagcatgggagaagaacatgaaggaacagttcagattcaaaaagaagctcaagaagcgaggcaagaagaaaactactgagtccaatgggaatgatcccaatgtccccactgttcttctatgaagataaagaagtaacaaagggagaacttgtcctagttttggaaacaatatctgtaatgaaatttttgtagttcaacattaatgaaaattcaggttctgcaatgattgtctcaagtgaaaaaggtaacaggtgacaagaccgggttgctgagcattgggttctgcggactggtctgctgtctcgtagtcgtggcgatggttggcgtgagagcttgccgtttcctaactgtgaattggtgttggtgcaggggcagggagttggtgtccagcatgtgcaggatgagcaccatgagcacggagcaggcgaacatgggtatgggcccgaagacccacatgagcagcgtggtggccaggtagagcgcccggaggcccatggaccagaagttgccgccccggatgacggcgtgctgcacgtaggtcgccggcacgtcggagtcgagggtggtgacgaggaagctggcctgcacgtagtacctggcggagtggatgaagcaggtgaaggaggcgaggaagcagacgaggagggagatgtacttgacggtggccgtggactggctgcggtcgccgtagacgagctccgtcatgaacatcttggtggtgctgctgacccaggcgccgatgagggagcccagcgcgatggacagcgacgccaggttggtggacgccgagatgttgctggagatgacgctcagcgccagccccgtctcgtcgggggtcgcctgcaccatgcgccgcacccaggcgagcttgttgtggttctcgtagccgatcacggtcgtggcgggatgccggagaatgcggtagaggagtaggaggtggtagctcagcatcaccaccagcccgcatggcaccagcaccaggtccagggaccccttctccagctgcatcgtctcgtctcgtctctcttcaggctttctgctccctagctactaggcttcatttgctattgctttagcatttcgatgctatttcttggttggagttggagttgatctgtgcagactgaactgccctcatggcttgtggcttgcgctttcatttggattgctagt

SEQ ID NO: 3993 - DNA, 1937 bp, Zea Mays
cctccctcccaacccccgcgtcagtccttccgcgccgcaatcctccgtccatgccaggtccaacgccgtcttccacgccgccggcggcagccgcaaaccccagccacaactcgaggcggaagcggaagcccaggccgaaaacagcgcccccctctgccctaaatcctaactgggcgctgctccagtccaagctcccccaccgccccgctgcgacccacctcggcaagcgcaagcacgacggtgccactccggcgcccgcggagccgtctccaccacccacagcgcaggaggtcagactcgagccaacctccgacgataccagatggtcggggtaggatttgatggcggtaaaagcgccctcggcagggttaccttggttaattcctttggcaatattgtatatgatgaatatgttcgcgccgtggagcgaattgtggactaccggacatggattagtgggattagacctaagcacatgaacaaagccaaagaattctgggctgtgcagaaggaagtagctgagctgattaaaggaagaattcttgttggtcatgcactgcacaatgacctcaaggtgctgctactaagccacccaaagaaggacatcagggatacatcagaatatgaggttttcagaagggagagaaagaggcgatcattgaaggatcttgctgctgaagtccttggtgctaaaatacaacagaatgaacactgccccatcgaggatgcgagagctgcgatgctcatttacaacaagcacaagaaagcatgggagaagaacatgaaggaacagttcagattcaaaaagaagctcaagaagcgaggcaagaagaaaactactgagtccaatgggaatgatcccaatgtccccactgttcttctatgaagataaagaagtaacaaagggagaacttgtcctagttttggaaacaatatctgtaatgaaatttttgtagttcaacattaatgaaaattcaggttctgcaatgattgtctcaagtgaaaaaggtaacaggtgacaagaccgggttgctgagcattgggttctgcggactggtctgctgtctcgtagtcgtggcgatggttggcgtgagagcttgccgtttcctaactgtgaattggtgttggtgcaggggcagggagttggtgtccagcatgtgcaggatgagcaccatgagcacggagcaggcgaacatgggtatgggcccgaagacccacatgagcagcgtggtggccaggtagagcgcccggaggcccatggaccagaagttgccgccccggatgacggcgtgctgcacgtaggtcgccggcacgtcggagtcgagggtggtgacgaggaagctggcctgcacgtagtacctggcggagtggatgaagcaggtgaaggaggcgaggaagcagacgaggagggagatgtacttgacggtggccgtggactggctgcggtcgccgtagacgagctccgtcatgaacatcttggtggtgctgctgacccaggcgccgatgagggagcccagcgcgatggacagcgacgccaggttggtggacgccgagatgttgctggagatgacgctcagcgccagccccgtctcgtcgggggtcgcctgcaccatgcgccgcacccaggcgagcttgttgtggttctcgtagccgatcacggtcgtggcgggatgccggagaatgcggtagaggagtaggaggtggtagctcagcatcaccaccagcccgcatggcaccagcaccaggtccagggaccccttctccagctgcatcgtctcgtctcgtctctcttcaggctttctgctccctagctactaggcttcatttgctattgctttagcatttcgatgctatttcttggttggagttggagttgatctgtgcagactgaactgccctcatggcttgtggcttgcgctttcatttggattgctagt

SEQ ID NO: 3994 - DNA, 1945 bp, Zea Mays
cctccctcccaacccccgcgtcagtccttccgcgccgcaatcctccgtccatgccaggtccaacgccgtcttccacgccgccggcggcagccgcaaaccccagccacaactcgaggcggaagcggaagcccaggccgaaaacagcgcccccctctgccctaaatcctaactgggcgctgctccagtccaagctcccccaccgccccgctgcgacccacctcggcaagcgcaagcacgacggtgccactccggcgcccgcggagccgtctccaccacccacagcgcaggaggtcagactcgagccaacctccgacgataccagcttgactaaggtggtggcgattgattgcgagatggtcggggtaggatttgatggcggtaaaagcgccctcggcagggttaccttggttaattcctttggcaatattgtatatgatgaatatgttcgcgccgtggagcgaattgtggactaccggacatggattagtgggattagacctaagcacatgaacaaagaaggaagtagctgagctgattaaaggaagaattcttgttggtcatgcactgcacaatgacctcaaggtgctgctactaagccacccaaagaaggacatcagggatacatcagaatatgaggttttcagaagggagagaaagaggcgatcattgaaggatcttgctgctgaagtccttggtgctaaaatacaacagaatgaacactgccccatcgaggatgcgagagctgcgatgctcatttacaacaagcacaagaaagcatgggagaagaacatgaaggaacagttcagattcaaaaagaagctcaagaagcgaggcaagaagaaaactactgagtccaatgggaatgatcccaatgtccccactgttcttctatgaagataaagaagtaacaaagggagaacttgtcctagttttggaaacaatatctgtaatgaaatttttgtagttcaacattaatgaaaattcaggttctgcaatgattgtctcaagtgaaaaaggtaacaggtgacaagaccgggttgctgagcattgggttctgcggactggtctgctgtctcgtagtcgtggcgatggttggcgtgagagcttgccgtttcctaactgtgaattggtgttggtgcaggggcagggagttggtgtccagcatgtgcaggatgagcaccatgagcacggagcaggcgaacatgggtatgggcccgaagacccacatgagcagcgtggtggccaggtagagcgcccggaggcccatggaccagaagttgccgccccggatgacggcgtgctgcacgtaggtcgccggcacgtcggagtcgagggtggtgacgaggaagctggcctgcacgtagtacctggcggagtggatgaagcaggtgaaggaggcgaggaagcagacgaggagggagatgtacttgacggtggccgtggactggctgcggtcgccgtagacgagctccgtcatgaacatcttggtggtgctgctgacccaggcgccgatgagggagcccagcgcgatggacagcgacgccaggttggtggacgccgagatgttgctggagatgacgctcagcgccagccccgtctcgtcgggggtcgcctgcaccatgcgccgcacccaggcgagcttgttgtggttctcgtagccgatcacggtcgtggcgggatgccggagaatgcggtagaggagtaggaggtggtagctcagcatcaccaccagcccgcatggcaccagcaccaggtccagggaccccttctccagctgcatcgtctcgtctcgtctctcttcaggctttctgctccctagctactaggcttcatttgctattgctttagcatttcgatgctatttcttggttggagttggagttgatctgtgcagactgaactgccctcatggcttgtggcttgcgctttcatttggattgctagt

SEQ ID NO: 3995 - DNA, 2703 bp, Zea Mays
catggcgggtgctggtaccgaccatgccatggcgggtgactcgacgcttggtggtcccgatgccgcgatcggcgggaaacggcgtacccgtcgtgggcagcggaagcgcagggccgggcctggtggtggtcttggcggtgatcctctgctgctatcttccggaaacttgtcgcccgcggctcaggatggtcctcgccctgtgaggtttattgggcggtccaggatgatcgaccgtgctgagttggagcttcgccatgccctgatcgtcagcgttgttgggcaggaaggaactggttgcgccacggaggttagagaggcgctcgcctcaaggtttggccttgatgccgatgcgctccgcctacgtcgtgctgcgccaggttcctttattgtcctcttccctttggaggagctggttgggcgagtgtttagtggaggaccgtcgctctttgtccctccattgaggttgcatattaagagatggactaggcaggcttttgcttcgggaggcagtgtcttgtcttccctcattggcgtcgaactccgtggtatccctgctcacctttggggactggagacagcggaggctttacttggtccatcctgtctgattcagggactacacccggattctatcagcggggaggacttgtcagtcatcaggttgagtgcatggtgccgctctcccgtggagttgcctgaggtgttggaccttcatgctgtggagccagcggtccccaatgaagacggagtttggaatccacgttcgttggtgttccctgtgtttgtgaagattattgggccggagggtgtccttgtggaggagcagctgcagccacctccatcggatccctctgatgatgagccggagcagagtcgtcgggctaggcgggtgcagaggctgggtgatcaggcctcattgcctcggacttcggtgcactcgcggctgggtcctcgtcttcattcctcgtcgacgcgtgttggaccctctgatgatgtggagcttttggatgcatcgatggataacagtgatgttgtggcggcgtctgtctcttcggattcgttggctgaaccagttgatgcccctaccctcccgtgtgctgcggttgagaagctagcggcgcctggtgttctggccttgtgtgatgctgtggttcccgattattctcctgatggtgcctctgctgatttggctgctgagttgagggaggattcgttgttggcagtgagttgtgttgtcaatgcttcttctgctagatggaatttgaagccgcctgtttttaaagtctactccaggaggttgagaccatctattttggatgatcaggatggcccgttggttcagtcgggtcttgataattctatggtgatttcttcgcccttgtgcgagtttcagtgtttggtcactaaaccggtggatgccttgctgccaactccacagattccaaagagaaggaagaagcctctacccagtaattttataccaaggcggagcaggcgggtggccaaatttcctccagaactcggttctgaggctgctgcccaggtctgcaggcatttgggtttctgtgatgataatgaagttatttctgtccaggatgccggtaattatgcgaagctatttgtttctgggctctctagcattcatattgctgctttggcagcgctgtttggctggacggtgccgctgaacgggcctgtttaggtgtggtggggctggtttgctggtggtgtttgatctttgtttagatggattcaagctgttttttaatctggaatgtgagagggctgaatgatcgtgtgaagagagattctgttaaatctttggtggttgatattagaccttcgattatttgcctgcaggaaaccaaactttgttctatttcagattttgatgtgctctcaattttggggtctggtttcagcaattttgtttacagcccagcgattggtaccagaggaggggtactggtatcctggcgcgatggggttttttcatctttggcttcagttatcaagcaattttcggtttcagttagattgcaagagaaaaatggttcttgctggtggttcactggagtgtatggtcctcaccaggacaatcttaaatcctcctttcttcacgaattaagagaaatcagaaatacatgtgttgggggagattttaatctaattttcagggaggaagacaagaacaattccaatattaacagggctatgttgggggacttccgtaggcttattaattctttggatctgaaagagattcatttgaagggaaggaggtatacttggtccaaccagagagatgctccaactcttgttaagctggaccatgtcttttgctctagctgttgggaagatctttttccagacgcttctcttcatagtgatgctaccacatcttcagatcattgtcctttgatcctcaaggttagagagggctgtttggggaaaagacggtttcattttgagagtttctggcccaaatttcctggttttctggaggtggtgggtgcgtcctggagcttgccagttggtggctcatgcccgttggagcaggtgtcatttgaagcttaaaaggttagctcgcgcattgcagtcttgggggcataaagaagtgggtaatgtaaggttgcagctggggcttgtcagagaagtgttgcataggctggaaatggcgcaggatatcagaattttgtccag

SEQ ID NO: 3996 - DNA, 850 bp, Zea Mays
cccgcttttgacgagcagagagaccaccggaaatgtaccgcttcatttgacgccgcactgcactggtcccgagtacagcgctagccctcttcctcttcctcgctatacagtacttcccagcagagcagagagctgagacgaaaacgagaagatcccatccactaccgcccggtcgccgtcctcccttcccgccgcgcccctcctgttccacccgctccgctttgctcgccgcagatcgccctcaggattttattccgccctccgtctccgggctcgcttggatcgagatgggcgtctgcgcgtccaaggccgcctactcctgctgctgctgctgctgctgccgcgagccgcacaacggggttactaacgagaggaccgatgctgtaacggatgacgaggaggcatacgacctgcctgcgttccaggagtttaccttcgagcagttgcggctagctacatcagggtttgcggtggagaacatcgtgtctgagcagggtgagaaggctcccaatgtggtatacaaggggaagctccatgcccagcgccgcatcgccgtcaagcgcttcaaccgctctgcctggcccgacccgcgccagttcctggaagaagctagatcagttggcctgctccgaagcaaaaggttggcaaatttgcttggctgttgctgcgaaggtgatgaaaggttgcttgttgcagaatacatgcccaatgatacgctcgcgaaacatcttttccactgtgagtcctttgaaaacattctatcataaagctgcaaaggcctgatgggcatgattaagtcagggatcagtccacacaagtgactcgatcacgcttcacccgagcctagcct

SEQ ID NO: 3997 - DNA, 489 bp, Zea Mays
ccgccttccatgctgccttttagtaacggatgacgaggaggcatacgacctgcctgcgttccaggagtttaccttcgagcagttgcggctagctacatcagggtttgcggtggagaacatcgtgtctgagcagggtgagaaggctcccaatgtggtatacaaggggaagctccatgcccagcgccgcatcgccgtcaagcgcttcaaccgctctgcctggcccgacccgcgccagttcctggaagaagctagatcagttggcctgctccgaagcaaaaggttggcaaatttgcttggctgttgctgcgaaggtgatgaaaggttgcttgttgcagaatacatgcccaatgatacgctcgcgaaacatcttttccactgtgagtcctttgaaaacattctatcataaagctgcaaaggcctgatgggcatgattaagtcagggatcagtccacacaagtgactcgatcacgcttcacccgagcctagcct

SEQ ID NO: 3998 - DNA, 805 bp, Zea Mays
gctgctcatactcttaagaccgatccgacccaaagccaaacccgattgccctcgtagtcgtttgtcatcgcgcgaccgattaccccgccgccgccgcgtcggcagcggcgatggcgtcgtcgttgtcgcgggcgctgctccgccgcgtcgcagaactggctagaggacgcctccgcgccaaccaccgcatgctctcatccgcgtcgtccaccgccgccatcgagagggcttcgcagttgccggcggaggcccaggccgtgcgcatgacggagggttgcgtgcggatgctgcgcttaagcgttgaagctggtggatgttctgggttccaatattctttcgctcttgatgacaagaaaaatgcagatgacaggttttttgagactgatggtgttagattggtcgtggatgacatctcatataatttcgtaaaaggtgccactgtggattacgaggaggaacttatacgttcaacatttgtggtttcaacaaatcccagtgctgttggaggctgcagttgcaagagttctttcatggtgaaatagcttcaatgttaccttgaagagatcaataaccggagttctgtagcgaaacatacgctttagatctgagtgtacaattggtattttttggtagctcttgagatgtttctttttgagttttattaccttaaagagaacaataaccagaaatatcaatcacaaactgtctggttcaatttgtatctctaacatgtgaaatgatgacaaatttatgtacatgtaatcttatggctattaacatttgactctatgtcgcttttacaaca

SEQ ID NO: 3999 - DNA, 810 bp, Zea Mays
gctgctcatactcttaagaccgatccgacccaaagccaaacccgattgccctcgtagtcgtttgtcatcgcgcgaccgattaccccgccgccgccgcgtcggcagcggcgatggcgtcgtcgttgtcgcgggcgctgctccgccgcgtcgcagaactggctagaggacgcctccgcgccaaccaccgcatgctctcatccgcgtcgtccaccgccgccatcgagagggcttcgcagttgccggcggaggcccaggccgtgcgcatgacggagggttgcgtgcgggtaagatgctgcgcttaagcgttgaagctggtggatgttctgggttccaatattctttcgctcttgatgacaagaaaaatgcagatgacaggttttttgagactgatggtgttagattggtcgtggatgacatctcatataatttcgtaaaaggtgccactgtggattacgaggaggaacttatacgttcaacatttgtggtttcaacaaatcccagtgctgttggaggctgcagttgcaagagttctttcatggtgaaatagcttcaatgttaccttgaagagatcaataaccggagttctgtagcgaaacatacgctttagatctgagtgtacaattggtattttttggtagctcttgagatgtttctttttgagttttattaccttaaagagaacaataaccagaaatatcaatcacaaactgtctggttcaatttgtatctctaacatgtgaaatgatgacaaatttatgtacatgtaatcttatggctattaacatttgactctatgtcgcttttacaaca

SEQ ID NO: 4000 - DNA, 413 bp, Zea Mays
catcgtggtgatcgactccatcgatggcggcaccgtggcggaggccaaactatcgccggcgttggaccctggcatctccgatatcaggtttcaacaaatcccagtgctgttggaggctgcagttgcaagagttctttcatggtgaaatagcttcaatgttaccttgaagagatcaataaccggagttctgtagcgaaacatacgctttagatctgagtgtacaattggtattttttggtagctcttgagatgtttctttttgagttttattaccttaaagagaacaataaccagaaatatcaatcacaaactgtctggttcaatttgtatctctaacatgtgaaatgatgacaaatttatgtacatgtaatcttatggctattaacatttgactctatgtcgcttttacaaca

SEQ ID NO: 4001 - DNA, 1587 bp, Zea Mays
cttcagttcagctacatcagtcaatccacacacgacaccccgcacagccacacgcggccgcgctgggaacgagacttggtcgcagtcgctcccggctcacggctccttgctgcacgccgtatgctgtcgcccgcaccacaagtccacgaccagcactcccttcatagacccccctccggcgaatccctcaccaatccagcgttcacacgtccttcttgcttcagtccactccaaggtggacaatatgtcaagctctaaccagatgtgttctgatggcaagtttgggagaggtcctcgggagcttagtggtgctgtggacttaattagtcgctacaagctgctgaatcatcatagtttcttttgcaagaagcctttgccattggcaatttcagatacaaattaccttaacaatgttgtgggtgacacagaaattcgtaagggggaagggatggagttggaccaactctttcagaactcatgttcaagtgagaagactgcttacattcagccatttgacatggaaacactaggacaagcatttcagctgcgagaaactgcaccagtagacttgccttctgctgaaaaaggtacaccaaccatatctgggaaatccaaggtcaagtccaaggataaagtgaagaaacataagaaacacaaagagaaagatagagacaaggagaaggagcagaagaaacacaaacatcggcataaagatcggagtaaagataaagataaagataaggacaaagacaaagaaaagaaaaaggacaagagtgggaatcatgatttaggtggtgatcattccaagaaacatgagaagaagagaaagcaagaagtaactggaagttcagcaaatgtccaaaatcacaagaaaacacaaaagcacaaaattcagtgaaatttatgatggacttcgttaattgtcagcagtgcatgtttctattttagttcaactccatttatgttgttaatgagtggctctgaagtgttccttttccatatcttttctggcaaagacgcagttatcacagatggaaaatatttaatactacgactgctacagaggaaacaagatacctgtactgatggaatatgagtcgtgtattattccttgggaacttgaacttatcatatggagttgtaaattattttgtcatttcgacttatgttcacttcatcattgccttgtatgatcatgtaattcagagaccgcagagcaaaggtgggctggggcttagggcttatttggaaacaaagtattttaaaactatagttttggaataatatggttttaagatgttatgacataatcgtagtatattttacatgactcttaacaatacatttgtagacaaagtatcttaaactgtgatatttagtatacatgtgcaatgttagttataggcaaaaacttttggttggcgtgaagtttcaagtatcatggtatctacaaaaccatggtatttaaaacagtgttttttataatgtagtcaaacattttttggcaaaaatattatggtattatctaatactatgatttttcttaaaactttaaaaatactttgcttccaaacacctccttacatg

SEQ ID NO: 4002 - DNA, 1451 bp, Zea Mays
cagttcagctacatcagtcaatccacacacgacaccccgcacagccacacgcggccgcgctgggaacgagacttggtcgcagtcgctcccggctcacggctccttgctgcacgccgtatgctgtcgcccgcaccacaagtccacgaccagcactcccttcatagacccccctccggcgaatccctcaccaatccagcgttcacacgtccttcttgcttcagtccactccaaggttaggtggacaatatgtcaagctctaaccagatgtgttctgatggcaagtttgggagagaaattcgtaagggggaagggatggagttggaccaactctttcagaactcatgttcaagtgagaagactgcttacattcagccatttgacatggaaacactaggacaagcatttcagctgcgagaaactgcaccagtagacttgccttctgctgaaaaaggtacaccaaccatatctgggaaatccaaggtcaagtccaaggataaagtgaagaaacataagaaacacaaagagaaagatagagacaaggagaaggagcagaagaaacacaaacatcggcataaagatcggagtaaagataaagataaagataaggacaaagacaaagaaaagaaaaaggacaagagtgggaatcatgatttaggtggtgatcattccaagaaacatgagaagaagagaaagcaagaagtaactggaagttcagcaaatgtccaaaatcacaagaaaacacaaaagcacaaaattcagtgaaatttatgatggacttcgttaattgtcagcagtgcatgtttctattttagttcaactccatttatgttgttaatgagtggctctgaagtgttccttttccatatcttttctggcaaagacgcagttatcacagatggaaaatatttaatactacgactgctacagaggaaacaagatacctgtactgatggaatatgagtcgtgtattattccttgggaacttgaacttatcatatggagttgtaaattattttgtcatttcgacttatgttcacttcatcattgccttgtatgatcatgtaattcagagaccgcagagcaaaggtgggctggggcttagggcttatttggaaacaaagtattttaaaactatagttttggaataatatggttttaagatgttatgacataatcgtagtatattttacatgactcttaacaatacatttgtagacaaagtatcttaaactgtgatatttagtatacatgtgcaatgttagttataggcaaaaacttttggttggcgtgaagtttcaagtatcatggtatctacaaaaccatggtatttaaaacagtgttttttataatgtagtcaaacattttttggcaaaaatattatggtattatctaatactatgatttttcttaaaactttaaaaatactttgcttccaaacacctccttacatg

SEQ ID NO: 4003 - DNA, 1021 bp, Zea Mays
gataatgactggctgaaaaaggtacaccaaccatatctgggaaatccaaggtcaagtccaaggataaagtgaagaaacataagaaacacaaagagaaagatagagacaaggagaaggagcagaagaaacacaaacatcggcataaagatcggagtaaagataaagataaagataaggacaaagacaaagaaaagaaaaaggacaagagtgggaatcatgatttaggtggtgatcattccaagaaacatgagaagaagagaaagcaagaagtaactggaagttcagcaaatgtccaaaatcacaagaaaacacaaaagcacaaaattcagtgaaatttatgatggacttcgttaattgtcagcagtgcatgtttctattttagttcaactccatttatgttgttaatgagtggctctgaagtgttccttttccatatcttttctggcaaagacgcagttatcacagatggaaaatatttaatactacgactgctacagaggaaacaagatacctgtactgatggaatatgagtcgtgtattattccttgggaacttgaacttatcatatggagttgtaaattattttgtcatttcgacttatgttcacttcatcattgccttgtatgatcatgtaattcagagaccgcagagcaaaggtgggctggggcttagggcttatttggaaacaaagtattttaaaactatagttttggaataatatggttttaagatgttatgacataatcgtagtatattttacatgactcttaacaatacatttgtagacaaagtatcttaaactgtgatatttagtatacatgtgcaatgttagttataggcaaaaacttttggttggcgtgaagtttcaagtatcatggtatctacaaaaccatggtatttaaaacagtgttttttataatgtagtcaaacattttttggcaaaaatattatggtattatctaatactatgatttttcttaaaactttaaaaatactttgcttccaaacacctccttacatg

SEQ ID NO: 4004 - DNA, 1759 bp, Zea Mays
cgctgctccgttgttggtgaaacacgcttccaaagccggcttgtgcgcacgcggcacgcaacaccgcttccgcccttttctgatttctccatcggactccgatgccgaaccccaaacaccgcttccgccctttctgtttaccaaatccacacggtcccttataaaaacaaaaacaaaacaaatccacacggccccaatccacacccgcgtgccgccgccgccgccgccctcctttctgataaacgccctccccatcggcgtatggccattgaccacatcgtccgcgccgccctccgccaccgaggaaaccgcaagcagtcatcagcaatgccgccgtacgcaccgagagagcagcggcacgacgggccgccaggggaagtcccgccgatgagcgccaaggacgtgaccgccatcgaagccctcctcggatactgcttcatcgacaaatctcttgtcgagctggcgctgacgcatggctccttctactggcccaaccgccccggggatacctacgagcgcctcgagtacctcggcgacggcgtcctcacctgcctcatgtcgcgcgaggtcttccgcacctaccgcacgctccagcccggcccgctcacaaggctccgcgccgctaacgtcgacactgagaagctcgcgcgcgttgccgtccaccgcgggctccaccgctttttgagacacaaggcacctaaacttcaagatcagatctgttttttcatagaagaaatgcgcaaatatccagttcactcaaatggactattggatcctcctaaagttctgtgtgacattgtggaatctcttattggtgccatatacttggactccaacttcgaccaagaggaggtctttcgaacattggctgatccacttattggcttagagacattaggcaagcaccctgtaagcgagctttttgagttttgccaaaagactcaccgaggggtgaaatttctgaaagacgaatgggataagagtttgaaggttcaggtgttgattgatggtgaggtagttggaagtgctatttatggtccaaagaaggagatagctcagaaccgtgctgcgaaggatgctctggataagctaaaggacacacatggacacacccaaagtgaatcagcatcagtagatgtttctgaggcattggacgaattagacaacacccaaagtgaatcagcatcagtagatgtttctgaggcattggacgaattagacatagctggaacactaaattgagtgacatatatagaaatgcataataggtgcaattaatggcaatgaagttttgaatcatagcaacacttggttggtccattttcattgaatttctgtgttgctatgtaattatctctactatatgaaaataccagttttcatggttccatggtttctaccatcaaagtgctccataatatttaggtaaaaagggtaaaattataggtatatgagaattcgaactatggtcgttggctccaaacccatatatatacccacctagttaacaacagaacacgtataaataaaaaaaacgtagttttgtacgtgcactttgctagtcgatattcaaacaccggttaccatcaattttgatgacaaactacaaagaaattgttcattcgatttaatttcaaggctaacctttaattttgaagtgcatcaggaaacgcaacccgataatatgttctgtatcgcaaggagtgatgctccgagaagggactgtttgaatcagacatgtgactgattttgctagcat

SEQ ID NO: 4005 - DNA, 1077 bp, Zea Mays
tgacagtttgtatactagatcagatctgttttttcatagaagaaatgcgcaaatatccagttcactcaaatggactattggatcctcctaaagttctgtgtgacattgtggaatctcttattggtgccatatacttggactccaacttcgaccaagaggaggtttggcgggtctttcgaacattggctgatccacttattggcttagagacattaggcaagcaccctgtaagcgagctttttgagttttgccaaaagactcaccgaggggtgaaatttctgaaagacgaatgggataagagtttgaaggttcaggtgttgattgatggtgaggtagttggaagtgctatttatggtccaaagaaggagatagctcagaaccgtgctgcgaaggatgctctggataagctaaaggacacacatggacacacccaaagtgaatcagcatcagtagatgtttctgaggcattggacgaattagacaacacccaaagtgaatcagcatcagtagatgtttctgaggcattggacgaattagacatagctggaacactaaattgagtgacatatatagaaatgcataataggtgcaattaatggcaatgaagttttgaatcatagcaacacttggttggtccattttcattgaatttctgtgttgctatgtaattatctctactatatgaaaataccagttttcatggttccatggtttctaccatcaaagtgctccataatatttaggtaaaaagggtaaaattataggtatatgagaattcgaactatggtcgttggctccaaacccatatatatacccacctagttaacaacagaacacgtataaataaaaaaaacgtagttttgtacgtgcactttgctagtcgatattcaaacaccggttaccatcaattttgatgacaaactacaaagaaattgttcattcgatttaatttcaaggctaacctttaattttgaagtgcatcaggaaacgcaacccgataatatgttctgtatcgcaaggagtgatgctccgagaagggactgtttgaatcagacatgtgactgattttgctagcat

SEQ ID NO: 4006 - DNA, 2632 bp, Zea Mays
gttttttggtatttcgattcggtatacagtgaaaaccgtttacgataccgaacttcatagatacaaaaaccgaaaccaaaccgaactaccaaaaaaccaaaattttggttcggttcagtacggttcggttcggtttatggtaaaaaagtgcccacccctaatgtggatgtaggcctcggccgaactacgagataaatcgccgtgtctcattgtccacttacttgcattgcaactttgttcttccgagctctccacttcagtttcattattgttctagtttcaatacacatcttgtgagagtaaattaagtgaagaaattgtaacaccttaaatttgggggtataaaatttcttctctaacatctaccaaattcaggtgttactttctttagtatattaaaaatctaggggagatatgaaatgttgcatcatgctgagcttaaattttgttttttattgatgcacatgtttgaaatattcaaatttgaatttgtggtttggttggatttgaattcaatagagaaaataaaaagaaaagggaatagaaatttcagaataaaagaaaaagccaaaacagcccaagacgccctctccctcggccttttcggtccagtcggctcatctcgcccgcgcgagcgcccgcacgatctctctgtgcggtgggacccgcctatcggcgtcattcttctcttcccccacgcgcccgttgcgccatctccctcttccagcccggtcccacatgttggcgctacccgctcaccctcgcgctgtggcagaacctcccaagttattgggcccacatgcacctgcccttgtttcaaagacctcagacggctatgcatatgcaccagataacttaacaggatctgtccgagtgtcccagggaccccggataaaccacgaacaaccaggatcacaagattaagtaaacacaaatcacacaccaacattttgcagcggaaatctttttaccaaattttacaagttacatcaagttttacattatatttatcggagtggttacagaagtggttcaaagaaataactttaaactattataaattatttatagttttaaaatatatgctagctcaagtgaacatcctcaataagaagtatagaagagttacttagacttataagaaggccgagcccaccggcacttaacaccatcaacagcagcacaaagttaaaacctaaaaaacaacagggaataaaaccctgagtatggaattactcatcaagacttacccgactaaagaaaagactctcaaggatatgctggctagagggattcaaggtatggcttatcaagaattaaagactctgttttgcagaaaagcttactagaagtgggtccttaagccaaaattttacatcacaagttaaattacttttccttaatctagatttgcctaatctagagcattcacttgtcctacactagcttttttttaaaatccaacctttgtttcgcttgttatctacgatgagggtcgaagatccagtcttcatatccgagaagttcggcgatccgaatcgattaatacccagctggggatctccaaccacacgacatatgcttctcttaactcttttgcacatgtctaccattcccacggatcctccaccacatgaacaggtccgcgccacccgagagcacaccaccccttttaggcggtcctttgccaggagggtacgtgccactctcgccatctctccactcccagtgcgcgattgtcttttcatgtatggaatagccgggttcaagcttacccatgatgaggtatgtggccagataaagggtcctagatcagcaggccaacaatcggtacggtccttaaacgactcagacgaagacactacaccgagactcctttctcgtgcaagtcacccgcccggtctcagctttattatttaaacccaaagtttggtacctggcagaggtacatcttttccgatgttgaatccatcatggccatgatggatccaccatcaagtttttatttttgaaaatatcccatcccacttgaagcatcaccttttgttttaaaacaaaacattttgtttttctagagcaaggctaagcatcaaaaaattcttttcaaaacgggtatcaaggaagggtaatcaattttcaaggaaggaaatgcatcaacggtttaacacacaactcctatcacctaatgcatcaaacaaggtgataaagattttaaaacacaaggaggtggcgaatgcaccggggcttgcctgggtaacactaggttagtgttgttagacgacaaccacttgacgatcagccttttgtgttggcattgttcagattatccatcttccggttcgtccatcagcatcatcccgcggattagcccacgcttgaggtcgacttggctcgtcttccgcatcgcgcgattaattaacgtacctgaatggaatgcattatgcacatgaatgcatatcgacaagaatatcacacacctaaatagtgctacgcgatagcgaataaaacacctagcggcgaggggttgtaccgttttattcggaaacactagttatcaggtatgactaagcgcaataattacgctcctcgaacctatcgcaaacatcacgaacaacgactatacacattaaat

SEQ ID NO: 4007 - DNA, 2916 bp, Zea Mays
ctcggccaaatcctcactgctcagcccaggaaacaaccccacaccacgaggcccactgcactgctcctacctctctgaaacatgtcgcacgcgcccggacacagacatgagggcccgcgcgttagcaggtgtattcacccggcgtagtcggtcgcggaatgagctgggaaagggacgaacggaattctcggatttcggctgagatttccccctctcccgcgtatataacttggtgccgatcttctccaccgattaacgagcccgcagatctacaattcgtcacagcgagaggagaagagaaccctagttggccgcgccgtgagggagaaaacgggtcttggcctatcttcgtcgcgccatcaaccgggctcttgtattgtgccttggcgcttcccctagcttgtgggagggtgtccgaagccgcgccctctggaatccttgcccgcgtcttcggaattgctcgccgttgccaatgcgccgccgcgaaaccggtgtctactgtgggcaaggcagggcactactcgaccctcgggcgtttggggcgccgaatcagctgcgcgccggtgaggtttccgtcatggggccggtggctctcaccgccgtggtgggaaccaaagaggatgacgacagtgctgcctttgatcggctataaaaggagatactagttaaatggctcgctaagccaaattttaactattcaacagcaaaataactctccaacatattatctatctgactcgccaagccatccgactctccaaattggctctcttactagccaaatttggctagccacctgactagcaaaactagatagatagtctgttggagtgagatgctatatatagaatgtaatttttatgaaattacaaatagtgagtcaaatagagagccaaaaataaagagtctcctgaagatgctctaagacggctaggattagatctcataataccctttcgcgaacatgatcaacatcgttggatcttagttggagtgtggggatttgatcttgcggctttaaaacctgggtcgtggatctttgatcgcacaaccagggtcgcgtacacgtttgctgaaactcacttctaatctcagcgctcggttggtgatctgacgactctgattgcgccatacccctttggcctcgacaatttgctaaagagccccctctattttatcataatcaacccaccgtccactgctatactaaactagttactatcaggtcatgttttattcggttaagcccttagtctttgggaaaatggtacccgcagtccagagtattgatttataaaaaataaaatccaaggagataatttttagtgtaaaaataattccaaaaacctaaataaattcatatcttactcatttcaactccgaatcgacccgctcaagtcgcattagctccgtaatgaaatttctcactcagtaacaacattatctttatcatgtcatacattttttatagttagatatttattcacccaatgttttatagttagattaaagcttgctaatcaaagttaatctatctatgattataatctaactgaaatataatctataagcaagtcataacttggattaaagttgaattagttatttcttcaatatcttttctcatataatttacattaatcaacatagaatatagttttattatctaatcacgaaattcttcagaaaactataccttttgaaccataactctgaatttagtagttctcgaacatatgatctcgtagtagagcatagaatattcttacgatgtttgttcttatgtttggtgtaatgttttttcatgtactccttgtctatttgtatgaattgctacgaatagaagcgagatcacgagaaacccgaagatcaacttggtgaagtacttgggatctcaagtctaaggcaagttgtgcccttgatcacttttctctacctaataatgatcctgttaatcactgtgacatgctcagattaatttgatgggacctaataggtttccctagtattgtttatcctacaccttgcaaacaaatgaactattgggtagatttgctattgctctatctggttttgggaaattaatgttatatatgatcatgttccattaatactattggtttaattattattcttgataagattattatattaattggaacatggagacgcacccgggtttggccccttaaatccgggtatgacactactgctaccatatctcgtctcctcggtagatatcaatgtgaactcacggtcccttggcaaatgggtaacaaggactgtgggtaaatatgtgtaacctccatataatgtaaaactgatatatcaatcgtgctcacagtcatgagcggctcaaatcctcacatgagtaatttatggaattgaatttaacctgtcatacgttgtattgcattgtgggatttattcgtcactgtgatcaattatttaattgggttgatatatatttatacttagtaatgctaagagaattttgaccaacttattaaaagcaaagctcagccttgaccatttttccttggtattccttacactatacatgagcccccaccataagtgagctcatgcacattattcccgacacttactgagtggtgatcgtatgggagctcacccttgctatattcatatcaggtcaagaacaggtaccaccaagatgaggagcatgaaggatgctacgatgagatcggagaggtctagaacgttatctcctagtcaactatagttgtggacgatcattgtcgccatatgatgtattttatttagttattttgtacagaagttgtattaagtaataaatgtgacattgttttctatacactaagtcatcatatgtgtgagatttgatcttatcacaaatttgagacgcatataaatttgtccttaaatttagat

SEQ ID NO: 4008 - DNA, 1604 bp, Zea Mays
ctcggccaaatcctcactgctcagcccaggaaacaaccccacaccacgaggcccactgcactgctcctacctctctgaaacatgtcgcacgcgcccggacacagacatgagggcccgcgcgttagcaggtgtattcacccggcgtagtcggtcgcggaatgagctgggaaagggacgaacggaattctcggatttcggctgagatttccccctctcccgcgtatataacttggtgccgatcttctccaccgattaacgagcccgcagatctacaattcgtcacagcgagaggagaagagaaccctagttggccgcgccgtgagggagaaaacgggtcttggcctatcttcgtcgcgccatcaaccgggctcttgtattgtgccttggcgcttcccctagcttgtgggagggtgtccgaagccgcgccctctggaatccttgcccgcgtcttcggaattgctcgccgttgccaatgcgccgccgcgaaaccggtgtctactgtgggcaaggcagggcactactcgaccctcgaagcgagatcacgagaaacccgaagatcaacttggtgaagtacttgggatctcaagtctaaggcaagttgtgcccttgatcacttttctctacctaataatgatcctgttaatcactgtgacatgctcagattaatttgatgggacctaataggtttccctagtattgtttatcctacaccttgcaaacaaatgaactattgggtagatttgctattgctctatctggttttgggaaattaatgttatatatgatcatgttccattaatactattggtttaattattattcttgataagattattatattaattggaacatggagacgcacccgggtttggccccttaaatccgggtatgacactactgctaccatatctcgtctcctcggtagatatcaatgtgaactcacggtcccttggcaaatgggtaacaaggactgtgggtaaatatgtgtaacctccatataatgtaaaactgatatatcaatcgtgctcacagtcatgagcggctcaaatcctcacatgagtaatttatggaattgaatttaacctgtcatacgttgtattgcattgtgggatttattcgtcactgtgatcaattatttaattgggttgatatatatttatacttagtaatgctaagagaattttgaccaacttattaaaagcaaagctcagccttgaccatttttccttggtattccttacactatacatgagcccccaccataagtgagctcatgcacattattcccgacacttactgagtggtgatcgtatgggagctcacccttgctatattcatatcaggtcaagaacaggtaccaccaagatgaggagcatgaaggatgctacgatgagatcggagaggtctagaacgttatctcctagtcaactatagttgtggacgatcattgtcgccatatgatgtattttatttagttattttgtacagaagttgtattaagtaataaatgtgacattgttttctatacactaagtcatcatatgtgtgagatttgatcttatcacaaatttgagacgcatataaatttgtccttaaatttagat

SEQ ID NO: 4009 - DNA, 773 bp, Zea Mays
ctcagcccaggaaacaaccccacaccacgaggcccactgcactgctcctacctctctgaaacatgtcgcacgcgcccggacacagacatgagggcccgcgcgttagcaggtgtattcacccggcgtagtcggtcgcggaatgagctgggaaagggacgaacggaattctcggatttcggctgagatttccccctctcccgcgtatataacttggtgccgatcttctccaccgattaacgagcccgcagatctacaattcgtcacagcgagaggagaagagaaccctagttggccgcgccgtgagggagaaaacgggtcttggcctatcttcgtcgcgccatcaaccgggctcttgtattgtgccttggcgcttcccctagcttgtgggagggtgtccgaagccgcgccctctggaatccttgcccgcgtcttcggaattgctcgccgttgccaatgcgccgccgcgaaaccggtgtctactgtgggcaaggcagggcactactcgaccctcggtcaagaacaggtaccaccaagatgaggagcatgaaggatgctacgatgagatcggagaggtctagaacgttatctcctagtcaactatagttgtggacgatcattgtcgccatatgatgtattttatttagttattttgtacagaagttgtattaagtaataaatgtgacattgttttctatacactaagtcatcatatgtgtgagatttgatcttatcacaaatttgagacgcatataaatttgtccttaaatttagat

SEQ ID NO: 4010 - DNA, 3132 bp, Zea Mays
cttttttggccggaaacaatcctggcctcaagaggccagacaattctcccgactcgcctccgacggacgccagccgcaacgccgcgaaccccatcctcgggagcctctcctccgacggtcgatggcccggctccctgacgccatcctcgcaacgccaaccccagcctcgagaccgtcatctccgacgccatccccaagtgcctccgccgctgctccacatcctcttcccctctacaaggtgattctgatatcatcaagactacaccaggtgagcagtaaaagagtggtggcagtacatcctctctagagttgttactcaggtttgtatgttggcagcagtatgctcctagttaccttctaaagtttctcctaatttctcaatgggtttgtgataacttgccttttgttcttagtttcatgagtcatatatatatatatatataagagctatctccatgttttgcatgcttaagttccttataagagctatctccacttctctatatatgggttcttgggagcagcaagttagacaatttttgttagatgaggaagaagatgatgatgagttgttctttgctattctccctgctataattccatatctctcagaagagaaagagcccatccacacctcctcactcactggtgctaaaaaggttagagaaattcttgaaggacatgagagttggtgcaaatctgagtttcaaatggagccagcaatattcgaaaccacaacaaattttcttagaagagagaatttactacgagacacacgaggagttatcgttgagaagcagcttgggatgttcatgtacatgatctccaacaatgctagtaaccaaatgctacagaaggcttttcaacatagtggagagactatccataggaaaatatctgaagtatttgatatagttcccacactaactcaatgttttgtgaagcttcctagctctatccaaactcacaccaaaattgctacagattctaggttcatgccatttttagaactgcattggtgcaatcgacggcacacatatacccaccaccatagcagaacatagggcccctccatatagaaacatgaaaggaactctttcacacaatgttatggtagcctgcgactttgacctcaatttcacatttgtttcatgtggatgggaggggtcagcctcagatgcaggggtgcttcgatctgctattagcaaaggatttagtgtgccagaaggaaagttttatgtagtagatggtgggtatgcaaatacatcatccttcattgcaccatatagaggggttcgataccatctcaatgagtttaggaggcgtcgttcatcacaaagtggttatgcgaactacaaagagctgttcaaccatcgccatgcaattctctgtaaccatatagagagggccatcgatgttctaaagaaaaggttcccgattctaaaagtaggcacatttcgtcccatagagaaccaaatcaagatcgcaactgcaactattgcatttcacaacataattagagggcaaaatggagacaaaagatggcttgacaaccaaccagattacatctctccaagtcaatatgttgatgtcccagagggagataccaactatctcaatgacacagaatcaagtgatggaagctctctaagagatcagatcacacttcagatgtgggctgcctacaatagctagatgggtgcttataatggcttctagtttgtcatgtagctagttgcctagttcgtcggttatgtactattattacttatgaagtctttatggtttgtagtttgtcatgtagctagttgctgagttcatttgttatgtacaattattacttatgaacttaaagtagcctatttatgaacttaaaattacctagttatgtactattatttccacaatttcagttttgaaaaaaggatgatttggaacaatgtgtatgagaaaggcttatttgatgtgatgcatgatcacaaagataatccaaaattcaaaggtcaaaatggttggaatcgtgatggatggaatagtatcactacgaagttcaatggaaagttccctctagctcatttctctaaacaacaaccacaagagaaggagagagagcttaaaggatactacaaggcaataagggattcaagaaaaaaaaagcggggctggttggaatgacactctatgcatggtactggccaaaccagaagtttggccatggctgattcgtgctcacccaaaagtatcaaagtttcgcaacaagccattccctcttttttacagtttagaagggctatatgaaggtagtgtggctatcggagagttaaatttcacatcaactgcttttgatcttcctccaccttcagctccatctaggagtgtgtctggacaaagtccaaatcccttgagtactaattcacttgatttggatggacaagaaaccacaagtgtgttcaatctgtctactaatgctcactctgtcccagtcagtactaatgaacccaccgaagctcagtttgtcccatctaatcaagaatcaagccaaagagaaggtgccagtgggagaaagcgtaagcaaagccatgttggattagccttgaaagttatgtggagtttaaaaagatcaattttctattagcaagtgtcaggctgaattgaaagaaatggatggattaacagtcgtggacaaatcatatgctttggagcttttcgtatctacgacaaacagagagattttcttaacaacaacagagcatgatgttagagaaatttggctcaagcacaaaattaggttgcttcatggcagtgatgcatggcctggacaattgatatgaggaaatttgagtgcaaagtgaaagcaactcatggagccgacatggagaagaaaaatgcaacgacagtctacatgaagcttgtgaaaaaagagttaaatctcaaagttcataataaagagacttgtattacagttttatgttatattgtttatctttttgtgatggatggatgtattacagttttagtttgttgttgcttcagtttgctgcccatacttcagtttgcttgacaaactattgtgatgatggataaagcgtgatgtgatgacggccaaccagtttactacttcagtttgctttc

SEQ ID NO: 4011 - DNA, 3128 bp, Zea Mays
cttttttggccggaaacaatcctggcctcaagaggccagacaattctcccgactcgcctccgacggacgccagccgcaacgccgcgaaccccatcctcgggagcctctcctccgacggtcgatggcccggctccctgacgccatcctcgcaacgccaaccccagcctcgagaccgtcatctccgacgccatccccaagtgcctccgccgctgctccacatcctcttcccctctacaaggtgattctgatatcatcaagactacaccaggtgagcagtaaaagagtggtggcagtacatcctctctagagttgttactcaggtttgtatgttggcagcagtatgctcctagttaccttctaaagtttctcctaatttctcaatgggtttgtgataacttgccttttgttcttagtttcatgagtcatatatatatatatatataagagctatctccatgttttgcatgcttaagttccttataagagctatctccacttctctatatatgggttcttgggagcagcaagttagacaatttttgttagatgaggaagaagatgatgatgagttgttctttgctattctccctgctataattccatatctctcagaagagaaagagcccatccacacctcctcactcactggtgctaaaaaggttagagaaattcttgaaggacatgagagttggtgcaaatctgagtttcaaatggagccagcaatattcgaaaccacaacaaattttcttagaagagagaatttactacgagacacacgaggagttatcgttgagaagcagcttgggatgttcatgtacatgatctccaacaatgctagtaaccaaatgctacagaaggcttttcaacatagtggagagactatccataggaaaatatctgaagtatttgatatagttcccacactaactcaatgttttgtgaagcttcctagctctatccaaactcacaccaaaattgctacagattctaggttcatgccatttttagaactgcattggtgcaatcgacggcacacatatacccaccaccatagcagaacatagggcccctccatatagaaacatgaaaggaactctttcacacaatgttatggtagcctgcgactttgacctcaatttcacatttgtttcatgtggatgggaggggtcagcctcagatgcaggggtgcttcgatctgctattagcaaaggatttagtgtgccagaaggaaagttttatgtagtagatggtgggtatgcaaatacatcatccttcattgcaccatatagaggggttcgataccatctcaatgagtttaggaggcgtcgttcatcacaaagtggttatgcgaactacaaagagctgttcaaccatcgccatgcaattctctgtaaccatatagagagggccatcgatgttctaaagaaaaggttcccgattctaaaagtaggcacatttcgtcccatagagaaccaaatcaagatcgcaactgcaactattgcatttcacaacataattagagggcaaaatggagacaaaagatggcttgacaaccaaccagattacatctctccaagtcaatatgttgatgtcccagagggagataccaactatctcaatgacacagaatcaagtgatggaagctctctaagagatcagatcacacttcagatgtgggctgcctacaatagctagatgggtgcttataatggcttctagtttgtcatgtagctagttgcctagttcgtcggttatgtactattattacttatgaagtctttatggtttgtagtttgtcatgtagctagttgctgagttcatttgttatgtacaattattacttatgaacttaaagtagcctatttatgaacttaaaattacctagttatgtactattatttccacaatttcagttttgaaaaaaggatgatttggaacaatgtgtatgagaaaggcttatttgatgtgatgcatgatcacaaagataatccaaaattcaaaggtcaaaatggttggaatcgtgatggatggaatagtatcactacgaagttcaatggaaagttccctctagctcatttctctaaacaacaaccacaagagaaggagagagagcttaaaggatactacaaggcaataagggattcaagaaaaaaaaagcggggctggttggaatgacactctatgcatggtactggccaaaccagaagtttggccatggctgattcgtgctcacccaaaagtatcaaagtttcgcaacaagccattccctcttttttacagtttagaagggctatatgaagtgtggctatcggagagttaaatttcacatcaactgcttttgatcttcctccaccttcagctccatctaggagtgtgtctggacaaagtccaaatcccttgagtactaattcacttgatttggatggacaagaaaccacaagtgtgttcaatctgtctactaatgctcactctgtcccagtcagtactaatgaacccaccgaagctcagtttgtcccatctaatcaagaatcaagccaaagagaaggtgccagtgggagaaagcgtaagcaaagccatgttggattagccttgaaagttatgtggagtttaaaaagatcaattttctattagcaagtgtcaggctgaattgaaagaaatggatggattaacagtcgtggacaaatcatatgctttggagcttttcgtatctacgacaaacagagagattttcttaacaacaacagagcatgatgttagagaaatttggctcaagcacaaaattaggttgcttcatggcagtgatgcatggcctggacaattgatatgaggaaatttgagtgcaaagtgaaagcaactcatggagccgacatggagaagaaaaatgcaacgacagtctacatgaagcttgtgaaaaaagagttaaatctcaaagttcataataaagagacttgtattacagttttatgttatattgtttatctttttgtgatggatggatgtattacagttttagtttgttgttgcttcagtttgctgcccatacttcagtttgcttgacaaactattgtgatgatggataaagcgtgatgtgatgacggccaaccagtttactacttcagtttgctttc

SEQ ID NO: 4012 - DNA, 2942 bp, Zea Mays
cttttttggccggaaacaatcctggcctcaagaggccagacaattctcccgactcgcctccgacggacgccagccgcaacgccgcgaaccccatcctcgggagcctctcctccgacggtcgatggcccggctccctgacgccatcctcgcaacgccaaccccagcctcgagaccgtcatctccgacgccatccccaagtgcctccgccgctgctccacatcctcttcccctctacaaggtgattctgatatcatcaagactacaccaggtgagcagtaaaagagtggtggcagtacatcctctctagagttgttactcaggaagagaaagagcccatccacacctcctcactcactggtgctaaaaaggttagagaaattcttgaaggacatgagagttggtgcaaatctgagtttcaaatggagccagcaatattcgaaaccacaacaaattttcttagaagagagaatttactacgagacacacgaggagttatcgttgagaagcagcttgggatgttcatgtacatgatctccaacaatgctagtaaccaaatgctacagaaggcttttcaacatagtggagagactatccataggaaaatatctgaagtatttgatatagttcccacactaactcaatgttttgtgaagcttcctagctctatccaaactcacaccaaaattgctacagattctaggttcatgccatttttaggtgagctatcaatttgaaacacacaattcgcttaagtgtttccctttcattgacagtttaccacatggcctcaatatctttccttattcttttccttgcagaactgcattggtgcaatcgacggcacacatatacccaccaccatagcagaacatagggcccctccatatagaaacatgaaaggaactctttcacacaatgttatggtagcctgcgactttgacctcaatttcacatttgtttcatgtggatgggaggggtcagcctcagatgcaggggtgcttcgatctgctattagcaaaggatttagtgtgccagaaggaaagttttatgtagtagatggtgggtatgcaaatacatcatccttcattgcaccatatagaggggttcgataccatctcaatgagtttaggaggcgtcgttcatcacaaagtggttatgcgaactacaaagagctgttcaaccatcgccatgcaattctctgtaaccatatagagagggccatcgatgttctaaagaaaaggttcccgattctaaaagtaggcacatttcgtcccatagagaaccaaatcaagatcgcaactgcaactattgcatttcacaacataattagagggcaaaatggagacaaaagatggcttgacaaccaaccagattacatctctccaagtcaatatgttgatgtcccagagggagataccaactatctcaatgacacagaatcaagtgatggaagctctctaagagatcagatcacacttcagatgtgggctgcctacaatagctagatgggtgcttataatggcttctagtttgtcatgtagctagttgcctagttcgtcggttatgtactattattacttatgaagtctttatggtttgtagtttgtcatgtagctagttgctgagttcatttgttatgtacaattattacttatgaacttaaagtagcctatttatgaacttaaaattacctagttatgtactattatttccacaatttcagttttgaaaaaaggatgatttggaacaatgtgtatgagaaaggcttatttgatgtgatgcatgatcacaaagataatccaaaattcaaaggtcaaaatggttggaatcgtgatggatggaatagtatcactacgaagttcaatggaaagttccctctagctcatttctctaaacaacaaccacaagagaaggagagagagcttaaaggatactacaaggcaataagggattcaagaaaaaaaaagcggggctggttggaatgacactctatgcatggtactggccaaaccagaagtttggccatggctgattcgtgctcacccaaaagtatcaaagtttcgcaacaagccattccctcttttttacagtttagaagggctatatgaaggtagtgtggctatcggagagttaaatttcacatcaactgcttttgatcttcctccaccttcagctccatctaggagtgtgtctggacaaagtccaaatcccttgagtactaattcacttgatttggatggacaagaaaccacaagtgtgttcaatctgtctactaatgctcactctgtcccagtcagtactaatgaacccaccgaagctcagtttgtcccatctaatcaagaatcaagccaaagagaaggtgccagtgggagaaagcgtaagcaaagccatgttggattagccttgaaagttatgtggagtttaaaaagatcaattttctattagcaagtgtcaggctgaattgaaagaaatggatggattaacagtcgtggacaaatcatatgctttggagcttttcgtatctacgacaaacagagagattttcttaacaacaacagagcatgatgttagagaaatttggctcaagcacaaaattaggttgcttcatggcagtgatgcatggcctggacaattgatatgaggaaatttgagtgcaaagtgaaagcaactcatggagccgacatggagaagaaaaatgcaacgacagtctacatgaagcttgtgaaaaaagagttaaatctcaaagttcataataaagagacttgtattacagttttatgttatattgtttatctttttgtgatggatggatgtattacagttttagtttgttgttgcttcagtttgctgcccatacttcagtttgcttgacaaactattgtgatgatggataaagcgtgatgtgatgacggccaaccagtttactacttcagtttgctttc

SEQ ID NO: 4013 - DNA, 1487 bp, Zea Mays
cttttttggccggaaacaatcctggcctcaagaggccagacaattctcccgactcgcctccgacggacgccagccgcaacgccgcgaaccccatcctcgggagcctctcctccgacggtcgatggcccggctccctgacgccatcctcgcaacgccaaccccagcctcgagaccgtcatctccgacgccatccccaagtgcctccgccgctgctccacatcctcttcccctctacaaggtgattctgatatcatcaagactacaccagttttgaaaaaaggatgatttggaacaatgtgtatgagaaaggcttatttgatgtgatgcatgatcacaaagataatccaaaattcaaaggtcaaaatggttggaatcgtgatggatggaatagtatcactacgaagttcaatggaaagttccctctagctcatttctctaaacaacaaccacaagagaaggagagagagcttaaaggatactacaaggcaataagggattcaagaaaaaaaaagcggggctggttggaatgacactctatgcatggtactggccaaaccagaagtttggccatggctgattcgtgctcacccaaaagtatcaaagtttcgcaacaagccattccctcttttttacagtttagaagggctatatgaaggtagtgtggctatcggagagttaaatttcacatcaactgcttttgatcttcctccaccttcagctccatctaggagtgtgtctggacaaagtccaaatcccttgagtactaattcacttgatttggatggacaagaaaccacaagtgtgttcaatctgtctactaatgctcactctgtcccagtcagtactaatgaacccaccgaagctcagtttgtcccatctaatcaagaatcaagccaaagagaaggtgccagtgggagaaagcgtaagcaaagccatgttggattagccttgaaagttatgtggagtttaaaaagatcaattttctattagcaagtgtcaggctgaattgaaagaaatggatggattaacagtcgtggacaaatcatatgctttggagcttttcgtatctacgacaaacagagagattttcttaacaacaacagagcatgatgttagagaaatttggctcaagcacaaaattaggttgcttcatggcagtgatgcatggcctggacaattgatatgaggaaatttgagtgcaaagtgaaagcaactcatggagccgacatggagaagaaaaatgcaacgacagtctacatgaagcttgtgaaaaaagagttaaatctcaaagttcataataaagagacttgtattacagttttatgttatattgtttatctttttgtgatggatggatgtattacagttttagtttgttgttgcttcagtttgctgcccatacttcagtttgcttgacaaactattgtgatgatggataaagcgtgatgtgatgacggccaaccagtttactacttcagtttgctttc

SEQ ID NO: 4014 - DNA, 1539 bp, Zea Mays
cttttttggccggaaacaatcctggcctcaagaggccagacaattctcccgactcgcctccgacggacgccagccgcaacgccgcgaaccccatcctcgggagcctctcctccgacggtcgatggcccggctccctgacgccatcctcgcaacgccaaccccagcctcgagaccgtcatctccgacgccatccccaagtgcctccgccgctgctccacatcctcttcccctctacaaggtgattctgatatcatcaagactacaccaggtgagcagtaaaagagtggtggcagtacatcctctctagagttgttactcagttttgaaaaaaggatgatttggaacaatgtgtatgagaaaggcttatttgatgtgatgcatgatcacaaagataatccaaaattcaaaggtcaaaatggttggaatcgtgatggatggaatagtatcactacgaagttcaatggaaagttccctctagctcatttctctaaacaacaaccacaagagaaggagagagagcttaaaggatactacaaggcaataagggattcaagaaaaaaaaagcggggctggttggaatgacactctatgcatggtactggccaaaccagaagtttggccatggctgattcgtgctcacccaaaagtatcaaagtttcgcaacaagccattccctcttttttacagtttagaagggctatatgaaggtagtgtggctatcggagagttaaatttcacatcaactgcttttgatcttcctccaccttcagctccatctaggagtgtgtctggacaaagtccaaatcccttgagtactaattcacttgatttggatggacaagaaaccacaagtgtgttcaatctgtctactaatgctcactctgtcccagtcagtactaatgaacccaccgaagctcagtttgtcccatctaatcaagaatcaagccaaagagaaggtgccagtgggagaaagcgtaagcaaagccatgttggattagccttgaaagttatgtggagtttaaaaagatcaattttctattagcaagtgtcaggctgaattgaaagaaatggatggattaacagtcgtggacaaatcatatgctttggagcttttcgtatctacgacaaacagagagattttcttaacaacaacagagcatgatgttagagaaatttggctcaagcacaaaattaggttgcttcatggcagtgatgcatggcctggacaattgatatgaggaaatttgagtgcaaagtgaaagcaactcatggagccgacatggagaagaaaaatgcaacgacagtctacatgaagcttgtgaaaaaagagttaaatctcaaagttcataataaagagacttgtattacagttttatgttatattgtttatctttttgtgatggatggatgtattacagttttagtttgttgttgcttcagtttgctgcccatacttcagtttgcttgacaaactattgtgatgatggataaagcgtgatgtgatgacggccaaccagtttactacttcagtttgctttc

SEQ ID NO: 4015 - DNA, 1475 bp, Zea Mays
ttttttggccggaaacaatcctggcctcaagaggccagacaattctcccgactcgcctccgacggacgccagccgcaacgccgcgaaccccatcctcgggagcctctcctccgacggtcgatggcccggctccctgacgccatcctcgcaacgccaaccccagcctcgagaccgtcatctccgacgccatccccaagtgcctccgccgctgctccacatcctcttcccctctacaaggtgattctgatatcatcaagactacaccaggtgagcagtaaaagagtggtggcagtacatcctctctagagttgttactcagttttgaaaaaaggatgatttggaacaatgtgtatgagaaaggcttatttgatgtgatgcatgatcacaaagataatccaaaattcaaaggtcaaaatggttggaatcgtgatggatggaatagtatcactacgaagttcaatggaaagttccctctagctcatttctctaaacaacaaccacaagagaaggagagagagcttaaaggatactacaaggcaataagggattcaagaaaaaaaaagcggggctggttggaatgacactctatgcatggtactggccaaaccagaagtttggccatggctgattcgtgctcacccaaaagtatcaaagtttcgcaacaagccattccctcttttttacagtttagaagggctatatgaagctccatctaggagtgtgtctggacaaagtccaaatcccttgagtactaattcacttgatttggatggacaagaaaccacaagtgtgttcaatctgtctactaatgctcactctgtcccagtcagtactaatgaacccaccgaagctcagtttgtcccatctaatcaagaatcaagccaaagagaaggtgccagtgggagaaagcgtaagcaaagccatgttggattagccttgaaagttatgtggagtttaaaaagatcaattttctattagcaagtgtcaggctgaattgaaagaaatggatggattaacagtcgtggacaaatcatatgctttggagcttttcgtatctacgacaaacagagagattttcttaacaacaacagagcatgatgttagagaaatttggctcaagcacaaaattaggttgcttcatggcagtgatgcatggcctggacaattgatatgaggaaatttgagtgcaaagtgaaagcaactcatggagccgacatggagaagaaaaatgcaacgacagtctacatgaagcttgtgaaaaaagagttaaatctcaaagttcataataaagagacttgtattacagttttatgttatattgtttatctttttgtgatggatggatgtattacagttttagtttgttgttgcttcagtttgctgcccatacttcagtttgcttgacaaactattgtgatgatggataaagcgtgatgtgatgacggccaaccagtttactacttcagtttgctttc

SEQ ID NO: 4016 - DNA, 2939 bp, Zea Mays
tttttggccggaaacaatcctggcctcaagaggccagacaattctcccgactcgcctccgacggacgccagccgcaacgccgcgaaccccatcctcgggagcctctcctccgacggtcgatggcccggctccctgacgccatcctcgcaacgccaaccccagcctcgagaccgtcatctccgacgccatccccaagtgcctccgccgctgctccacatcctcttcccctctacaaggtgattctgatatcatcaagactacaccaggtgagcagtaaaagagtggtggcagtacatcctctctagagttgttactcagaagagaaagagcccatccacacctcctcactcactggtgctaaaaaggttagagaaattcttgaaggacatgagagttggtgcaaatctgagtttcaaatggagccagcaatattcgaaaccacaacaaattttcttagaagagagaatttactacgagacacacgaggagttatcgttgagaagcagcttgggatgttcatgtacatgatctccaacaatgctagtaaccaaatgctacagaaggcttttcaacatagtggagagactatccataggaaaatatctgaagtatttgatatagttcccacactaactcaatgttttgtgaagcttcctagctctatccaaactcacaccaaaattgctacagattctaggttcatgccatttttaggtgagctatcaatttgaaacacacaattcgcttaagtgtttccctttcattgacagtttaccacatggcctcaatatctttccttattcttttccttgcagaactgcattggtgcaatcgacggcacacatatacccaccaccatagcagaacatagggcccctccatatagaaacatgaaaggaactctttcacacaatgttatggtagcctgcgactttgacctcaatttcacatttgtttcatgtggatgggaggggtcagcctcagatgcaggggtgcttcgatctgctattagcaaaggatttagtgtgccagaaggaaagttttatgtagtagatggtgggtatgcaaatacatcatccttcattgcaccatatagaggggttcgataccatctcaatgagtttaggaggcgtcgttcatcacaaagtggttatgcgaactacaaagagctgttcaaccatcgccatgcaattctctgtaaccatatagagagggccatcgatgttctaaagaaaaggttcccgattctaaaagtaggcacatttcgtcccatagagaaccaaatcaagatcgcaactgcaactattgcatttcacaacataattagagggcaaaatggagacaaaagatggcttgacaaccaaccagattacatctctccaagtcaatatgttgatgtcccagagggagataccaactatctcaatgacacagaatcaagtgatggaagctctctaagagatcagatcacacttcagatgtgggctgcctacaatagctagatgggtgcttataatggcttctagtttgtcatgtagctagttgcctagttcgtcggttatgtactattattacttatgaagtctttatggtttgtagtttgtcatgtagctagttgctgagttcatttgttatgtacaattattacttatgaacttaaagtagcctatttatgaacttaaaattacctagttatgtactattatttccacaatttcagttttgaaaaaaggatgatttggaacaatgtgtatgagaaaggcttatttgatgtgatgcatgatcacaaagataatccaaaattcaaaggtcaaaatggttggaatcgtgatggatggaatagtatcactacgaagttcaatggaaagttccctctagctcatttctctaaacaacaaccacaagagaaggagagagagcttaaaggatactacaaggcaataagggattcaagaaaaaaaaagcggggctggttggaatgacactctatgcatggtactggccaaaccagaagtttggccatggctgattcgtgctcacccaaaagtatcaaagtttcgcaacaagccattccctcttttttacagtttagaagggctatatgaaggtagtgtggctatcggagagttaaatttcacatcaactgcttttgatcttcctccaccttcagctccatctaggagtgtgtctggacaaagtccaaatcccttgagtactaattcacttgatttggatggacaagaaaccacaagtgtgttcaatctgtctactaatgctcactctgtcccagtcagtactaatgaacccaccgaagctcagtttgtcccatctaatcaagaatcaagccaaagagaaggtgccagtgggagaaagcgtaagcaaagccatgttggattagccttgaaagttatgtggagtttaaaaagatcaattttctattagcaagtgtcaggctgaattgaaagaaatggatggattaacagtcgtggacaaatcatatgctttggagcttttcgtatctacgacaaacagagagattttcttaacaacaacagagcatgatgttagagaaatttggctcaagcacaaaattaggttgcttcatggcagtgatgcatggcctggacaattgatatgaggaaatttgagtgcaaagtgaaagcaactcatggagccgacatggagaagaaaaatgcaacgacagtctacatgaagcttgtgaaaaaagagttaaatctcaaagttcataataaagagacttgtattacagttttatgttatattgtttatctttttgtgatggatggatgtattacagttttagtttgttgttgcttcagtttgctgcccatacttcagtttgcttgacaaactattgtgatgatggataaagcgtgatgtgatgacggccaaccagtttactacttcagtttgctttc

SEQ ID NO: 4017 - DNA, 2434 bp, Zea Mays
cggaaacaatcctggcctcaagaggccagacaattctcccgactcgcctccgacggacgccagccgcaacgccgcgaaccccatcctcgggagcctctcctccgacggtcgatggcccggctccctgacgccatcctcgcaacgccaaccccagcctcgagaccgtcatctccgacgccatccccaagtgcctccgccgctgctccacatcctcttcccctctacaaggtgattctgatatcatcaagactacaccaggtgagcagtaaaagagtggtggcagtacatcctctctagagttgttactcagaactgcattggtgcaatcgacggcacacatatacccaccaccatagcagaacatagggcccctccatatagaaacatgaaaggaactctttcacacaatgttatggtagcctgcgactttgacctcaatttcacatttgtttcatgtggatgggaggggtcagcctcagatgcaggggtgcttcgatctgctattagcaaaggatttagtgtgccagaaggaaagttttatgtagtagatggtgggtatgcaaatacatcatccttcattgcaccatatagaggggttcgataccatctcaatgagtttaggaggcgtcgttcatcacaaagtggttatgcgaactacaaagagctgttcaaccatcgccatgcaattctctgtaaccatatagagagggccatcgatgttctaaagaaaaggttcccgattctaaaagtaggcacatttcgtcccatagagaaccaaatcaagatcgcaactgcaactattgcatttcacaacataattagagggcaaaatggagacaaaagatggcttgacaaccaaccagattacatctctccaagtcaatatgttgatgtcccagagggagataccaactatctcaatgacacagaatcaagtgatggaagctctctaagagatcagatcacacttcagatgtgggctgcctacaatagctagatgggtgcttataatggcttctagtttgtcatgtagctagttgcctagttcgtcggttatgtactattattacttatgaagtctttatggtttgtagtttgtcatgtagctagttgctgagttcatttgttatgtacaattattacttatgaacttaaagtagcctatttatgaacttaaaattacctagttatgtactattatttccacaatttcagttttgaaaaaaggatgatttggaacaatgtgtatgagaaaggcttatttgatgtgatgcatgatcacaaagataatccaaaattcaaaggtcaaaatggttggaatcgtgatggatggaatagtatcactacgaagttcaatggaaagttccctctagctcatttctctaaacaacaaccacaagagaaggagagagagcttaaaggatactacaaggcaataagggattcaagaaaaaaaaagcggggctggttggaatgacactctatgcatggtactggccaaaccagaagtttggccatggctgattcgtgctcacccaaaagtatcaaagtttcgcaacaagccattccctcttttttacagtttagaagggctatatgaaggtagtgtggctatcggagagttaaatttcacatcaactgcttttgatcttcctccaccttcagctccatctaggagtgtgtctggacaaagtccaaatcccttgagtactaattcacttgatttggatggacaagaaaccacaagtgtgttcaatctgtctactaatgctcactctgtcccagtcagtactaatgaacccaccgaagctcagtttgtcccatctaatcaagaatcaagccaaagagaaggtgccagtgggagaaagcgtaagcaaagccatgttggattagccttgaaagttatgtggagtttaaaaagatcaattttctattagcaagtgtcaggctgaattgaaagaaatggatggattaacagtcgtggacaaatcatatgctttggagcttttcgtatctacgacaaacagagagattttcttaacaacaacagagcatgatgttagagaaatttggctcaagcacaaaattaggttgcttcatggcagtgatgcatggcctggacaattgatatgaggaaatttgagtgcaaagtgaaagcaactcatggagccgacatggagaagaaaaatgcaacgacagtctacatgaagcttgtgaaaaaagagttaaatctcaaagttcataataaagagacttgtattacagttttatgttatattgtttatctttttgtgatggatggatgtattacagttttagtttgttgttgcttcagtttgctgcccatacttcagtttgcttgacaaactattgtgatgatggataaagcgtgatgtgatgacggccaaccagtttactacttcagtttgctttc

SEQ ID NO: 4018 - DNA, 1388 bp, Zea Mays
cggaaacaatcctggcctcaagaggccagacaattctcccgactcgcctccgacggacgccagccgcaacgccgcgaaccccatcctcgggagcctctcctccgacggtcgatggcccggctccctgacgccatcctcgcaacgccaaccccagcctcgagaccgtcatctccgacgccatccccaagtgcctccgccgctgctccacatcctcttcccctctacaaggtgattctgatatcatcaagactacaccaggtcaaaatggttggaatcgtgatggatggaatagtatcactacgaagttcaatggaaagttccctctagctcatttctctaaacaacaaccacaagagaaggagagagagcttaaaggatactacaaggcaataagggattcaagaaaaaaaaagcggggctggttggaatgacactctatgcatggtactggccaaaccagaagtttggccatggctgattcgtgctcacccaaaagtatcaaagtttcgcaacaagccattccctcttttttacagtttagaagggctatatgaaggtagtgtggctatcggagagttaaatttcacatcaactgcttttgatcttcctccaccttcagctccatctaggagtgtgtctggacaaagtccaaatcccttgagtactaattcacttgatttggatggacaagaaaccacaagtgtgttcaatctgtctactaatgctcactctgtcccagtcagtactaatgaacccaccgaagctcagtttgtcccatctaatcaagaatcaagccaaagagaaggtgccagtgggagaaagcgtaagcaaagccatgttggattagccttgaaagttatgtggagtttaaaaagatcaattttctattagcaagtgtcaggctgaattgaaagaaatggatggattaacagtcgtggacaaatcatatgctttggagcttttcgtatctacgacaaacagagagattttcttaacaacaacagagcatgatgttagagaaatttggctcaagcacaaaattaggttgcttcatggcagtgatgcatggcctggacaattgatatgaggaaatttgagtgcaaagtgaaagcaactcatggagccgacatggagaagaaaaatgcaacgacagtctacatgaagcttgtgaaaaaagagttaaatctcaaagttcataataaagagacttgtattacagttttatgttatattgtttatctttttgtgatggatggatgtattacagttttagtttgttgttgcttcagtttgctgcccatacttcagtttgcttgacaaactattgtgatgatggataaagcgtgatgtgatgacggccaaccagtttactacttcagtttgctttc

SEQ ID NO: 4019 - DNA, 2915 bp, Zea Mays
aaacaatcctggcctcaagaggccagacaattctcccgactcgcctccgacggacgccagccgcaacgccgcgaaccccatcctcgggagcctctcctccgacggtcgatggcccggctccctgacgccatcctcgcaacgccaaccccagcctcgagaccgtcatctccgacgccatccccaagtgcctccgccgctgctccacatcctcttcccctctacaaggtgattctgatatcatcaagactacaccaggtgagcagtaaaagagtggtggcagtacatcctctctagagttgttactcagcaagttagacaatttttgttagatgaggaagaagatgatgatgagttgttctttgctattctccctgctataattccatatctctcagaagagaaagagcccatccacacctcctcactcactggtgctaaaaaggttagagaaattcttgaaggacatgagagttggtgcaaatctgagtttcaaatggagccagcaatattcgaaaccacaacaaattttcttagaagagagaatttactacgagacacacgaggagttatcgttgagaagcagcttgggatgttcatgtacatgatctccaacaatgctagtaaccaaatgctacagaaggcttttcaacatagtggagagactatccataggaaaatatctgaagtatttgatatagttcccacactaactcaatgttttgtgaagcttcctagctctatccaaactcacaccaaaattgctacagattctaggttcatgccatttttagaactgcattggtgcaatcgacggcacacatatacccaccaccatagcagaacatagggcccctccatatagaaacatgaaaggaactctttcacacaatgttatggtagcctgcgactttgacctcaatttcacatttgtttcatgtggatgggaggggtcagcctcagatgcaggggtgcttcgatctgctattagcaaaggatttagtgtgccagaaggaaagttttatgtagtagatggtgggtatgcaaatacatcatccttcattgcaccatatagaggggttcgataccatctcaatgagtttaggaggcgtcgttcatcacaaagtggttatgcgaactacaaagagctgttcaaccatcgccatgcaattctctgtaaccatatagagagggccatcgatgttctaaagaaaaggttcccgattctaaaagtaggcacatttcgtcccatagagaaccaaatcaagatcgcaactgcaactattgcatttcacaacataattagagggcaaaatggagacaaaagatggcttgacaaccaaccagattacatctctccaagtcaatatgttgatgtcccagagggagataccaactatctcaatgacacagaatcaagtgatggaagctctctaagagatcagatcacacttcagatgtgggctgcctacaatagctagatgggtgcttataatggcttctagtttgtcatgtagctagttgcctagttcgtcggttatgtactattattacttatgaagtctttatggtttgtagtttgtcatgtagctagttgctgagttcatttgttatgtacaattattacttatgaacttaaagtagcctatttatgaacttaaaattacctagttatgtactattatttccacaatttcagttttgaaaaaaggatgatttggaacaatgtgtatgagaaaggcttatttgatgtgatgcatgatcacaaagataatccaaaattcaaaggtcaaaatggttggaatcgtgatggatggaatagtatcactacgaagttcaatggaaagttccctctagctcatttctctaaacaacaaccacaagagaaggagagagagcttaaaggatactacaaggcaataagggattcaagaaaaaaaaagcggggctggttggaatgacactctatgcatggtactggccaaaccagaagtttggccatggctgattcgtgctcacccaaaagtatcaaagtttcgcaacaagccattccctcttttttacagtttagaagggctatatgaaggtagtgtggctatcggagagttaaatttcacatcaactgcttttgatcttcctccaccttcagctccatctaggagtgtgtctggacaaagtccaaatcccttgagtactaattcacttgatttggatggacaagaaaccacaagtgtgttcaatctgtctactaatgctcactctgtcccagtcagtactaatgaacccaccgaagctcagtttgtcccatctaatcaagaatcaagccaaagagaaggtgccagtgggagaaagcgtaagcaaagccatgttggattagccttgaaagttatgtggagtttaaaaagatcaattttctattagcaagtgtcaggctgaattgaaagaaatggatggattaacagtcgtggacaaatcatatgctttggagcttttcgtatctacgacaaacagagagattttcttaacaacaacagagcatgatgttagagaaatttggctcaagcacaaaattaggttgcttcatggcagtgatgcatggcctggacaattgatatgaggaaatttgagtgcaaagtgaaagcaactcatggagccgacatggagaagaaaaatgcaacgacagtctacatgaagcttgtgaaaaaagagttaaatctcaaagttcataataaagagacttgtattacagttttatgttatattgtttatctttttgtgatggatggatgtattacagttttagtttgttgttgcttcagtttgctgcccatacttcagtttgcttgacaaactattgtgatgatggataaagcgtgatgtgatgacggccaaccagtttactacttcagtttgctttc

SEQ ID NO: 4020 - DNA, 2964 bp, Zea Mays
aaacaatcctggcctcaagaggccagacaattctcccgactcgcctccgacggacgccagccgcaacgccgcgaaccccatcctcgggagcctctcctccgacggtcgatggcccggctccctgacgccatcctcgcaacgccaaccccagcctcgagaccgtcatctccgacgccatccccaagtgcctccgccgctgctccacatcctcttcccctctacaaggtgattctgatatcatcaagactacaccagcaagttagacaatttttgttagatgaggaagaagatgatgatgagttgttctttgctattctccctgctataattccatatctctcagaagagaaagagcccatccacacctcctcactcactggtgctaaaaaggttagagaaattcttgaaggacatgagagttggtgcaaatctgagtttcaaatggagccagcaatattcgaaaccacaacaaattttcttagaagagagaatttactacgagacacacgaggagttatcgttgagaagcagcttgggatgttcatgtacatgatctccaacaatgctagtaaccaaatgctacagaaggcttttcaacatagtggagagactatccataggaaaatatctgaagtatttgatatagttcccacactaactcaatgttttgtgaagcttcctagctctatccaaactcacaccaaaattgctacagattctaggttcatgccatttttaggtgagctatcaatttgaaacacacaattcgcttaagtgtttccctttcattgacagtttaccacatggcctcaatatctttccttattcttttccttgcagaactgcattggtgcaatcgacggcacacatatacccaccaccatagcagaacatagggcccctccatatagaaacatgaaaggaactctttcacacaatgttatggtagcctgcgactttgacctcaatttcacatttgtttcatgtggatgggaggggtcagcctcagatgcaggggtgcttcgatctgctattagcaaaggatttagtgtgccagaaggaaagttttatgtagtagatggtgggtatgcaaatacatcatccttcattgcaccatatagaggggttcgataccatctcaatgagtttaggaggcgtcgttcatcacaaagtggttatgcgaactacaaagagctgttcaaccatcgccatgcaattctctgtaaccatatagagagggccatcgatgttctaaagaaaaggttcccgattctaaaagtaggcacatttcgtcccatagagaaccaaatcaagatcgcaactgcaactattgcatttcacaacataattagagggcaaaatggagacaaaagatggcttgacaaccaaccagattacatctctccaagtcaatatgttgatgtcccagagggagataccaactatctcaatgacacagaatcaagtgatggaagctctctaagagatcagatcacacttcagatgtgggctgcctacaatagctagatgggtgcttataatggcttctagtttgtcatgtagctagttgcctagttcgtcggttatgtactattattacttatgaagtctttatggtttgtagtttgtcatgtagctagttgctgagttcatttgttatgtacaattattacttatgaacttaaagtagcctatttatgaacttaaaattacctagttatgtactattatttccacaatttcagttttgaaaaaaggatgatttggaacaatgtgtatgagaaaggcttatttgatgtgatgcatgatcacaaagataatccaaaattcaaaggtcaaaatggttggaatcgtgatggatggaatagtatcactacgaagttcaatggaaagttccctctagctcatttctctaaacaacaaccacaagagaaggagagagagcttaaaggatactacaaggcaataagggattcaagaaaaaaaaagcggggctggttggaatgacactctatgcatggtactggccaaaccagaagtttggccatggctgattcgtgctcacccaaaagtatcaaagtttcgcaacaagccattccctcttttttacagtttagaagggctatatgaaggtagtgtggctatcggagagttaaatttcacatcaactgcttttgatcttcctccaccttcagctccatctaggagtgtgtctggacaaagtccaaatcccttgagtactaattcacttgatttggatggacaagaaaccacaagtgtgttcaatctgtctactaatgctcactctgtcccagtcagtactaatgaacccaccgaagctcagtttgtcccatctaatcaagaatcaagccaaagagaaggtgccagtgggagaaagcgtaagcaaagccatgttggattagccttgaaagttatgtggagtttaaaaagatcaattttctattagcaagtgtcaggctgaattgaaagaaatggatggattaacagtcgtggacaaatcatatgctttggagcttttcgtatctacgacaaacagagagattttcttaacaacaacagagcatgatgttagagaaatttggctcaagcacaaaattaggttgcttcatggcagtgatgcatggcctggacaattgatatgaggaaatttgagtgcaaagtgaaagcaactcatggagccgacatggagaagaaaaatgcaacgacagtctacatgaagcttgtgaaaaaagagttaaatctcaaagttcataataaagagacttgtattacagttttatgttatattgtttatctttttgtgatggatggatgtattacagttttagtttgttgttgcttcagtttgctgcccatacttcagtttgcttgacaaactattgtgatgatggataaagcgtgatgtgatgacggccaaccagtttactacttcagtttgctttc

SEQ ID NO: 4021 - DNA, 3143 bp, Zea Mays
aaacaatcctggcctcaagaggccagacaattctcccgactcgcctccgacggacgccagccgcaacgccgcgaaccccatcctcgggagcctctcctccgacggtcgatggcccggctccctgacgccatcctcgcaacgccaaccccagcctcgagaccgtcatctccgacgccatccccaagtgcctccgccgctgctccacatcctcttcccctctacaaggtgattctgatatcatcaagactacaccaggtgagcagtaaaagagtggtggcagtacatcctctctagagttgttactcaggtttgtatgttggcagcagtatgctcctagttaccttctaaagtttctcctaatttctcaatgggtttgtgataacttgccttttgttcttagtttcatgagtcatatatatatatatatataagagctatctccatgttttgcatgcttaagttccttataagagctatctccacttctctatatatgggttcttgggagcagcaagttagacaatttttgttagatgaggaagaagatgatgatgagttgttctttgctattctccctgctataattccatatctctcagaagagaaagagcccatccacacctcctcactcactggtgctaaaaaggttagagaaattcttgaaggacatgagagttggtgcaaatctgagtttcaaatggagccagcaatattcgaaaccacaacaaattttcttagaagagagaatttactacgagacacacgaggagttatcgttgagaagcagcttgggatgttcatgtacatgatctccaacaatgctagtaaccaaatgctacagaaggcttttcaacatagtggagagactatccataggaaaatatctgaagtatttgatatagttcccacactaactcaatgttttgtgaagcttcctagctctatccaaactcacaccaaaattgctacagattctaggttcatgccatttttaggtgagctatcaatttgaaacacacaattcgcttaagtgtttccctttcattgacagtttaccacatggcctcaatatctttccttattcttttccttgcagaactgcattggtgcaatcgacggcacacatatacccaccaccatagcagaacatagggcccctccatatagaaacatgaaaggaactctttcacacaatgttatggtagcctgcgactttgacctcaatttcacatttgtttcatgtggatgggaggggtcagcctcagatgcaggggtgcttcgatctgctattagcaaaggatttagtgtgccagaaggaaagttttatgtagtagatggtgggtatgcaaatacatcatccttcattgcaccatatagaggggttcgataccatctcaatgagtttaggaggcgtcgttcatcacaaagtggttatgcgaactacaaagagctgttcaaccatcgccatgcaattctctgtaaccatatagagagggccatcgatgttctaaagaaaaggttcccgattctaaaagtaggcacatttcgtcccatagagaaccaaatcaagatcgcaactgcaactattgcatttcacaacataattagagggcaaaatggagacaaaagatggcttgacaaccaaccagattacatctctccaagtcaatatgttgatgtcccagagggagataccaactatctcaatgacacagaatcaagtgatggaagctctctaagagatcagatcacacttcagatgtgggctgcctacaatagctagatgggtgcttataatggcttctagtttgtcatgtagctagttgcctagttcgtcggttatgtactattattacttatgaagtctttatggtttgtagtttgtcatgtagctagttgctgagttcatttgttatgtacaattattacttatgaacttaaagtagcctatttatgaacttaaaattacctagttatgtactattatttccacaatttcagttttgaaaaaaggatgatttggaacaatgtgtatgagaaaggcttatttgatgtgatgcatgatcacaaagataatccaaaattcaaaggtcaaaatggttggaatcgtgatggatggaatagtatcactacgaagttcaatggaaagttccctctagctcatttctctaaacaacaaccacaagagaaggagagagagcttaaaggatactacaaggcaataagggattcaagaaaaaaaaagcggggctggttggaatgacactctatgcatggtactggccaaaccagaagtttggccatggctgattcgttgtggctatcggagagttaaatttcacatcaactgcttttgatcttcctccaccttcagctccatctaggagtgtgtctggacaaagtccaaatcccttgagtactaattcacttgatttggatggacaagaaaccacaagtgtgttcaatctgtctactaatgctcactctgtcccagtcagtactaatgaacccaccgaagctcagtttgtcccatctaatcaagaatcaagccaaagagaaggtgccagtgggagaaagcgtaagcaaagccatgttggattagccttgaaagttatgtggagtttaaaaagatcaattttctattagcaagtgtcaggctgaattgaaagaaatggatggattaacagtcgtggacaaatcatatgctttggagcttttcgtatctacgacaaacagagagattttcttaacaacaacagagcatgatgttagagaaatttggctcaagcacaaaattaggttgcttcatggcagtgatgcatggcctggacaattgatatgaggaaatttgagtgcaaagtgaaagcaactcatggagccgacatggagaagaaaaatgcaacgacagtctacatgaagcttgtgaaaaaagagttaaatctcaaagttcataataaagagacttgtattacagttttatgttatattgtttatctttttgtgatggatggatgtattacagttttagtttgttgttgcttcagtttgctgcccatacttcagtttgcttgacaaactattgtgatgatggataaagcgtgatgtgatgacggccaaccagtttactacttcagtttgctttc

SEQ ID NO: 4022 - DNA, 2307 bp, Zea Mays
cttccttgagggaagcagaaccgccttgaccgacgtgactacggtacggcccccaaacccggaacggcagcgaaacgacagccatgcttctccagccgatccccaccgccaccctcgccgctcgaccgagatcaagcgaagcttccttcccctttcgttgccaccgccgccgccgcgtgctcctcccagtccgcgccgacttgaccccgatctccctctcggcctccgccccctcgcggccggccaagccggccgtttgcaccgccgacgagctccactacgcctccgtcgacggtgccgggtggcgactcgcgctctggcggtacaggccaccgcgcaatgctcccgtcaggaatcacccgctgatgctgctgtcgggagtcgggacgaacgccgtcggattcgacctctcacccggggcttcgtttgcccgtcacatgtctagccaaggatttgatacatggatagttgaagtaagaggtgctggtctgagcatgcgtgaatatgatgattctactccatctggctcagtcacttttgaggatgtctctagtggtattcaacctcttaatagtacattcgaggccacttccattcagagttctggtggctatgctagtgattgtgatgaccttggaatagttgctttggatgaaccacctttacttgctgaactttctaatttttttgatcgaatctcaaaactcatggaagaggctgtagttaatggaaattttcatgagatcacagaaaaagtttctgttctctcagaaatggtagagagctctaccattattggtccagtgagagaagaaagtctacgtcttcttaagaattttcaggaccagttggattcatgggagcgttttgtagcaacacaaatggatctgacttctgagtataattgggacttcgaccattacctagaggaggatataccagccgcgctggagtatattaaacaacacagcagagcaaaagatggcaagttgcttgccattggacactcaatggggggaattttgttgtatgcaatgctgtcaagatctggttaggcactgatactgctctttatctgagctttcatgcagactcctgtctccttcacattttatcccttttgttctgaagcacacatgaagtgtgtatttctatgagtatttaattaattgagccagcaagcatcttttgtatgtattagttaagttgcccatttgttgagaaatatcataattctttagagcttctatgtatcaccatatcttatttgtttttccccacccttcaaggttttgaaggagtttcgtcaaatttagcagctattgtcactttggcttcttctgttgactatacaacatccaattcatcgctgaagctgttactgcctcttgctaatgtgtttgttatcaggctcatcctgcacaagctcttaatgtccctgctgttccattgggtacattgttggcagcggcgtatccgtgggcatctggtccaccatatcttttttcctggcttaatcctcaaatatcagctcaggacatgatgcatccggagttgctggctaagcttgtttcaaacaacttttgtacagtgcctgcaaaggttgttctgcaacttacaaccgctttcagggaaggtgggctgtgcaaccgaaatggaaccttctcatacaaggatcatttgcgagagtgtcagactcctgtccttgcattggctggagataaagacctaatctgccctccagatgctgtttatgaaactgtgaaactcattccgaatcacaaggtggactatagagtgtttggaaagccacaaggcccgcattatgcacattatgacttggttggaggccgactggcgatcaatgaggtgtatccatgtatcatagagttcctctctcgtcatgatggttattgatttgattatatgatgctaatacagagtaacttacaacaccatgttcatctcaaaggttttttaagttgagctgaacagtcttttccatggcttggccagaaaataggtgcatgcacgaattctcgtgtgtgttgaagagagagaaaaaaacacgagctcatctgatgtatccttgtaacaagcatcggttagtgcttctctgtttcccgttttgaggaaaagttaatggtaatcttgtagaaaaagggttgaaaaaatttacagtaggcttacatgtactcccacgaacaagaagccaagatcaaagaaattgtacaattgatctcttactatgatgtaacacttctaatataatgatacgcatctcacatttccacttgcattttcatg

SEQ ID NO: 4023 - DNA, 1990 bp, Zea Mays
cttccttgagggaagcagaaccgccttgaccgacgtgactacggtacggcccccaaacccggaacggcagcgaaacgacagccatgcttctccagccgatccccaccgccaccctcgccgctcgaccgagatcaagcgaagcttccttcccctttcgttgccaccgccgccgccgcgtgctcctcccagtccgcgccgacttgaccccgatctccctctcggcctccgccccctcgcggccggccaagccggccgtttgcaccgccgacgagctccactacgcctccgtcgacggtgccgggtggcgactcgcgctctggcggtacaggccaccgcgcaatgctcccgtcaggaatcacccgctgatgctgctgtcgggagtcgggacgaacgccgtcggattcgacctctcacccggggcttcgtttgcccgtcacatgtctagccaaggatttgatacatggatagttgaagtaagaggtgctggtctgagcatgcgtgaatatgatgattctactccatctggctcagtcacttttgaggatgtctctagtggtattcaacctcttaatagtacattcgaggccacttccattcagagttctggtggctatgctagtgattgtgatgaccttggaatagttgctttggatgaaccacctttacttgctgaactttctaatttttttgatcgaatctcaaaactcatggaagaggctgtagttaatggaaattttcatgagatcacagaaaaagtttctgttctctcagaaatggtagagagctctaccattattggtccagtgagagaagaaagtctacgtcttcttaagaattttcaggaccagttggattcatgggagcgttttgtagcaacacaaatggatctgacttctgagtataattgggacttcgaccattacctagaggaggatataccagccgcgctggagtatattaaacaacacagcagagcaaaagatggcaagttgcttgccattggacactcaatggggggaattttgttgtatgcaatgctgtcaagatctggttttgaaggagtttcgtcaaatttagcagctattgtcactttggcttcttctgttgactatacaacatccaattcatcgctgaagctgttactgcctcttcggcgtatccgtgggcatctggtccaccatatcttttttcctggcttaatcctcaaatatcagctcaggacatgatgcatccggagttgctggctaagcttgtttcaaacaacttttgtacagtgcctgcaaaggttgttctgcaacttacaaccgctttcagggaaggtgggctgtgcaaccgaaatggaaccttctcatacaaggatcatttgcgagagtgtcagactcctgtccttgcattggctggagataaagacctaatctgccctccagatgctgtttatgaaactgtgaaactcattccgaatcacaaggtggactatagagtgtttggaaagccacaaggcccgcattatgcacattatgacttggttggaggccgactggcgatcaatgaggtgtatccatgtatcatagagttcctctctcgtcatgatggttattgatttgattatatgatgctaatacagagtaacttacaacaccatgttcatctcaaaggttttttaagttgagctgaacagtcttttccatggcttggccagaaaataggtgcatgcacgaattctcgtgtgtgttgaagagagagaaaaaaacacgagctcatctgatgtatccttgtaacaagcatcggttagtgcttctctgtttcccgttttgaggaaaagttaatggtaatcttgtagaaaaagggttgaaaaaatttacagtaggcttacatgtactcccacgaacaagaagccaagatcaaagaaattgtacaattgatctcttactatgatgtaacacttctaatataatgatacgcatctcacatttccacttgcattttcatg

SEQ ID NO: 4024 - DNA, 2083 bp, Zea Mays
tgcaatttgcctgcgaaaaggagctgtggtacgaaacggagcacgctgcatctttggcctatgccatcaatctttccaacgcaaacacagccagcggcccagtctataaatcataatcaaccgaaaatgtcggtaacaaaagtctggcgctgaacctggaagagtttttccggctatcgttgtgcttatctcttcccaaggagagacccaccgcccattatccaaccctactacttgcttttgtctccactctcagtctcctctccaaatctccaaccctacttgttccagaaaagaaaaagaactatccatcccgctgtgagccaagccagcccagctccggcgactggcagatgtttcagggtccccgtccgtttgccgcaggttccctgatatcggtggccagcagccgactttgtggttagtccattctcttccggcgggatacgttgcggaccacttcgctcagctgctcgcgacggcggcttgtaccctgatttgggtggggaggatgcctgatatccagctgggatgccacactataaggtcccatggtaccaaagtggcaacattacacatgtatgactggattatacttttatgtcttgctgtacttgatggactgttaaacataatcgagccctttcaccgctttgttggacgcgacatgatgaccgacttgagttatcccctcaagggcaacacaatcccattttgggctgttccagtatgttctgctctgctgattgcgatcgtgctacccttggttatctttgctgtcatttacttcaaaaagaaaaatgtctatgatttacaccacggcatactaggtatcttgtattcagtgcttataactgctgtgatcactgatgcaattaaggatggtgttggtcgccctcggccagatttcttttggcgttgttttcctgatggcaaacctaattttaataatataaccaccgatgtgatatgccatggagaaaagagtgtcatcaaggaaggtcataagagtttcccaagtgggcattcttcatggtctttcgctggtctaggttttcttgcatggtacttggctggaaaacttaaagcttttgatcgcaagggtcacattgcaaaactgtgcttagtttttctgcctctacttgtcgcgtcacttgtggctgtttctcgagttgatgattactggcatcactggcaagatgtctttgccggcggcatcataggtcttacagttgcttcattctgttacctgcagttcttcccatatccctttgacaatgatgccctatggccacacgcatacttccaacagctagctgagacacacagtaatggtaatgcaaactcaatcaacataagacctacagagtttgaagatgaaccagatgaccatggtgacattgtcctgagggacaccagccctatcttggagtcaatggagtctggcaggagaccatgaagaagcatgccactgggtttgtccaaggtgccctgaagcgtgatgagttttgtggtttcatcatgtagccgtccaacgtaaaaacagtatggaggtatatctaccaccacctgatgatttgatgaaccacagactgtcgtggttagctgtaaatgacagcgaatgtttatgtttctagtgacaatgtgaatatttggttttgcacggctgtgatatggaaagtttgtttcgaggttaccctttggcagtaatgaaattgtccgacgacctgcaggtggattgcaaacggtctctagggggtaatcactccatccaagatgagatgagttggtgtattatgggtctattccttaaatttggtgtgatgaatttattcctcatattagtactaactcacacgaggaatttgatggtgatggattaaatcatttcataaatcaaacaaaaaataggactaatttagtatgaggaatgaggtgatgattgattaactcattctataaactaaacaaaaaaaatgaaaagataaggagtaaaaagaatttttcaaaccaaacatcttattagtgttttgtagagaccaaaattggtacgagaaaaaaaaataataatgaaataaataaa

SEQ ID NO: 4025 - DNA, 710 bp, Zea Mays
ataaacatcgcaatacaaacagtttcaaggtcatccttaaaggaaggaaaaggaagttgtgggagagtatcatggacactattggtccacatgtactcatagttgatgacacctttgttgatcgccttgtggcatctcgagttttgaagacttgtaacattcaagtgacaatggtggagggcccaaagcaagccttagattttctagatgtggagaatgatgtaaatttgattctgaccgattattgtatgcctggtatgactggatatgatctcctaatggaggtgaaggaatcaccaaagctaaagcacatcccagtggtggtcatgtctagtgaccacatccctcaaagaatgcaaaagggcaaaggaatacatcataaagcctatcaaagctattgatgtgcctcgtatcttgagctatatttgataagatgatgtgggaagagaatatagaacaagacaactcactatagggttctattttcaattgtcaaggaattattctaagaagaccttgcatggtcttgttttatgtcattaattctatgtaatttgcttcaacttcaattatattatttttgttatgtccaaataatttatttatcttagatccatatgatgtatgctatcttattttcttaatatcatattggatcatatcaagacttgtcataagaatttgtttacttttttcaaggaatatgatgg

SEQ ID NO: 4026 - DNA, 1312 bp, Zea Mays
aaaccaatcacgtccttgtcaccaaatcgacgttttgctggtaactgccaaacaacgttgatcacccaaccaagtggcaaacccccggaccctgtccacggtgcacccacccgtaggccccacgtgtcaccctctaatatacgcagcctccgttcaagtttagagtcacccgctaatatacggagcagctgcaatgctgaacgctgcacacctgtaaaagatagagctatcccctccctccccatcccttggagccagcaactccactcctgagtcctcacctcgtgctgcccgcgccatttccacctcccactgtcctttcgtccagtccccagccctgcagcccaaccgtggaggttctggaaggcggtgtatcccttctagaaccttctcgagatgcagagcgccgcggctttccggccatgccccactcggctgctggtgagcagcccttgtcgccccctcctctcggcccgcccgcttcgtgcctccgccgctggcgccgtcgctaccagaagcagcgccgtgggccctcgcggtctggggctcgggctgctgccagcctcgcccgatcgggatggcaagtgccgccagcgacaggtgtcatgcagcgcggccggggatgctgtggcggccccgaaggcggaagaaggaggcgggctcatgaagacgctgtggctcggctcgctcttcggcctctggtacctgttcaacatctacttcaacatctataacaagcaggtactcaaggttttcccataccctataaacatcacagaagttcaatttgctgtcggaactgtagcagctctgttcatgtggatcactggtattattaagaggccaaagatttctggagcacagcttgtagccatcctacctctggctattgttcatactatgggcaatctcttcaccaacatgagccttgggaaagttgcagtgtcatttacgcacaccatcaaggctatggagcctttcttttctgttattctttctgcaattttccttggcgagctacctactatttgggtagtatcttctcttcttccaattgttggtggtgttgcattggcatctcttactgaggcatcctttaactgggctggcttttggagtgcaatggcttcaaatgttacctttcaatcccgaaatgtattgagcaagaagctcatggttaagaaagaggaatccttggacaaccttaatctcttctctatcattacagtgatgtcatttttccttttggcccctgttaccttctttacagaaggtgtcaaaattactcctacatttttgcaatctgctgtta

SEQ ID NO: 4027 - DNA, 1687 bp, Zea Mays
aaaccaatcacgtccttgtcaccaaatcgacgttttgctggtaactgccaaacaacgttgatcacccaaccaagtggcaaacccccggaccctgtccacggtgcacccacccgtaggccccacgtgtcaccctctaatatacgcagcctccgttcaagtttagagtcacccgctaatatacggagcagctgcaatgctgaacgctgcacacctgtaaaagatagagctatcccctccctccccatcccttggagccagcaactccactcctgagtcctcacctcgtgctgcccgcgccatttccacctcccactgtcctttcgtccagtccccagccctgcagcccaaccgtggaggttctggaaggcggtgtatcccttctagaaccttctcgagatgcagagcgccgcggctttccggccatgccccactcggctgctggtgagcagcccttgtcgccccctcctctcggcccgcccgcttcgtgcctccgccgctggcgccgtcgctaccagaagcagcgccgtgggccctcgcggtctggggctcgggctgctgccagcctcgcccgatcgggatggcaagtgccgccagcgacaggtgtcatgcagcgcggccggggatgctgtggcggccccgaaggcggaagaaggaggcgggctcatgaagacgctgtggctcggctcgctcttcggcctctggtacctgttcaacatctacttcaacatctataacaagcaggtactcaaggttttcccataccctataaacatcacagaagttcaatttgctgtcggaactgtagcagctctgttcatgtggatcactggtattattaagaggccaaagatttctggagcacagcttgtagccatcctacctctggctattgttcatactatgggcaatctcttcaccaacatgagccttgggaaagttgcagtgtcatttacgcacaccatcaaggctatggagcctttcttttctgttattctttctgcaattttccttggcgagctacctactatttgggtagtatcttctcttcttccaattgttggtggtgttgcattggcatctcttactgaggcatcctttaactgggctggcttttggagtgcaatggcttcaaatgttacctttcaatcccgaaatgtattgagcaagaagctcatggttaagaaagaggaatccttggacaaccttaatctcttctctatcattacagtgatgtcatttttccttttggcccctgttaccttctttacagaagggtctgaatgtaaaccaagtccttacaaggtgtcttttcgctggactgtgtttccatgcataccaacaggtgtcttacatgattttggcgatggtgtctcctgtcactcattctgtgggcaactgtgttaaacgtgttgtggtcattgtaacatcagtgctgttcttcaggacacctgtttctcctatcaactctctcggtactgcgattgcacttgccggagttttcctgtactcacagctcaagcgacttaagcccaagccgaagacggcttaaatagggattgtattttccatctctttgtgttaatggagttaaacacttctatgtttcaggaaaagcgagggtttctgccttcaatgagaaaacacttcgtatatataaagatgcttcgtcgcaagtgaaatttcgtta

SEQ ID NO: 4028 - DNA, 1641 bp, Zea Mays
aaaccaatcacgtccttgtcaccaaatcgacgttttgctggtaactgccaaacaacgttgatcacccaaccaagtggcaaacccccggaccctgtccacggtgcacccacccgtaggccccacgtgtcaccctctaatatacgcagcctccgttcaagtttagagtcacccgctaatatacggagcagctgcaatgctgaacgctgcacacctgtaaaagatagagctatcccctccctccccatcccttggagccagcaactccactcctgagtcctcacctcgtgctgcccgcgccatttccacctcccactgtcctttcgtccagtccccagccctgcagcccaaccgtggaggttctggaaggcggtgtatcccttctagaaccttctcgagatgcagagcgccgcggctttccggccatgccccactcggctgctggtgagcagcccttgtcgccccctcctctcggcccgcccgcttcgtgcctccgccgctggcgccgtcgctaccagaagcagcgccgtgggccctcgcggtctggggctcgggctgctgccagcctcgcccgatcgggatggcaagtgccgccagcgacaggtgtcatgcagcgcggccggggatgctgtggcggccccgaaggcggaagaaggaggcgggctcatgaagacgctgtggctcggctcgctcttcggcctctggtacctgttcaacatctacttcaacatctataacaagcaggtactcaaggttttcccataccctataaacatcacagaagttcaatttgctgtcggaactgtagcagctctgttcatgtggatcactggtattattaagaggccaaagatttctggagcacagcttgtagccatcctacctctggctattgttcatactatgggcaatctcttcaccaacatgagccttgggaaagttgcagtgtcatttacgcacaccatcaaggctatggagcctttcttttctgttattctttctgcaattttccttggcgagctacctactatttgggtagtatcttctcttcttccaattgttggtggtgttgcattggcatctcttactgaggcatcctttaactgggctggcttttggagtgcaatggcttcaaatgttacctttcaatcccgaaatgtattgagcaagaagctcatggttaagaaagaggaatccttggacaaccttaatctcttctctatcattacaggtctgaatgtaaaccaagtccttacaaggtgtcttttcgctggactgtgtttccatgcataccaacaggtgtcttacatgattttggcgatggtgtctcctgtcactcattctgtgggcaactgtgttaaacgtgttgtggtcattgtaacatcagtgctgttcttcaggacacctgtttctcctatcaactctctcggtactgcgattgcacttgccggagttttcctgtactcacagctcaagcgacttaagcccaagccgaagacggcttaaatagggattgtattttccatctctttgtgttaatggagttaaacacttctatgtttcaggaaaagcgagggtttctgccttcaatgagaaaacacttcgtatatataaagatgcttcgtcgcaagtgaaatttcgtta

SEQ ID NO: 4029 - DNA, 1695 bp, Zea Mays
ctcgtgtcgttaaataggagtacttgtaggagccactatccagtaataaattgatcaagatgttgtgagggctgtagttgttgagtgttcttggaatcattctcggaggtggtgctgggactagattgtaccccttgacaaagaagcgtgccaagcctgcagtgccattgggtgccaactatagactgattgatatccccgtcagcaattgtctcaacagcaacatatccaagatctatgtgctaacacaattcaactctgcttccctcaaccgtcacctctcaagagcctacgggaacaacattggagggtacaagaatgacgggttcgttgaagtcttagctgcacagcagagcccagataatccaaactggtttcagggtactgcagatgctgtaaggcaatacttgtggttatttgaggaacataatgtgatggagtttctaattcttgctggcgatcacctgtaccggatggattatgaaaagttcattcaggcacacagagaaacggatgctgatattactgttgctgccctaccaatggatgagaaacgtgcaaccgcatttggcctcatgaaaattgacgaagaagggaggattattgagtttgctgagaaaccgaaaggagatcagttgaaagcaatgatggttgacaccaccatacttggccttgatgacgagagggcaaaggaaatgccttatattgctagcatgggtatatatgtttttagcaaggatgtaatgcttcagctcctccgtgaacaatttcctggagccaatgattttggaagtgaggttattccaggtgcaacaagcattggaaagagggttcaggcttatctatatgatggttattgggaagatattggtacaattgaggcattttataatgcaaacttgggaataaccaagaagccaataccagatttcagcttctatgaccgttctgctccaatctatacacaacctcgacatctgccaccttcaaaggttcttgatgctgatgtgacagacagtgttattggtgagggatgtgttattaaaaactgcaagatacaccattctgtagttggactccgttcttgcatatctgaaggtgctatcatagaggacactttactaatgggtgcggactactatgagactgaagctgacaagaaactccttgccgaaaatggtggcattcccattggtattgggaagaattcacacatcagaaaagcaatcattgacaagaatgctcgaattggagataatgtgaagatactcaacgctgacaatgttcaagaagctgcaagggagacagacgggtacttcatcaaaggtggaattgtcacagtgatcaaggatgctttactccctagtgggacagttatatgaagcggatgtgcgacatgcaagccagagtgtcatcgacaatgatcagcatctggttacatgcctgatctgcagttcagtgtgctggagatcatggaaacaataaaatgtgtcattcaaggcactttttctctctctctgatcttttgtccttaaatgttgtgggttatatataatgttgtagcagaaacagttagtacaatgctgaatcaaaactggatggctggatttgggatacatcttcgatgctgtgtcattgatcagtttaattaccataccgtgctgctttgagcgaagccataaaggccatgctctg

SEQ ID NO: 4030 - DNA, 1403 bp, Zea Mays
tttccaaggagtgctaatagattttgaatttcagagctgtcagtgtccatttctgatagtgttcttggaatcattctcggaggtggtgctgggactagattgtaccccttgacaaagaagcgtgccaagcctgcagtgccattgggtgccaactatagactgattgatatccccgtcagcaattgtctcaacagcaacatatccaagatctatgtgctaacacaattcaactctgcttccctcaaccgtcacctctcaagagcctacgggaacaacattggagggtacaagaatgacgggttcgttgaagtcttagctgcacagcagagcccagataatccaaactggtttcagggtactgcagatgctgtaaggcaatacttgtggttatttgaggaacataatgtgatggagtttctaattcttgctggcgatcacctgtaccggatggattatgaaaagttcattcaggcacacagagaaacggatgctgatattactgttgctgccctaccaatggatgagaaacgtgcaaccgcatttggcctcatgaaaattgacgaagaagggaggattattgagtttgctgagaaaccgaaaggagatcagttgaaagcaatgatggttgacaccaccatacttggccttgatgacgagagggcaaaggaaatgccttatattgctagcatgggtatatatgtttttagcaaggatgtaatgcttcagctcctccgtgaacaatttcctggagccaatgattttggaagtgaggttattccaggtgcaacaagcattggaaagagggttcaggcttatctatatgatggttattgggaagatattggtacaattgaggcattttataatgcaaacttgggaataaccaagaagccaataccagatttcagcttctatgaccgttctgctccaatctatacacaacctcgacatctgccaccttcaaaggttcttgatgctgatgtgacagacagtgttattggtgagggatgtgttattaaaaactgcaagatacaccattctgtagttggactccgttcttgcatatctgaaggtgctatcatagaggacactttactaatgggtgcggactactatgagactgaagctgacaagaaactccttgccgaaaatggtggcattcccattggtattgggaagaattcacacatcagaaaagcaatcattgacaagaatgctcgaattggagataatgtgaagatactcaacgctgacaatgttcaagaagctgcaagggagacagacgggtacttcatcaaaggtggaattgtcacagtgatcaaggatgctttactccctagtgggacagttatatgaagttgcaaatgttacatctttgctcgaatttgcaagcctgcctgttc

SEQ ID NO: 4031 - DNA, 1517 bp, Zea Mays
cagcagtcgtcgacggaacaagaggcgatggcacaggacggccgcgcccgcgagagctccagcaaggcggcgtcggctggcagcggcggctgctccatgccgttcaggctcaacgtgcacgcgcgggagttcgtcccggtggccagccctttggcggcggccgccgccggcggcggctactattctccgttcgtgcagctttccggcgatggcgggctgggcacggactggatgaacttctttgccgagccggaccccacgtcgccgtcgtccttcctgccggactttggacactgcgacatcctcagagctaccggcggcatcaatggctaccctaaccccaaaggcggcgcaagtgtggccgacatcgcagataagattgtcaagcaggtcgagtaccaattcagtgacacgaacttggttgcgaacgattttctgacaaagatcatgaacaaggatcccgagggctatgtccctttgtctgtcatatcatcctggaagaagatcaaggccatgggggtaacaagccagctgctggtcatggctctccggacctcggacaagctcgttgtcagcgacgacggcaggaaggtgcggcgggcgcagccattcaccgagcgacacaaagaagagctgcagtgccggatggtcatcgccgagaacttgccgcaggattccacgagaaacagcctcgagaagatcttcggcgtcatcggcagcgtgaaaaacatcagaatctgccatccgcaagaacccggctctgcaagatcatcacctaggtcgtcagacacaaacacaccagccagtaacaagctgcatgcgcttatagagtacgagacctcgcaccaagccgacagagcagtggacaagctgaacgacgaaaggaactggaggaagggcctccgcgtgcgccccgtgctgcgacgatcgcccaagacggtggcacggatgaagcggccggacttggaccaccacgtcgccgcctccgacgaggagcgtgtctccacgtccgactccccgacggcgacagcggcagcgcaccctcctgacaacactcagcagcagcaggaggaggaggaggaggaccagcaccagcaccagcacggcggcgccaagaagccgtggggcagcagagggcggggcaggccgccgccgcactcctccgcgcactctgctggcgcgcccgggcattcggtggacagcctcgcggcgagcccccggcacgcggcgcaggggcctaggatgcccgacggcacgcgcgggttcaccatgggccgcgggaggccggcgccgcctgccgcgccgtcggctgctgctgccgtccgggtcgtgtaggtcggtcgccggttccgccgtacgtggtggcgtctgactgaccgggcagatgtcccttcttgatttttatttgttttgttttgagggagaggatgaaagtgcagtgtcttgtctctctctatctctcttttttcctttctttctttcttgaataaactgttttgatttttttaataaggaat

SEQ ID NO: 4032 - DNA, 2941 bp, Zea Mays
ctgtaccctatcttttcggcttcaagtcacggtgccgcactgcttcttcctcttcccttctgttcgccagcgcgcaagttctggaagtggaagtggaagctttcgtttgttccctttcacccgccttcttgtcaattgctcccaatacccaaggtcccaacaactacaatccccttgacccatttgcttcatttgcaccgccggcctctgagcttaccatcccttgtagcccagaagaacgcgcaccaaatgcttgcgacattgtcacaatggccgccacgtcgtacctagcttccttctcccgcgcttcgccagcaccagcggcggcgtctgcgtgcctgtgcaatgtccatgcctggccacccgcgctgcggcctcggcctcgccggcgtcgtccccgtcccgcgcccctccgggtttacgccatctccgaccaagaccggctcctcaccgctctgcgcgagcaggcggaccccgaggcagcgctccagatgctgaactcggcgctcgcgcgggaggacttcgcccccagccgcgccgtgtacgaggagatcatccagaagctcggcacggccggcgcgttcgacttgatggaggggcttgtccgggagatgcggcgggaagggcatgaggccggggctggcgtggtgcggtcttttgtcgagagctacgcgcggctgcggcggttcgacgatgccgtggacctagttcggaaccagctgaacaccttcggggttcaggcggacacggcggtgtacaaccacctcctcaatgtccttgcggaggggagcaggatgaagctcctggagtcggtctacaacgagatgactgatcgcgggattcagcctgatgttgtgacactcaacacgctgatcaaggcgctgtgccgggcgcatcaggtcaggaccgcggtcttgatgctggaggagatgtcgagccatgctgtggcgcctgatgagaccacattcaccacgttgatgcaaggatttattgaggagggaagcattgaggcggctctgagggtgaagacaaagatgatggaaactggatgctcaccaacaagggtaactgtcaatgttctgattaatggctactgcaagatgggaagagtggaagatgcgcttggctacatacagaaagagattgctgatggatttgaacctgatcaggtcacatataatacttttgttcattgtttgtgccaaaacggacatgtcagccatgccttgaaagtcatggatctgatgcttcaggagggccatgatcctgatgttttcacctacaatactgttatcaactgcctcagtaaaaatggagagcttgatgaggccaagggaattgtaaatcagatggtggataggggttgtttgcctgacaccacaacgttcaacactctcattgttgctctgtgctcacagaatcgacttgaggaagcattggaccttgcacgtgagctaactgtgaagggactttctccagatgtctatactttcaatattttgataaatgccctttgcaaggtaggagatcctcatcttggcattcgattgtttgaggagatgaagagcagtggatgcgctcctgatgaagttacatacaacattttgattgatcatctttgctcaatggggaagcttgtaaatgctttggatttattgaaggagatggaatccaatggttgccctcggagtacagtgacatataacacaataattgatgcattatgcaagcaaatgagaatagaagaagctgaggaggtttttgatcaaatggatgcacatggtatttcaaggagtgctgtcacatttaatactcttattgatggcttgtgcaaggccaagaggatcgatgacgcaacagaacttattgagcaaatggtgaaggaaggattacaacctagtaatatcacttataattctattctaacacattactgcaagcagggggacctcaagaaggcagctgatattttagaaactatgacagcaaatggatttgaaattgatgttgtcacatatggaacactcattaatggtctatgcaaggctggtaggactcaggttgctttgaagcttttaagaggcatgcgaattaaagggattagacctactccaaaagcttacaacccggtgatacagtctttgtttagacggaataatttaagagatgctcttagtcttttcagggagatgactgaggtgggtgagcctcctgatgccctcacatataagattgttttccgtggtctgtgtcgtggtggagggcctatcaaagaagcttttgatttcttggtggagatggtgaataagggtttcatgcctgagttttcatcctttcgaatgctagctgaaggtctattgaatctgggcatggatgattatcttattagtgctattgaactaattatagagaaggccaaattcagagaatctgatgtttctgctataagaggatatctcaagatccgcaagtattatgatgcattagcaactttcggccgtctcctagagataaacaaccctcagtggacgtatcgttgatacagcatgcctgagaatgtatcatgtaaatgatggagcagatgaaaaattccgcggttgctagattggcttaaacttttgcagcagtggtgtaatagatgttaatctcattgctctgtaggattgaagtcagctgaatttggaatgctctcttgcttttggagagctgctcatgtccactgtgaatcgtcttttgacgctcctgtatatcttgggttcttgcagaactggaagtattatcgtcgtcatgtgaatggaaaacatctttcatgttagtaacgaaaaatctgtgttacttaactatctgtaagacgttccttgcaaagaagatgaaaagaacatcgaggagaactccacggattcctgtgcggtgaatccactttggcatatcttgatcgcag

SEQ ID NO: 4033 - DNA, 2211 bp, Zea Mays
aaaaacctagcggctataacccctaatcctaccagtaatccccaacatgcctcctaccagaagaaggagaccgcgggaccagcgcgccgggagatgggttacaaggcgacgccgcgccggaacgtactttgggctctcaacaatgccgaggccaacggcgggacgacgtctgtgccgcggatggaggcggcgcccatgattaagttcagtgggaggcaggatgtggagcgcctgctaaaatgaagggcaaaagcaagagcgatttcaaggggagaatcaatcagatgagcgtctacatcaagaagctcagggcgtgcatccggtgcagttgaagatagctaatcgacaatgcaaggtcaaggcctctaccggttgtaacagattgaatgatagaatgattactttacaccgatgtcgctcctccacgagcccgcgcacgccgaggccgatcttcttttatggccaccgtgccccgcatcggaggtgccttaccctccgtcgcgcccgtggactggacgatgacttcgagtagaggcggcggtggctgcaacaatatctgcgatctacggtccacgcgacagcgacagaggccgaggggtcgcttgtacatcggcggaacctgttgctggaggagcttgcgtgtgaggtggggctctcgcccgaccggtggctctaggtgccgctgcccaaggtctggagtgtccgtgtcttcgcatgtatcggtgctgcctgatcgccgctcaattgagcgctagctaagcggtcttcatcgtggtcctcggtccacgcgacggcagcggaggctgaagggtcgctgctgcaccggcagaacctatcactagatgagatggcgggcgggtggggctctcccccgaccggcggctccgggtacagctgcccaaggccaggagtgtttgcgcttttgcctgcatcggcgccgcttgatcaccgcctcaatcgagcgccagctgtgctgccttgatcgctgccatgtaccctccgtgcctagaccccgcgtagtgcgggaagcctaggacacggggtacaccctttaacagatatccatctaagatgctcctgtctgcaattgatgagcttcacagaggaacttatgacttacctgccaattgatttcaagaacaaatgcaatgttggatacgcgttcgttaacatgatatcgtcggtgcacattatatcattctaccaggcttttaatggtaagaaatgggagaagttcaacatctagaaggtagcctcgttggcttatgctagaattcatggacggtctgcactgataagaggtgtcgcccgattctttttaatcccaatggttagtactctgaatcaggaagcatttccaatcaatggcatatgcatccacatgctttcgaaagatgattaccctgacaacgaagaagacgacaagggtctaaacgagaaggtaggagagagctcgaccgatatggctgagggtttgtgacgtctgatagcagacaggatcagaatggccatacatataaatctaactgtctagagagtatccacccccatattgtataaaaagcgtggaaagttgatggttagtgatgaattttgtggtctggtttggcatggcacatcttttggtttcagatgttgccccggaaatgaaagttgaagtgggagctaaagctgaagcgattagcttcgaactggagcttgtttgtcgaatcctccccctccccttctgttggtagtcgtgcttgtttttgcttgcttgctgaggggggtggaaccgctgctcctcatagtcttgtttgttattgcttgttataaaaaggtgaactgaactgaagaaaaaaaaaggttagccaaactgtacagtttagaacttttgtgcatattttgcattctggcgtcttaatgtgcagtgcagtaactgggccttgattatgcaaataattgatgtacacgttctttgcataattgtattcaaggtatctgaccaaaactcagaaagctgcacgcgtgctctcttttttgttcgtggttgattgtgccacaatttgtataaggttagtcgtctaaattgaagaattaaccttagacagaaaagttaggtaaaatatggtaagttaggtagagaatcaaacatgtctttacaattttctcgtataccagtttcctcaattgcaatattggaatgatttgatgcaaactgttccaacggac

SEQ ID NO: 4034 - DNA, 2199 bp, Zea Mays
ctagcggctataacccctaatcctaccagtaatccccaacatgcctcctaccagaagaaggagaccgcgggaccagcgcgccgggagatgggttacaaggcgacgccgcgccggaacgtactttgggctctcaacaatgccgaggccaacggcgggacgacgtctgtgccgcggatggaggcggcgcccatgattaagttcagtgggaggcaggatgtggagcgcctgctaaaatgaagggcaaaagcaagagcgatttcaaggggagaatcaatcagatgagcgtctacatcaagaagctcagggcgtgcatccggtgcagttgaagatagctaatcgacaatgcaaggtcaaggcctctaccggttgtaacagattgtttattgaatagaatgatagaatgattactttacaccgatgtcgctcctccacgagcccgcgcacgccgaggccgatcttcttttatggccaccgtgccccgcatcggaggtgccttaccctccgtcgcgcccgtggactggacgatgacttcgagtagaggcggcggtggctgcaacaatatctgcgatctacggtccacgcgacagcgacagaggccgaggggtcgcttgtacatcggcggaacctgttgctggaggagcttgcgtgtgaggtggggctctcgcccgaccggtggctctaggtgccgctgcccaaggtctggagtgtccgtgtcttcgcatgtatcggtgctgcctgatcgccgctcaattgagcgctagctaagcggtcttcatcgtggtcctcggtccacgcgacggcagcggaggctgaagggtcgctgctgcaccggcagaacctatcactagatgagatggcgggcgggtggggctctcccccgaccggcggctccgggtacagctgcccaaggccaggagtgtttgcgcttttgcctgcatcggcgccgcttgatcaccgcctcaatcgagcgccagctgtgctgccttgatcgctgccatgtaccctccgtgcctagaccccgcgtagtgcgggaagcctaggacacggggtacaccctttaacagatatccatctaagatgctcctgtctgcaattgatgagcttcacagaggaacttatgacttacctgccaattgatttcaagaacaaatgcaatgttggatacgcgttcgttaacatgatatcgtcggtgcacattatatcattctaccaggcttttaatggtaagaaatgggagaagttcaacatctagaaggtagcctcgttggcttatgctagaattcatggacggtctgcactgataagaggtgtcgcccgattctttttaatcccaatggaagcatttccaatcaatggcatatgcatccacatgctttcgaaagatgattaccctgacaacgaagaagacgacaagggtctaaacgagaaggtaggagagagctcgaccgatatggctgagggtttgtgacgtctgatagcagacaggatcagaatggccatacatataaatctaactgtctagagagtatccacccccatattgtataaaaagcgtggaaagttgatggttagtgatgaattttgtggtctggtttggcatggcacatcttttggtttcagatgttgccccggaaatgaaagttgaagtgggagctaaagctgaagcgattagcttcgaactggagcttgtttgtcgaatcctccccctccccttctgttggtagtcgtgcttgtttttgcttgcttgctgaggggggtggaaccgctgctcctcatagtcttgtttgttattgcttgttataaaaaggtgaactgaactgaagaaaaaaaaaggttagccaaactgtacagtttagaacttttgtgcatattttgcattctggcgtcttaatgtgcagtgcagtaactgggccttgattatgcaaataattgatgtacacgttctttgcataattgtattcaaggtatctgaccaaaactcagaaagctgcacgcgtgctctcttttttgttcgtggttgattgtgccacaatttgtataaggttagtcgtctaaattgaagaattaaccttagacagaaaagttaggtaaaatatggtaagttaggtagagaatcaaacatgtctttacaattttctcgtataccagtttcctcaattgcaatattggaatgatttgatgcaaactgttccaacggac

SEQ ID NO: 4035 - DNA, 2647 bp, Zea Mays
ctagcggctataacccctaatcctaccagtaatccccaacatgcctcctaccagaagaaggagaccgcgggaccagcgcgccgggagatgggttacaaggcgacgccgcgccggaacgtactttgggctctcaacaatgccgaggccaacggcgggacgacgtctgtgccgcggatggaggcggcgcccatgattaagttcagtgggaggcaggatgtggagcgcctgctaaaatgaagggcaaaagcaagagcgatttcaaggggagaatcaatcagatgagcgtctacatcaagaagctcagggcgtgcatccggtggtacatggagctggttattctgttgatattctgtagcttacttaggtcatggttgctcgtattatctgcatagtagtctgtctatatttgattgacacagtaacgagctctattgctcaatgacgagcattctaatattcaaggatgtggtagagtagtcacagagattccctgcttcacacagtttggtcatagattagacatttgtgctttccgactgtactttttttccagctgttgttgctcattacctcacacacttagataagttgaaacttattgaccttacatgtgtatctgaattttcttgcttgctccctgcctcacgcttagattagttgaaagttgacatttgttgcccctacacgtgtatgattttcttggtccctctaaatatcatagctcatgacatctcctgtttacactgcagcagttgaagatagctaatcgacaatgcaaggtcaaggcctctaccggttgtaacagattgtttattgaatagaatgatagaatgattactttacaccgatgtcgctcctccacgagcccgcgcacgccgaggccgatcttcttttatggccaccgtgccccgcatcggaggtgccttaccctccgtcgcgcccgtggactggacgatgacttcgagtagaggcggcggtggctgcaacaatatctgcgatctacggtccacgcgacagcgacagaggccgaggggtcgcttgtacatcggcggaacctgttgctggaggagcttgcgtgtgaggtggggctctcgcccgaccggtggctctaggtgccgctgcccaaggtctggagtgtccgtgtcttcgcatgtatcggtgctgcctgatcgccgctcaattgagcgctagctaagcggtcttcatcgtggtcctcggtccacgcgacggcagcggaggctgaagggtcgctgctgcaccggcagaacctatcactagatgagatggcgggcgggtggggctctcccccgaccggcggctccgggtacagctgcccaaggccaggagtgtttgcgcttttgcctgcatcggcgccgcttgatcaccgcctcaatcgagcgccagctgtgctgccttgatcgctgccatgtaccctccgtgcctagaccccgcgtagtgcgggaagcctaggacacggggtacaccctttaacagatatccatctaagatgctcctgtctgcaattgatgagcttcacagaggaacttatgacttacctgccaattgatttcaagaacaaatgcaatgttggatacgcgttcgttaacatgatatcgtcggtgcacattatatcattctaccaggcttttaatggtaagaaatgggagaagttcaacatctagaaggtagcctcgttggcttatgctagaattcatggacggtctgcactgataagaggtgtcgcccgattctttttaatcccaatggttagtactctgaatcaggaagcatttccaatcaatggcatatgcatccacatgctttcgaaagatgattaccctgacaacgaagaagacgacaagggtctaaacgagaaggtaggagagagctcgaccgatatggctgagggtttgtgacgtctgatagcagacaggatcagaatggccatacatataaatctaactgtctagagagtatccacccccatattgtataaaaagcgtggaaagttgatggttagtgatgaattttgtggtctggtttggcatggcacatcttttggtttcagatgttgccccggaaatgaaagttgaagtgggagctaaagctgaagcgattagcttcgaactggagcttgtttgtcgaatcctccccctccccttctgttggtagtcgtgcttgtttttgcttgcttgctgaggggggtggaaccgctgctcctcatagtcttgtttgttattgcttgttataaaaaggtgaactgaactgaagaaaaaaaaaggttagccaaactgtacagtttagaacttttgtgcatattttgcattctggcgtcttaatgtgcagtgcagtaactgggccttgattatgcaaataattgatgtacacgttctttgcataattgtattcaaggtatctgaccaaaactcagaaagctgcacgcgtgctctcttttttgttcgtggttgattgtgccacaatttgtataaggttagtcgtctaaattgaagaattaaccttagacagaaaagttaggtaaaatatggtaagttaggtagagaatcaaacatgtctttacaattttctcgtataccagtttcctcaattgcaatattggaatgatttgatgcaaactgttccaacggac

SEQ ID NO: 4036 - DNA, 963 bp, Zea Mays
gttcgtgttatctcatttttttgtcttatggtgcatatacaccacgattcctgtgtggtggtacttaaactgagtgcttggtgttgcataacacaaaaaacatcaacaagcctgatttcattgcagataatcttggcattgctgcttattattttgattttataatagtgtctcatgggcagatttattgagactgagaatttgagattgactgcttccagaggatgacacatcctatttctatcctggccttatttttagttgacaattggtcatttatgttcaattgaatgcttaaacaaaaggatgtattaatggaattggttgtttgggatgggagataagagactacagatgagaaagatgagtttagttgacacatgacagtttcattacaaaataaataaactcttggcagttttttattattgttaagcaaaaataacaagcaaaaaaataagcacaatttatttaagattaatctgaaagggaaaccatacaaaagtatggattaacttgatctgcagatatgttgttccataatgcatctggttaattcactgagttaatgcatctggattaacttgatctacagctagcatggaaatgaactaataaaaagagaaataacaaaaaacaatgaactcatacagccaatagggtaaaagaaaggaaagtacctgccagccgaggaatctgcagcagtaaaatgcacacctgtcaaccgtcacatgaaatgctgctacttgtccagacacctatataacacagcacaccagcatcactgactaaccagatcctccaccacatgtaccaaataaacacaagtagtctcttaaacagttatcgtgtatttaatatgcacgttgacagcaatgatagatcagataaggagaaaattccagaaactacaagtggagtaaaaaatgcacaaatatattacacgtatgtctatgccaatat

SEQ ID NO: 4037 - DNA, 2016 bp, Zea Mays
ctcagttctcagtatgccccggccccgtcactagaagtcaacggccgttcagttccttccccgctccgtccttcggcatgcttctactcagcccctcgccgcccttctactcagcccctcgccgccgtctaccgccgcagcggtaacggtcccccgccgtgtcctccttactccctacaaccgcctcaaggctacgcccaccccaccgcgcctcgcctgcctccgccttcggcccgccaccccgctccgcggcatttcgtcgaggaccgcgtgccgcgcggccgctgccgatgccgatgccgatgcagtgccctcccaagctcctggaggcgatggtggcgtgcgtggcgcaatggtgcgcattggggaggctctatcgcttgggttcccggtgtgggtggcatcagcctgcgccctcgcgctgtggcggccgccggccttcctctgggtcgggcccaccgcgcagatgcttggcctctccttcacaatgcttggtcggggccttcctttccttagttccgttccccccgctagtacttgtttctacccatcttagtgctgtctcagtgtctcgtgccacttcttccaagttgactcaaactctacttcccctgtgggcttattagctctgttgatgtcctctacatgatattaaaacagctgctggcaatgagatcactgagtaaaggaaattatatctcaaaatgaaaaaatgacagacaagtgattaggagaaaagaagacaaagatttttaaaaagaaccgtacaatttcagtactctagcacaatccttcatcttttgcatattctcactttgatacgagttgttggctttctagtttctataaaatgttctctttactgtgccattatggtggaggcaacaggattaaattctcgagcactcttcagttcatggatacgatcaacacaatcttgcactcacgtctgttccactgtacatgtgcaaactgaggggtgtttactttcttgtgtgtggacatattattcacccctgttttcatttgggggtcattgcatttatagatgtgtaattgatatatgatttatacctacaggaatgggaatgacgttgactttggatgacctcaaaaccacattattgatgcccaaggagttggctgctggatttatactgcaatacacggtcaggtccccccatttttgttcttcatatgtctgaattcttgtaaccatattctctgatttcaaaatacatatacatttactctattgatgcataatgttagtgtattttgtagttaggattagagttttccttgcacagactccattaagagggggtccaaatgactacgtgagttttttttaactgacatgactacatgagttgatgatttggtatgttgaagattgaatcctgatcattgaggctggcagattagaagagagggaatcaaatgaagttgtcagatagcacagtcatgctatggtccatggtccatgttgtagtgctagtagattcagccatctagtacgatataaatttatagtagtcgttgacactgatttggatcacagactagtaagagttagtacatctctgatcgacacacaccttgaacacgaggaacatagtggatcgttgaaatcgatcgggggggtcagttaggccgatgttgatcctgttcttcgtctggtatactctcgagcacctccagggaagacctatcggggaggagcacacaaaggttgtcctaggatcagcaaggccacctagaacaccactaaatcttttcggaagatgtgacaaacaataaggtagagaggagagagtgtgtaaaaggtctagtagattgatttttgacgattgaaagttgggatacttaatcggtgataatcaacagggcacccggccgacttcatccccacctggccggctttggtcactcgtcctgaccagcttagagggacggccaggccaatttctgtagggcagcaccgctagggctggaaaataagctcgaggctcg

SEQ ID NO: 4038 - DNA, 2210 bp, Zea Mays
ctcagttctcagtatgccccggccccgtcactagaagtcaacggccgttcagttccttccccgctccgtccttcggcatgcttctactcagcccctcgccgcccttctactcagcccctcgccgccgtctaccgccgcagcggtaacggtcccccgccgtgtcctccttactccctacaaccgcctcaaggctacgcccaccccaccgcgcctcgcctgcctccgccttcggcccgccaccccgctccgcggcatttcgtcgaggaccgcgtgccgcgcggccgctgccgatgccgatgccgatgcagtgccctcccaagctcctggaggcgatggtggcgtgcgtggcgcaatggtgcgcattggggaggctctatcgcttgggttcccggtgtgggtggcatcagcctgcgccctcgcgctgtggcggccgccggccttcctctgggtcgggcccaccgcgcagatgcttggcctctccttcacaatgcttggtcggggccttcctttccttagttccgttccccccgctagtacttgtttctacccatcttagtgctgtctcagtgtctcgtgccacttcttccaagttgactcaaactctacttcccctgtgggcttattagctctgttgatgtcctctacatgatattaaaacagctgctggcaatgagatcactgagtaaaggaaattatatctcaaaatgaaaaaatgacagacaagtgattaggagaaaagaagacaaagatttttaaaaagaaccgtacaatttcagtactctagcacaatccttcatcttttgcatattctcactttgatacgagttgttggctttctagtttctataaaatgttctctttactgtgccattatggtggaggcaacaggattaaattctcgagcactcttcagttcatggatacgatcaacacaatcttgcactcacgtctgttccactgtacatgtgcaaactgaggggtgtttactttcttgtgtgtggacatattattcacccctgttttcatttgggggtcattgcatttatagatgtgtaattgatatatgatttatacctacaggaatgggaatgacgttgactttggatgacctcaaaaccacattattgatgcccaaggagttggctgctggatttatactgcaatacacggtgatgccactgtctggattttttgtgagcaaactgttgaaattgccgtcccattatgccgctggactaattttagtggcctgttgccctggaggcacagcgagcaacatcgtgacctatttagcaagggcaaatgttgctctttcagttctgatgacagcagcaagcacttttgctgcagcgttcatgacccctctcctgacgtccaaactcgctgggcagtatgtcgcagtagatccaatgggactgttcgtgtccacatctcaggtcgtcctggcacctgtccttctgggtgctctgcttaatcagtactgcaatggtctggtccaactggtgtccccgttgatgcccttcattgcggtagcagcagtagccgtcctctgtggcaatgctattgcgcagaatgcttcggcagtcctggcatctggctcgcaggtggtcttgtctgtcggttgcttgcatgcatctggctttttcttcggctacgttctctcaagagtacttggcatcgatacctcctccgcgagaacaatctctattgaggttggtatgcagaactcagtgttgggccttgtccttgcaaacaagcacttgggcaaccctctcacggctgttccgtgtgctgtttcgagcatctgccactcggtctacggtagcattttggctgggatctggaggtctatgccaaacaaggacaagggagaatgatgcgatgatcaattcaaccatcagaattctttgttctccaacgatgaaagattttacccgtgagaataaacaccgcagagtggtgagcgctatataaaagcactgggcttgcactgttgttagtggttcatttgctttcttagattcggatagtacagttggtggatccatgattgatgtggatacatataccatgttgccatggcagcctgtttatcacacattcacttcaactagaacattgcggcgccctcacgggcgccctaccaagactcactcttttatgcaagaaacaacgaccaataaaacaaaggcctaaccctttgaattaac

SEQ ID NO: 4039 - DNA, 1302 bp, Zea Mays
cctggaggcgatggtggcgtgcgtggcgcaatggtgcgcattggggaggctctatcgcttgggttcccggtgtgggtggcatcagcctgcgccctcgcgctgtggcggccgccggccttcctctgggtcgggcccaccgcgcagatgcttggcctctccttcacaatgcttggaatgggaatgacgttgactttggatgacctcaaaaccacattattgatgcccaaggagttggctgctggatttatactgcaatacacggtgatgccactgtctggattttttgtgagcaaactgttgaaattgccgtcccattatgccgctggactaattttagtggcctgttgccctggaggcacagcgagcaacatcgtgacctatttagcaagggcaaatgttgctctttcagttctgatgacagcagcaagcacttttgctgcagcgttcatgacccctctcctgacgtccaaactcgctgggcagtatgtcgcagtagatccaatgggactgttcgtgtccacatctcaggtcgtcctggcacctgtccttctgggtgctctgcttaatcagtactgcaatggtctggtccaactggtgtccccgttgatgcccttcattgcggtagcagcagtagccgtcctctgtggcaatgctattgcgcagaatgcttcggcagtcctggcatctggctcgcaggtggtcttgtctgtcggttgcttgcatgcatctggctttttcttcggctacgttctctcaagagtacttggcatcgatacctcctccgcgagaacaatctctattgaggttggtatgcagaactcagtgttgggccttgtccttgcaaacaagcacttgggcaaccctctcacggctgttccgtgtgctgtttcgagcatctgccactcggtctacggtagcattttggctgggatctggaggtctatgccaaacaaggacaagggagaatgatgcgatgatcaattcaaccatcagaattctttgttctccaacgatgaaagattttacccgtgagaataaacaccgcagagtggtgagcgctatataaaagcactgggcttgcactgttgttagtggttcatttgctttcttagattcggatagtacagttggtggatccatgattgatgtggatacatataccatgttgccatggcagcctgtttatcacacattcacttcaactagaacattgcggcgccctcacgggcgccctaccaagactcactcttttatgcaagaaacaacgaccaataaaacaaaggcctaaccctttgaattaac

SEQ ID NO: 4040 - DNA, 1226 bp, Zea Mays
cgcaatggtgcgcattggggaggctctatcgcttgggttcccggtgtgggtggcatcagcctgcgccctcgcgctgtggcggccgccggccttcctctgggtcgggcccaccgcgcagatgcttggcctctccttcacaatgcttggaatgggaatgacgttgactttggatgacctcaaaaccacattattgatgcccaaggagttggctgctggatttatactgcaatacacgattggctactggcacttgaactgagaaggaaaacgtatctgcaggcacagcgagcaacatcgtgacctatttagcaagggcaaatgttgctctttcagttctgatgacagcagcaagcacttttgctgcagcgttcatgacccctctcctgacgtccaaactcgctgggcagtatgtcgcagtagatccaatgggactgttcgtgtccacatctcaggtcgtcctggcacctgtccttctgggtgctctgcttaatcagtactgcaatggtctggtccaactggtgtccccgttgatgcccttcattgcggtagcagcagtagccgtcctctgtggcaatgctattgcgcagaatgcttcggcagtcctggcatctggctcgcaggtggtcttgtctgtcggttgcttgcatgcatctggctttttcttcggctacgttctctcaagagtacttggcatcgatacctcctccgcgagaacaatctctattgaggttggtatgcagaactcagtgttgggccttgtccttgcaaacaagcacttgggcaaccctctcacggctgttccgtgtgctgtttcgagcatctgccactcggtctacggtagcattttggctgggatctggaggtctatgccaaacaaggacaagggagaatgatgcgatgatcaattcaaccatcagaattctttgttctccaacgatgaaagattttacccgtgagaataaacaccgcagagtggtgagcgctatataaaagcactgggcttgcactgttgttagtggttcatttgctttcttagattcggatagtacagttggtggatccatgattgatgtggatacatataccatgttgccatggcagcctgtttatcacacattcacttcaactagaacattgcggcgccctcacgggcgccctaccaagactcactcttttatgcaagaaacaacgaccaataaaacaaaggcctaaccctttgaattaac

SEQ ID NO: 4041 - DNA, 2032 bp, Zea Mays
tccatagttctatgtccatcatggaacaatccaaccaacgagctttttgtgggaccaactcatccaaaaaaacgtccacaggtgttctacatggttgggttccataccagtcaatcgaacaaaccaaacacgctgtagagttacctacatgtcgagtttccacacctgtcggttcaaaaaacctaccccacaacatctggcataagaaacatggttacttcattgttcccaatactggcaacaatcctcgaaacctgaaataagttctagtgaattgcacagcgaaaaccaaaaaaagaaaaaaaaaaccttgtggaatgaactacgcgaaagtttcgacgagttggagcctgaccccaagtccccacatatcacatcatgattgagtcataagtgcatcctgaaaaccacttgtaagaaattatctaaacaccaaaaaaaacatggttattgttgttttaagtggatgaaaaacatataaaatattaaaccatactgcttacatcttcattgtctgagacttactacagctgcagagtgtcccttgtaaaatttggcgcatcttctgtttataagcatatttaatcggtgatgacatggatacgtattttatgtttttcccctccatgttcaacaaaatcccagagtgagcgatttatgtacaggtgatgccactgtctggattttttgtgagcaaactgttgaaattgccgtcccattatgccgctggactaattttagtggcctgttgccctggaggcacagcgagcaacatcgtgacctatttagcaaggtaatgaaaaaaaatagcgacatgccaaggataaatgccgtcacaggccttgttaaaactttagaacaataattatctggttggtgacaattcgtgaaatgttggcagaacgatatatttgaagtgattaaatgaatgtcaaggtggtgaatattcttgaattcttcagtggatataactgactggtgttgaaaattaacttgaaataagttagtgcattcgcatctggttcaaattcaatggaggcaaataataattaaaaaaattcaacagccaattgtgctgaaaagtaaagagacttagataaactaatgttcgaattgcagggcaaatgttgctctttcagttctgatgacagcagcaagcacttttgctgcagcgttcatgacccctctcctgacgtccaaactcgctgggcagtatgtcgcagtagatccaatgggactgttcgtgtccacatctcaggtcgtcctggcacctgtccttctgggtgctctgcttaatcagtactgcaatggtctggtccaactggtgtccccgttgatgcccttcattgcggtagcagcagtagccgtcctctgtggcaatgctattgcgcagaatgcttcggcagtcctggcatctggctcgcaggtggtcttgtctgtcggttgcttgcatgcatctggctttttcttcggctacgttctctcaagagtacttggcatcgatacctcctccgcgagaacaatctctattgaggttggtatgcagaactcagtgttgggccttgtccttgcaaacaagcacttgggcaaccctctcacggctgttccgtgtgctgtttcgagcatctgccactcggtctacggtagcattttggctgggatctggaggtctatgccaaacaaggacaagggagaatgatgcgatgatcaattcaaccatcagaattctttgttctccaacgatgaaagattttacccgtgagaataaacaccgcagagtggtgagcgctatataaaagcactgggcttgcactgttgttagtggttcatttgctttcttagattcggatagtacagttggtggatccatgattgatgtggatacatataccatgttgccatggcagcctgtttatcacacattcacttcaactagaacattgcggcgccctcacgggcgccctaccaagactcactcttttatgcaagaaacaacgaccaataaaacaaaggcctaaccctttgaattaac

SEQ ID NO: 4042 - DNA, 1309 bp, Zea Mays
tttttttccaacagtccctaataaaatattttgggaagaattttttagggaatttttggagttgccgtaagtccctgatcatttccacgaaggcttttctcaccggaaaaagatcggaattccggcgggaatataggccgccaaagtaggacctcgcaaaaggcggctaccaaaacgctccgttgcctttcctttccccacttccccggctcctgcctcccgccgccgacaccaccaaaaaccctagcagctccaccccgccgccgccgccgccgccatggatgaccctcggatgttcccatcaggatccgacgaccgctccgacgccgaacgccggctgtacaacccgtaccaggacctcaacatgccctacagctaccggacgctctacgacctccccacttcgccggagttcctcttccaggaggaggccctggcgcaacgacgctcgtggggtgagaacctcactttctatacgggcgtcgggtacctctccggcgccgttggcggcgccgtcctgggcctccgcgacgccgccaggggcgctgagcccggggagaccgccaagatccgcgccaaccgcgtgctcaacgcctgcggcagctctggccgccgcgtcgggaatacgctgggcgtcattggcctcatgtacgccgggatcgagagcgccatggtcgcgggcgccctcggtgggatcctagccgccgccgccgcggggggcaagcagctagccaagagatacgtgaatgtcatatgatcgtgttttttttgtggtagcaatgatgagcgaacaatgatatcgtctagtgctctagtagggaaggggtttgccttttctgaaaactagctgagggcttgttcggttctaccccaatccatatggattgaggggtcaaaatcacctccaatccatatcaatcccctccaatccatatggattgaaaataaccgaacaagccctgaatgggaaattttgagcttgcattggaattgcaatgcaacatcgtgcttcaagatgctttagttctgctttgtccttatatgttaagggctagatgaaggtatttttatctccttgtttggatgcacatgtattgtcgtcaatccatttcatgttctcaatccatacatagaaaagtggattagggtgaacgttagtttaaattctaactaaatccacttctcacacatatggattgctaaacatgcccttagagtgtgtgtgtgtgtgtgtgttgtggtgatgtgtggagtgaaattctctgagatttgacactgcacccttaagtttagtgcctttgagataagc

SEQ ID NO: 4043 - DNA, 1746 bp, Zea Mays
ggcggcccccatgggttccgtgcaggtgcagcgtgtcgccactgactccgcgtccgtccgtcccccatacggccacgcctctgggtctcccgcgctgccatggacgggggaagagagcagcaggcgccgccggagtcgcagcccggtaagaacctcatcaagatcccgtcctatcaggaggtcttcggcaccggcgcctccacctcttcctcgaagccgccatcctacaaccctcctgtagccacctccgccgccgccgccgcttcatcctcgtcgtcgtcctcgggatcattctcgcaggctttttctttcctcaagtcctccgagttctactcacctccgccgccgccgcctccccagcccaccaccaccccgaggccgactcaagctagcccctcagcgccgactccccaaagcaagaactccattctcgtcagtcataggcagagaggaaaccctctgctgaagcacattaggaatgctagatggacgttcgccgatgtcgtgccggactatgtgcttgggcaatcgtcatgtgccttgtacttaagtatcaggtaccatcttctacatccagactacttgtactatcggataagagagctgcagaagaatttcaggctgcgtgtcatcttgtgccatgttgatgttgaagatgtaatcaagcctttgcatgaaattacaagaacagcgctgcttcatgactgcacccttttgtgtggttggagcctggaggaatgtggtcggtacttggagactattaaagtatatgaaaacaagccagctgacagtattcgtgagcacatggataacgactatctatcacgggtatatatacttcctgggaaccctctccagaacaagataatttgatgatctatgtcatcggttgatgaggaaaactgttgacgcacgggcttacatccattcggcatgttaataaaacggacgttgtcacactcggttcatcttttgggtcgctctcacagatcatgaatggttctatggacgagctggctcgatgcccaggaatcggtgagcggaaggtaaggcggctctatgataccttccatgagccgttcaaacgggttcctgcccgaccacgaccaaacctcgtagtacccgataccccggaccgggagaaagcaaaaggccaaccttcgtctacagatggcagcagtttgcaagatgcggtagagaagccagatgcgtcgaagaagacgaagaaaggctctgatgtaagatcagccctcaccgttgcctttgccaagtattcggagaagatccgcagtcagggccgcgatgcgccaaacgaggccggtgagagtactggcggctcgaccgtggaagctgagagggcgggagactagatttagctgtaggatggttaacggtgctggagtaatgctagtttgttccttcctgttgggtgcttgttgttgtgactcggccgccgatttgcgcgtgcggcaccagtatttcccgcggcgtcctaggcatgtgtttttttaggctaaagaggggccagagaatcttcaacgatatcgaaacatttaagtgagattcctagacggtggcagccattccatcaccatataaatcacacttagaatctctctaaaacataatctgtattgccttctctacctcttaatatatttatatctctaaaacataatctgttgggtgctatatcctttccggcttcagttccaaaattaaaaagggaaaagaaaaagaaagaaa

SEQ ID NO: 4044 - DNA, 1161 bp, Zea Mays
cagccgtccacagcatcgagagtctcccagccacagaagatcctggcatcgcctataaattgcccatcacctcatgttcccttccccgcaccgctctgaaaaccattcccaggcccgcccgacttcctgcccttgtacaacgcacggtccccgtcccaatggcccagactctgtccgccgcctccgagctggccaccctgaagcgcccgttcggcaacgacgggttcggcgatggcagcaacaacggcagcgccaccggcgagaagcccaaggcgcggcggcgggaggcggacccggcggcggcgctggccgcggcgcggcacgagttcggcgagcacggcggcgtgaacatgtccatcgaggcgtcggcgacgttcacggtgatggagccggacacgatgcggcggctgttcgcgggcgagctgggccccgaccgcggcgacatgtacatctacagccggcacttcaacccgacggtgctggcgctggggcggcagatggcggcgctggagggcacggaggcgggctactgcacggcgtccgggatgtccgccatctcgtccgtgctgatgcagctggtgggcgccggcgggcacgtggtggcgtcgcggtgcctgtacggcgggacacacgcgctgctggcccggttcctgccgcgcgcctccggggtgcgcgccaccttcgtggacgccgacgacgaggccgccgtgcgcgccgcggtggtccccggcgagacgcgggtggtgtacgtggagaccatgtccaacccgacgctcgccgtcgccgacatccccatgctggcgcgggtggcgcacgaggccggcgccaagctcgtggtggacaacaccttcacccccgtggtggtgtcgcccgcgcgcctcggcgccgacgtcgtcgtccacagcgtctccaagttcatcagcggcggcgccgacatcatcgccgactggatgcgaaggcgacgacgatgacaacgatcaaggccccaagcgacaaggtacagagtcacgcgggcgcggttggtctcgcctagtcacgtagctagaatccccttggccgcgggaacgtgacgtggtgtgacccaccccatcgtctgtgcctggcacgctccatgtgtggcaggtcaggtctggccaaggccaggacgggcgcggcggggcc

SEQ ID NO: 4045 - DNA, 1024 bp, Zea Mays
cagccgtccacagcatcgagagtctcccagccacagaagatcctggcatcgcctataaattgcccatcacctcatgttcccttccccgcaccgctctgaaaaccattcccaggcccgcccgacttcctgcccttgtacaacgcacggtccccgtcccaatggcccagactctgtccgccgcctccgagctggccaccctgaagcgcccgttcggcaacgacgggttcggcgatggcagcaacaacggcagcgccaccggcgagaagcccaaggcgcggcggcgggaggcggacccggcggcggcgctggccgcggcgcggcacgagttcggcgagcacggcggcgtgaacatgtccatcgaggcgtcggcgacgttcacggtgatggagccggacacgatgcggcggctgttcgcgggcgagctgggccccgaccgcggcgacatgtacatctacagccggcacttcaacccgacggtgctggcgctggggcggcagatggcggcgctggagggcacggaggcgggctactgcacggcgtccgggatgtccgccatctcgtccgtgctgatgcagctggtgggcgccggcgggcacgtggtggcgtcgcggtgcctgtacggcgggacacacgcgctgctggcccggttcctgccgcgcgcctccggggtgcgcgccaccttcgtggacgccgacgacgaggccgccgtgcgcgccgcggtggtccccggcgagacgcgggtggtgtacgtggagaccatgtccaacccgacgctcgccgtcgccgacatccccatgctggcgcgggtggcgcacgaggccggcgccaagctcgtggtggacaacaccttcacccccgtggtggtgtcgcccgcgcgcctcggcgccgacgtcgtcgtccacagcgtctccaagttcatcagcggcggcgccgacatcatcgccggagtagtgcactgcaccgcgtggcttttgtcctggctcctgaccctgccacgtacgacgaaccgcatggcgtcaggacg

SEQ ID NO: 4046 - DNA, 694 bp, Zea Mays
aaaatgtcaaaataaggtcttattggtttgtgccggattggtgggtcggaacgcttcctgaccggattgcttctctaatttatataaactttgattagctggaacaatttcaagtataatctgacacaaacgaacaagccctaaattaccgtaccggtcaaacagattattgctataatataataataaataccggggtaataggataaatcggcagaccgtacatgagtgattacgacatgacacatgtgtccaccgcggcatcgctatccccagtagccgtggatcaatttggtaacggaggaagcacgtgcgcctttacattgtctagtcaaaagttccattgtcagggtttttgctgggctcagatcgctaagctgatctgcgctctcgactaacacaatttgctgcggtttttgtttatttgaatgtttttgaatacacaaaatagtggtgtagtaatagaccggagttacgtgaccgcctacatatttttataggcaaaaaaaataggcagaacacaccctgtacttgtaactgacgtgcattgcgctccctacatgtggagactggatgcgaaggcgacgacgatgacaacgatcaaggccccaagcgacaaggtacagagtcacgcgggcgcggttggtctcgcctagtcacgtagctagaatccccttggccgcgggaacgtgac

SEQ ID NO: 4047 - DNA, 1877 bp, Zea Mays
ttctatctcttctctctcactcccatctcttccaccaggacgaagccgccgccgcctctgccagcgcacccgcctcgcccccgctcgctgcggccgcctctgccagcgcacccgccccgcccccacccgccgcggccgccctcgcccgttgctctcgccgacgcggccacctccggccccgcccgccgtggccgccctgctgtacggctacaagaacaacaacctcaagtggctggagcgcttcgcctacatcaacaccaccatctaccccttcgccttgctcccactgctcgcctactgtaccctgccagccgtctgcctcctcaccggcaagttcattatgccgtcggtcagtaccaccgccttctgttggttctttctacctcagcaatcggcatgcagagcctcaaaaacttaaccacccgttcgaacattgccagcctctgacatgacaccctgctgtaggtgaataaattaggtggccatctgaagcataaattaggaagttccttatagtgcatgtaaatttacttttcccaatgtagctgctgtcttgcccaagaatcaagctaatttctttactttaattaggaagttatcaggtgcatgtcatctcatcttctttgacgtaatggtgtcatgagcatactttaattaggtggatgcgtgcaggtcacaggatcttcaggggctgtagcctgcaggaaaagagggcttttgataatactgagagatgagataatgaatttggtggccgagcctcacatggtgatggtgatccttgtaccttgtccttctctggttcatccataggcgcatgagaggctgctgcatttatcatcgggggctatccgggtctggaccggagctaggaatttatgaggttttgtcactctctagcagaccagctggcaagtggcaactgaacttctgttatttatcaattaaaagaaagaaacttaacttgtgatcgagaaaaaaaagaaaacaacttattagcaaagtatgtattcacatgatcacatccatgttatggctactgggtctattcttttagacaaggattaccccccatgattaatctgactttggtctcccttatcattagaatctagtgagcacgattcttttttttaaaaaatatattagaaatagtaagtacaaacctcttcttgttaattaccctacgaatttgatatgtttcatattaggttcctttataatttatgttcacacacgctaatcaagctaatttctttactttaataaataactataattggtttttgcagcaagaatcttgaagtgagaattgggagaaggaaatggttcttgaagatatgaaaagggaggaagatttgctgaaacaagttaaggaattatacaggaagcagaagcaagagctcatggattatgtcactcaaccagcagcgacacagacgtcacgtgattcgccagcaactcattcacccgcaactcctgagagtaatctgtttggagccaagctctccaacaagtggcggtaacattttggtggcgtacgtccctattttgttggggcttattgcctgttctggcatcagcacgacgtaactagcttttgccacaagcttggtgttagtttgtgagggtgataggccagtgaaattgttctgctgcttagcatagttggccctatggataccaattgatctataggcagccggaaacttggctaatttattatgactatggatgagacttttgtgatgtaattgatgagactattgatttaaatattgttatatgattgtgtgtgagatgttttatatgaaaatatgttgtgatgttgatatatttgttatgttgtgggatgtggtgtaaaataaaaataaaca

SEQ ID NO: 4048 - DNA, 725 bp, Zea Mays
cattgccagcctctgacatgacaccctgctgtggatgcgtgcaggtcacaggatcttcaggggctgtagcctgcaggaaaagagggcttttgataatactgagagatgagataatgaatttggtggccgagcctcacatgcaagaatcttgaagtgagaattgggagaaggaaatggttcttgaagatatgaaaagggaggaagatttgctgaaacaagttaaggaattatacaggaagcagaagcaagagctcatggattatgtcactcaaccagcagcgacacagacgtcacgtgattcgccagcaactcattcacccgcaactcctgagagtaatctgtttggagccaagctctccaacaagtggcggtaacattttggtggcgtacgtccctattttgttggggcttattgcctgttctggcatcagcacgacgtaactagcttttgccacaagcttggtgttagtttgtgagggtgataggccagtgaaattgttctgctgcttagcatagttggccctatggataccaattgatctataggcagccggaaacttggctaatttattatgactatggatgagacttttgtgatgtaattgatgagactattgatttaaatattgttatatgattgtgtgtgagatgttttatatgaaaatatgttgtgatgttgatatatttgttatgttgtgggatgtggtgtaaaataaaaataaaca

SEQ ID NO: 4049 - DNA, 983 bp, Zea Mays
tagtgcatgtaaatttacttttcccaatgtagctgctgtcttgcccaagaatcaagctaatttctttactttaattaggaagttatcaggtgcatgtcatctcatcttctttgacgtaatggtgtcatgagcatactttaattaggtggatgcgtgcaggtcacaggatcttcaggggctgtagcctgcaggaaaagagggcttttgataatactgagagatgagataatgaatttggtggccgagcctcacatggtgatggtgatccttgtaccttgtccttctctggttcatccataggcgcatgagaggctgctgcatttatcatcgggggctatccgggtctggaccggagctaggaatttatgaggttttgtcactctctagcagaccagctgcaagaatcttgaagtgagaattgggagaaggaaatggttcttgaagatatgaaaagggaggaagatttgctgaaacaagttaaggaattatacaggaagcagaagcaagagctcatggattatgtcactcaaccagcagcgacacagacgtcacgtgattcgccagcaactcattcacccgcaactcctgagagtaatctgtttggagccaagctctccaacaagtggcggtaacattttggtggcgtacgtccctattttgttggggcttattgcctgttctggcatcagcacgacgtaactagcttttgccacaagcttggtgttagtttgtgagggtgataggccagtgaaattgttctgctgcttagcatagttggccctatggataccaattgatctataggcagccggaaacttggctaatttattatgactatggatgagacttttgtgatgtaattgatgagactattgatttaaatattgttatatgattgtgtgtgagatgttttatatgaaaatatgttgtgatgttgatatatttgttatgttgtgggatgtggtgtaaaataaaaataaaca

SEQ ID NO: 4050 - DNA, 1838 bp, Zea Mays
acgtttcctagggcacggtaatgccatgccgtgagagcaagagaggaggtagggaaaaggaagttggctttcctggcggcggcgcgctgcagcctggtctttcggccgtgctgcagcctggtctttcggcgctcgcgaattcctggccgtcagctgcgcaacctcctctagttcggctccataactatggagatttgctccctgctcagcaactcgcctaaaatcgctagctctctgttcctattcctcctctcggttccagtcacggtttggatcgattccttcgattcttggtgttctggtgttaatcctgctggtggaagaaggtggaggtggccctgcttgtgcgcagcgcggttttcctgcgctccgttgtctcaccagtgcacctgtgtggtgctctgtctgttctgattattgtccaccgtggactggtgcctgggctccctgttgcgtggtgttcgtcttctcgggctggtgtcgtggacgtctccctcggctccggcagcggctctagtatctccgtcaacctcccgccgtgcaggcccggacgtgggcgacggaattggttttctgggacagaaccttgtgttcgctgagctggtcttcccacgtagacaatctacgtgttgtgagttattcgttgtcttactttatttactgtttaattttgtgcaatctgctagtatcaaatacttgggtgtgattgcactgttgtgggcggatttatgtgttcgatgatgatagcggtgtagtgagacagcgtgacagtctgggttttagtgtattatcattttcagcattgatattatttgtgcctaattaaatctctctttgttgaggctgtttacctgtgttaaattctgttaatttatttaatacacagctccttactatcagtatttatatttgattattaggcttattatatctgatataaaacccttatttggtaagataggactgtcacgttagtcgaggatctctgatcaccttttagcgttggagggctgtttattacagcaacccgctactttgagagcaatattttaagataaacgatcatgtttatttatttaatctgccttcttcatgtgcaagccatgtttaattataaaatggacctgagaagctattttacatgtttacatgttctagaattgctactgttcattgctgcaataattacatatggcatttatctgagttatatgcttgttttattcggaattagaatatttaatctatttaaatatgtagaaagcatgtcacttatttctctaagcttacaacatgaactctttgccaaaatgtagccttagtttgattcgtcccttttgttggatccatactgacattcaaccgtgctccaatgagaagtggtggctgctgccactcatattgtgtattgcaagcgtctgtgaaactctcgtcatataaggcttgttccagcagaccggtgaaattctccctaccccgacaaaaactactcaatcatagtaaatcgatgtatctatgggaccaatctggtggaacggctgaataataagaatcacaaccatgttctgtggaggattccttacatcgatttatcacatgaggtcctgacgcacctggtcaccctggcggcgcgtcggcaagaacactggtcttgacgcacggaagagaaggcctggtctccctaacggcgcgtgcgtcccggctgcacgaactgctatatttagaagtctatttagagagcttttgaagaaacgactttttatttaactattggagttgcgccctatgggactagattgcatcaagaagattctgcagcttcaagaattggaagaaaa

SEQ ID NO: 4051 - DNA, 3451 bp, Zea Mays
ctcccattgatacacccagctcattgattgtcgaatcacttcagcgaccgaataattcacatatagaagaagggataaagataaccatgatgctaccaaaaattagaacattcctagctaccaataatatgatttatcagtacaagtattgttaaccgatattgcaagtatcattagtaatttgaaaagatttctagtaaaaaggggtaaaatctttcatactctaccttctacctagccgccaactaatcggtcctacacatcgatttatcaactttagggagcaattaatcagcaatcctaacctatatatcagtttttctctttttttcgaagtcttcataattttaagtttgaaatccgttgtgtattttgaaatttggtttcagtagcaagtcttcaaataatccatagtacaaaaattgacattaaaagttttcaaattaccggccgacgccaattaccggttagccgaatttatcaagcggtttggtgacccttgatgagagaagagccaagagccagaaggatgtttttttggccttctacagacgcggtgatgggccattaatcggcattcatacacaagttgttctgcgcaccagctgcgcgcggagcggtttcttcatgacggtggtgaactcgcgcgtctcagacaaatccacctcgtcgccgggcacctctttccattcgaattccctgaccaagttggcgacgaagtactccaagtgaagcatggcgatgccgagcccggcgcaaatccgccgcccggcgccgaagggcatcatcttgatctctctgctgccagtcacgtcgacgccctcaccgtcgccgcctgacaggaaccgctccggcacgaactccatgggcctgtcccactcccgctcgtcccagcccatctccgccaccgtgaagttcaccgtcgcgcccttggggatcaggtacccgcccacctccgtatcctccgccgccttgtgcgacagcacgaaatgcgcaggggggtgccggcgcagtccctcgagcacgacggccttgaggtacggcatcctgtgcgtgtcctcctcgccgacctccggttggtcgtcgctgcacgttgccctgatctcgctgtagagcttctcctgcgcgtccgggttcttcaccagctcggccatgatccactgcagcgcggtggacgtcgtgtcggtgcctgcggtgaggaattcggagcagaggttggacacctcgtcgtcagtgagcgcgcggtccccctcctcgggaagcctgatgtcgagcagcgtgtccacgtacgagtgctcgaacgtcgtcgtctcctctcctggcgccaccgcggccgcggcaccgccttggttcttgacccgctgcttgagcactcggcgcgcatggatcaatggcacgaagagctccttctgccgctgtcgagcggtaagcccctcctggaggcggccgcgcaagaggatcctagccagtgccggccagaacgcgagcaggctcgtgttcttggccacgaacatgagccagccgtactgcgcggacgcgatggcgcgcaccgcgggctcgtccagccgctcgccgaagcacatgagcacgaggaggcagaacatggcgtaccggaacgcctccatcgcggggggcggcgcctgggccctcgcctgcgcctcctcggcctcccgcccgagcttctcagcgagcacgcggcgcacccacgcgcgcgccggcgcgaacagcttcacccgcgacgggtgcagcgtctcggagacgaggttgcggcgcaggaggcgccacacgggcccgtagctggaccgcgagatggtgttgccgctctcccccaggagcgcgcgcgtgaccgcggggcggtcggcgagcgcggccccgctctcgaccagggccgcgtgcgcgacgcggcggtcagcgatgaagaccgacaggctcggccctgcccgcagggacacgacggggccgtaacgcgcgacgaggcgccggagcagcgcctccacgtcggacgagtagcgcctcagcaacagcaggttgccgaggaacggcagacccggtgggcccggcgggagccgggcgccgttcttgcccttgcggggcccgtgccgcttcccgagcaggatggcggcgagaggcaggaggaggagggcggcgaggagtaggagttgcgtagcagccatggccaaatcttcttgctctgctttgcctcgtcgtcgtcggtcacctgtggtctataccgagctggagagcaaggaaacctcactctctctcagtacctatcgacgtcatggctgatggaaatagattcttttggcatctttttcttgaacgggtagaggagatgacaccggcatgattgaaatctgcgccaaaacaagatagcgttgtttacttaatgcatggcgtgaacaatgagcccatttcaaaaaagaaaaaacaagcagtccaatgcatagaacacggatcagatattcagatcgtcgtgtgaccaccggagaatattttgggtggagatgaaagggatctttgacagagcggagatatctaaactttcatcaggcaagtggtatagagcatggtaatcagatttcgcagcaaccacgagtacaactgtactctcactgtacaagggtctactagaggcagttcgattcctgcaaaaatcgtatgcattcctccttgttgcaaacagcggctacaatgaaaaagaaagatagcgatgatcactccgtcgatacttcagattcagattaaaagtagcgtactgaaaacgattgtcctatcacattattttttccccagccaatagcagtctttgaagactaatccagggctactaaaaaattatggagttgtcttcacgtggacgtcactagcgattgtggaagactttaggctccatgtctgaaactctgaatgcagatttgcaagaacggaacgaaactatccaggtcctggaataagatttccaagaccactggaacaagaattcctagaccataggaacaaacccaacacatcatttcggtggaactaaagcggtaagatgatctacaagtacaaagcaaactgggcaatatcaatgcaggtatctataaggcgggggagcccgggatgaacattttgcttgcgctttaaactcaaacagacccgtacgagtcatgagtatgagcatacaacaaacagttaattgtactcaggccattgtacattgcaccaaccaaccagttaccagttccaaaaaaaaatgcaaaaatatcaaccatctaatacccaagcccacaacacactaatggtttggtacaatatcaaagaggaagagcatgagcgagagaaactgggcggtcaaactcctcccacagaacaaaaccagtacatcatattcgtggacataggagtaaaaacaagacggcaacatcatgtacaagtacaaagaaagttgtacataccagtttaa

SEQ ID NO: 4052 - DNA, 4135 bp, Zea Mays
cacctcctgtcgtcttggcctcgctttaaaatcccgcgacgcagtggccgctcgcctcttttggagcaggccatgtgatgtgaagcctctgacctcccgataccttccccttcctcccgtgctgctgcagcaggacagcgcggcgttcgcggttcgcctcacggggcggtggagttccgcgagatccgtgtgcaatgtcgtcgcggccgtcgtcgtcgtcgtcctcgcggcggagcagctcgccgttctccgcggggcaccgccgcccgcccaccgcgtcatcctcctcctcaagctcgtacttcagctccggccgcctcattccgcggtcgtccccgtcctccgccagctccagcttctacggcggcgggggcgggggcagcactcggtccaccacgcctggccgccgcagctcatctgtagcgcctgcgccgacgccggcgcccgcgcttgcgccagtgccgttctcgagctcggacgagctcgtcatcgaggacacctcccgatccggcgacagcatctccgtcaccatccgcttccgaccgctcagcgagcgcgagttccagcgcggggacgagatctcgtggtatccagatggggatcggcttgtgcggtgcgagtacaacccggcaacggcttatgcttatgatagagtttttgggccttcgacaaccactgaggctgtctatgatgttgcagcccggcctgttgtaaaaggtgctatggagggcataaatggtacagtttttgcctatggtgtaacaagtagtgggaagacccacacaatgcacggcgagcacaattgtcctggaataatcccactagccatcaaggatgtcttcagcatgatccaagatagtcctggaagagaatttttgctccgtgtgtcgtaccttgaaatctataatgaggtgataaatgatctacttgatcctactggccaaaatttgcgtgtgcgggaggatgcacagggaacctatgtagaaggaataaaagaagaagtagttctgtctccaggacatgctctttcttttattgcagcgggtgaagaacatcggcatgttggctctaacaacttcaacttatttagcagccgaagtcatactattttcacattgatgattgaaagtagcgcccgtggtgatgagtatgatggcgtcatgtattcacagctcaatttgattgatctagctggctctgagagctccaagacagagactacagggctaagaagaagggaagggtcatacattaacaagagccttttaacgcttggaacagtcattggcaagctcagtgaagggagggcaacacatataccctatcgtgattctaagttgacccgtctgctacagtcatcattaagtggccatggtcatgtctcactaatttgcacaattaccccagcatcaagtaacatggaagaaacccataatacattgaaatttgcaagcagagcaaaacgtgttgaaatttacgcctctcgtaaccggataattgatgagaaatcattgatcaagaagtatcagaaagaaatatcctctctaaagcaagaactcgatcagctaaggagaggaattgttggtggtgccagccaggaagaaattatgagtttacgtcagcagttggaggagggtcaggtcaagatgcagtctcgtctagaggaggaagaggaagcgaaagctgctctaatgagcaggatacaacgcttgaccaagttgatacttgtttccaccaaaaacaatattcctgccttgacagatggtcatcagcggcataattctgtcagcgagcaagataagttaagcacttcacaagatagctctacacttgtccaaaatgagggcacaacaaaagaccacctaccagactccttagatgagatcaaccaattaagatctggcagtggtgaacattcttcagctacttgttctgctacagattcaatgcaggcaggattcacggcatcagatcatatggacctactgattgagcaaattaagatgctcgctggggaggttgcatttggtaccagttcgctgaaaaggctaatcgaacagtccatagatgatcctgaagggtcaaaggaccaaatagagaatttagagcgtgaaatccagcaaaagagaagacatatgcgagccttggaaaaacaaatcatggaaagtggcgaggcatcagttgctaatgcatccatggtggatatgcagcagactattacaaaactaactgctcagtgcagtgagaaggcttttgagttagagttaaagtcagctgataatcgtgttctccaggagcagctacaacagaagaatgcggaagtcaacgatttacaagaaaaagtttttcaccttgagcaacaactctccgcaaaagtgggtatatcccctgagcaggaaactgattgcgcacagcaggaggctattgatttgaaatctaaacttcagtccaaggttcttttactaatcctgttcttttactttgtgtattcgagaccctggtgcagtatacctacgtgtaaaatttggcatactctggaacatggaattattcatggtttgtgctacaccttttatggatttttagttgataggaatagtttgcatgttctttagatggctataagcaactatttgtgttttatgcttgccttgctgacatttaagttaatcaactttgctgatgtactttggaaggaagctgaattcgaaaagctaaaattcgagcatctgaaaattactgaggaacagtgcgacttgatcaatcaaaaccataaattaagtgaggaagctgcatatgcaaaagaattggcatcttcggctgctgttgaactcaagaatttggctgaagaagttacaaagctatctgtactaaatgtgaagcaagcaaaggagttactagttgctcaggagatggcacattcaagggttcatggtagaaagggtcgtacaaccagtaggggtagggacgaggttgggacatggagccttgatttagaggacatgaaaatagagctacaggccagaagacagagggaggctgctttggaagctgctttggcagagaaggagcttctcgaagaggagtacaagaaaaagtttgacgaggcaaagaaaaaggaactgtctttggaaaacgatctagcaggcatgtgggttcttgttgctaagttaaaaagaggggctttaggcatatccgattttaatgttgatgatcgaactgttaacctagctgatataactaatggcacaaaggaaaacaaaggtgaaaagaattttgctctagttgagaagcaagtttcagaagattctgtgaagtcgctgagcacagaagaacatagaagtccagagtttgaaccacttcttgttcgtctgaaggctaaaattcaggagatgaaggaaaaggacactgatcccctgagcgataaagatgggaactcacatgtctgcaaagtttgcttcgaatctgcaaccgctgcagtattgcttccttgccggcatttttgcttgtgcaagccttgctcgcttgcctgttcagagtgccctctgtgccgcacaagaatagcagacaggataatcacgttcacatgaacggcgtgctagcttcaggtgccaaacacttagatgcttgcatgttggtgctcatgccaacgctatccctctgaaatgtacctaatgatgtgctgtgtatctctgacaggccattctgaagcatggcgcactcttgtaaaatggtcggtggtatatgtttctctttttttccttagcaaagaaggtgccttttatgttccttctgtgttgtatcgccattctttgggttcccctatatggctatatagcttcaccttacgttctttatcaaggagctgcaaacgatgagaccccattggaatgcaggaattgtacaggaatttcacaaaagttcattttcatagaaaaaacacaacaaaaaggcaaaattactgtgttctagtggagccctgacttctcgctctgcaaatctctatctctgcaaatttttcaaaaaaactcctacatttttttataatcaatctgtacttatagtctcttatctactattataacatgatgagagtttatgtaaaaaaataaggtgaaattatgtataaatgagt

SEQ ID NO: 4053 - DNA, 3217 bp, Zea Mays
cttaactcatgttgagtacagtgaatagtctggactctggagtatacttcctgaacactgccagatagagtttttgggccttcgacaaccactgaggctgtctatgatgttgcagcccggcctgttgtaaaaggtgctatggagggcataaatggtacagtttttgcctatggtgtaacaagtagtgggaagacccacacaatgcacggcgagcacaattgtcctggaataatcccactagccatcaaggatgtcttcagcatgatccaagatagtcctggaagagaatttttgctccgtgtgtcgtaccttgaaatctataatgaggtgataaatgatctacttgatcctactggccaaaatttgcgtgtgcgggaggatgcacagggaacctatgtagaaggaataaaagaagaagtagttctgtctccaggacatgctctttcttttattgcagcgggtgaagaacatcggcatgttggctctaacaacttcaacttatttagcagccgaagtcatactattttcacattgatgattgaaagtagcgcccgtggtgatgagtatgatggcgtcatgtattcacagctcaatttgattgatctagctggctctgagagctccaagacagagactacagggctaagaagaagggaagggtcatacattaacaagagccttttaacgcttggaacagtcattggcaagctcagtgaagggagggcaacacatataccctatcgtgattctaagttgacccgtctgctacagtcatcattaagtggccatggtcatgtctcactaatttgcacaattaccccagcatcaagtaacatggaagaaacccataatacattgaaatttgcaagcagagcaaaacgtgttgaaatttacgcctctcgtaaccggataattgatgagaaatcattgatcaagaagtatcagaaagaaatatcctctctaaagcaagaactcgatcagctaaggagaggaattgttggtggtgccagccaggaagaaattatgagtttacgtcagcagttggaggagggtcaggtcaagatgcagtctcgtctagaggaggaagaggaagcgaaagctgctctaatgagcaggatacaacgcttgaccaagttgatacttgtttccaccaaaaacaatattcctgccttgacagatggtcatcagcggcataattctgtcagcgagcaagataagttaagcacttcacaagatagctctacacttgtccaaaatgagggcacaacaaaagaccacctaccagactccttagatgagatcaaccaattaagatctggcagtggtgaacattcttcagctacttgttctgctacagattcaatgcaggcaggattcacggcatcagatcatatggacctactgattgagcaaattaagatgctcgctggggaggttgcatttggtaccagttcgctgaaaaggctaatcgaacagtccatagatgatcctgaagggtcaaaggaccaaatagagaatttagagcgtgaaatccagcaaaagagaagacatatgcgagccttggaaaaacaaatcatggaaagtggcgaggcatcagttgctaatgcatccatggtggatatgcagcagactattacaaaactaactgctcagtgcagtgagaaggcttttgagttagagttaaagtcagctgataatcgtgttctccaggagcagctacaacagaagaatgcggaagtcaacgatttacaagaaaaagtttttcaccttgagcaacaactctccgcaaaagtgggtatatcccctgagcaggaaactgattgcgcacagcaggaggctattgatttgaaatctaaacttcagtccaaggaagctgaattcgaaaagctaaaattcgagcatctgaaaattactgaggaacagtgcgacttgatcaatcaaaaccataaattaagtgaggaagctgcatatgcaaaagaattggcatcttcggctgctgttgaactcaagaatttggctgaagaagttacaaagctatctgtactaaatgtgaagcaagcaaaggagttactagttgctcaggagatggcacattcaagggttcatggtagaaagggtcgtacaaccagtaggggtagggacgaggttgggacatggagccttgatttagaggacatgaaaatagagctacaggccagaagacagagggaggctgctttggaagctgctttggcagagaaggagcttctcgaagaggagtacaagaaaaagtttgacgaggcaaagaaaaaggaactgtctttggaaaacgatctagcaggcatgtgggttcttgttgctaagttaaaaagaggggctttaggcatatccgattttaatgttgatgatcgaactgttaacctagctgatataactaatggcacaaaggaaaacaaaggtgaaaagaattttgctctagttgagaagcaagtttcagaagattctgtgaagtcgctgagcacagaagaacatagaagtccagagtttgaaccacttcttgttcgtctgaaggctaaaattcaggagatgaaggaaaaggacactgatcccctgagcgataaagatgggaactcacatgtctgcaaagtttgcttcgaatctgcaaccgctgcagtattgcttccttgccggcatttttgcttgtgcaagccttgctcgcttgcctgttcagagtgccctctgtgccgcacaagaatagcagacaggataatcacgttcacatgaacggcgtgctagcttcaggccattctgaagcatggcgcactcttgtaaaatggtcggtggtatatgtttctctttttttccttagcaaagaaggtgccttttatgttccttctgtgttgtatcgccattctttgggttcccctatatggctatatagcttcaccttacgttctttatcaaggagctgcaaacgatgagaccccattggaatgcaggaattgtacaggaatttcacaaaagttcattttcatagaaaaaacacaacaaaaaggcaaaattactgtgttctagtggagccctgacttctcgctctgcaaatctctatctctgcaaatttttcaaaaaaactcctacatttttttataatcaatctgtacttatagtctcttatctactattataacatgatgagagtttatgtaaaaaaataaggtgaaattatgtataaatgagt

SEQ ID NO: 4054 - DNA, 3238 bp, Zea Mays
gttcaaacttcaaactatcaagttatatcaacttggtgacacttgcccggcctgttgtaaaaggtgctatggagggcataaatggtacagtttttgcctatggtgtaacaagtagtgggaagacccacacaatgcacggcgagcacaattgtcctggaataatcccactagccatcaaggatgtcttcagcatgatccaagatagtcctggaagagaatttttgctccgtgtgtcgtaccttgaaatctataatgaggtgataaatgatctacttgatcctactggccaaaatttgcgtgtgcgggaggatgcacagggaacctatgtagaaggaataaaagaagaagtagttctgtctccaggacatgctctttcttttattgcagcgggtgaagaacatcggcatgttggctctaacaacttcaacttatttagcagccgaagtcatactattttcacattgatgattgaaagtagcgcccgtggtgatgagtatgatggcgtcatgtattcacagctcaatttgattgatctagctggctctgagagctccaagacagagactacagggctaagaagaagggaagggtcatacattaacaagagccttttaacgcttggaacagtcattggcaagctcagtgaagggagggcaacacatataccctatcgtgattctaagttgacccgtctgctacagtcatcattaagtggccatggtcatgtctcactaatttgcacaattaccccagcatcaagtaacatggaagaaacccataatacattgaaatttgcaagcagagcaaaacgtgttgaaatttacgcctctcgtaaccggataattgatgagaaatcattgatcaagaagtatcagaaagaaatatcctctctaaagcaagaactcgatcagctaaggagaggaattgttggtggtgccagccaggaagaaattatgagtttacgtcagcagttggaggagggtcaggtcaagatgcagtctcgtctagaggaggaagaggaagcgaaagctgctctaatgagcaggatacaacgcttgaccaagttgatacttgtttccaccaaaaacaatattcctgccttgacagatggtcatcagcggcataattctgtcagcgagcaagataagttaagcacttcacaagatagctctacacttgtccaaaatgagggcacaacaaaagaccacctaccagactccttagatgagatcaaccaattaagatctggcagtggtgaacattcttcagctacttgttctgctacagattcaatgcaggcaggattcacggcatcagatcatatggacctactgattgagcaaattaagatgctcgctggggaggttgcatttggtaccagttcgctgaaaaggctaatcgaacagtccatagatgatcctgaagggtcaaaggaccaaatagagaatttagagcgtgaaatccagcaaaagagaagacatatgcgagccttggaaaaacaaatcatggaaagtggcgaggcatcagttgctaatgcatccatggtggatatgcagcagactattacaaaactaactgctcagtgcagtgagaaggcttttgagttagagttaaagtcagctgataatcgtgttctccaggagcagctacaacagaagaatgcggaagtcaacgatttacaagaaaaagtttttcaccttgagcaacaactctccgcaaaagtgggtatatcccctgagcaggaaactgattgcgcacagcaggaggctattgatttgaaatctaaacttcagtccaaggaagctgaattcgaaaagctaaaattcgagcatctgaaaattactgaggaacagtgcgacttgatcaatcaaaaccataaattaagtgaggaagctgcatatgcaaaagaattggcatcttcggctgctgttgaactcaagaatttggctgaagaagttacaaagctatctgtactaaatgtgaagcaagcaaaggagttactagttgctcaggagatggcacattcaagggttcatggtagaaagggtcgtacaaccagtaggggtagggacgaggttgggacatggagccttgatttagaggacatgaaaatagagctacaggccagaagacagagggaggctgctttggaagctgctttggcagagaaggagcttctcgaagaggagtacaagaaaaagtttgacgaggcaaagaaaaaggaactgtctttggaaaacgatctagcaggcatgtgggttcttgttgctaagttaaaaagaggggctttaggcatatccgattttaatgttgatgatcgaactgttaacctagctgatataactaatggcacaaaggaaaacaaaggtgaaaagaattttgctctagttgagaagcaagtttcagaagattctgtgaagtcgctgagcacagaagaacatagaagtccagagtttgaaccacttcttgttcgtctgaaggctaaaattcaggagatgaaggaaaaggacactgatcccctgagcgataaagatgggaactcacatgtctgcaaagtttgcttcgaatctgcaaccgctgcagtattgcttccttgccggcatttttgcttgtgcaagccttgctcgcttgcctgttcagagtgccctctgtgccgcacaagaatagcagacaggataatcacgttcacatgaacggcgtgctagcttcaggtgccaaacacttagatgcttgcatgttggtgctcatgccaacgctatccctctgaaatgtacctaatgatgtgctgtgtatctctgacaggccattctgaagcatggcgcactcttgtaaaatggtcggtggtatatgtttctctttttttccttagcaaagaaggtgccttttatgttccttctgtgttgtatcgccattctttgggttcccctatatggctatatagcttcaccttacgttctttatcaaggagctgcaaacgatgagaccccattggaatgcaggaattgtacaggaatttcacaaaagttcattttcatagaaaaaacacaacaaaaaggcaaaattactgtgttctagtggagccctgacttctcgctctgcaaatctctatctctgcaaatttttcaaaaaaactcctacatttttttataatcaatctgtacttatagtctcttatctactattataacatgatgagagtttatgtaaaaaaataaggtgaaattatgtataaatgagt

SEQ ID NO: 4055 - DNA, 3048 bp, Zea Mays
tggtgacacttgcccggcctgttgtaaaaggtgctatggagggcataaatggtacagtttttgcctatggtgtaacaagtagtgggaagacccacacaatgcacagtcctggaagagaatttttgctccgtgtgtcgtaccttgaaatctataatgaggtgataaatgatctacttgatcctactggccaaaatttgcgtgtgcgggaggatgcacagggaacctatgtagaaggaataaaagaagaagtagttctgtctccaggacatgctctttcttttattgcagcgggtgaagaacatcggcatgttggctctaacaacttcaacttatttagcagccgaagtcatactattttcacattgatgattgaaagtagcgcccgtggtgatgagtatgatggcgtcatgtattcacagctcaatttgattgatctagctggctctgagagctccaagacagagactacagggctaagaagaagggaagggtcatacattaacaagagccttttaacgcttggaacagtcattggcaagctcagtgaagggagggcaacacatataccctatcgtgattctaagttgacccgtctgctacagtcatcattaagtggccatggtcatgtctcactaatttgcacaattaccccagcatcaagtaacatggaagaaacccataatacattgaaatttgcaagcagagcaaaacgtgttgaaatttacgcctctcgtaaccggataattgatgagaaatcattgatcaagaagtatcagaaagaaatatcctctctaaagcaagaactcgatcagctaaggagaggaattgttggtggtgccagccaggaagaaattatgagtttacgtcagcagttggaggagggtcaggtcaagatgcagtctcgtctagaggaggaagaggaagcgaaagctgctctaatgagcaggatacaacgcttgaccaagttgatacttgtttccaccaaaaacaatattcctgccttgacagatggtcatcagcggcataattctgtcagcgagcaagataagttaagcacttcacaagatagctctacacttgtccaaaatgagggcacaacaaaagaccacctaccagactccttagatgagatcaaccaattaagatctggcagtggtgaacattcttcagctacttgttctgctacagattcaatgcaggcaggattcacggcatcagatcatatggacctactgattgagcaaattaagatgctcgctggggaggttgcatttggtaccagttcgctgaaaaggctaatcgaacagtccatagatgatcctgaagggtcaaaggaccaaatagagaatttagagcgtgaaatccagcaaaagagaagacatatgcgagccttggaaaaacaaatcatggaaagtggcgaggcatcagttgctaatgcatccatggtggatatgcagcagactattacaaaactaactgctcagtgcagtgagaaggcttttgagttagagttaaagtcagctgataatcgtgttctccaggagcagctacaacagaagaatgcggaagtcaacgatttacaagaaaaagtttttcaccttgagcaacaactctccgcaaaagtgggtatatcccctgagcaggaaactgattgcgcacagcaggaggctattgatttgaaatctaaacttcagtccaaggaagctgaattcgaaaagctaaaattcgagcatctgaaaattactgaggaacagtgcgacttgatcaatcaaaaccataaattaagtgaggaagctgcatatgcaaaagaattggcatcttcggctgctgttgaactcaagaatttggctgaagaagttacaaagctatctgtactaaatgtgaagcaagcaaaggagttactagttgctcaggagatggcacattcaagggttcatggtagaaagggtcgtacaaccagtaggggtagggacgaggttgggacatggagccttgatttagaggacatgaaaatagagctacaggccagaagacagagggaggctgctttggaagctgctttggcagagaaggagcttctcgaagaggagtacaagaaaaagtttgacgaggcaaagaaaaaggaactgtctttggaaaacgatctagcaggcatgtgggttcttgttgctaagttaaaaagaggggctttaggcatatccgattttaatgttgatgatcgaactgttaacctagctgatataactaatggcacaaaggaaaacaaaggtgaaaagaattttgctctagttgagaagcaagtttcagaagattctgtgaagtcgctgagcacagaagaacatagaagtccagagtttgaaccacttcttgttcgtctgaaggctaaaattcaggagatgaaggaaaaggacactgatcccctgagcgataaagatgggaactcacatgtctgcaaagtttgcttcgaatctgcaaccgctgcagtattgcttccttgccggcatttttgcttgtgcaagccttgctcgcttgcctgttcagagtgccctctgtgccgcacaagaatagcagacaggataatcacgttcacatgaacggcgtgctagcttcaggccattctgaagcatggcgcactcttgtaaaatggtcggtggtatatgtttctctttttttccttagcaaagaaggtgccttttatgttccttctgtgttgtatcgccattctttgggttcccctatatggctatatagcttcaccttacgttctttatcaaggagctgcaaacgatgagaccccattggaatgcaggaattgtacaggaatttcacaaaagttcattttcatagaaaaaacacaacaaaaaggcaaaattactgtgttctagtggagccctgacttctcgctctgcaaatctctatctctgcaaatttttcaaaaaaactcctacatttttttataatcaatctgtacttatagtctcttatctactattataacatgatgagagtttatgtaaaaaaataaggtgaaattatgtataaatgagt

SEQ ID NO: 4056 - DNA, 3214 bp, Zea Mays
ggaaaaccatagctatatgagtatgtaatttgtatgtccacgttttctgctgggatccatactcccgaatcctctccacatcacattgcatccaatgtactccatccattataaattggcgagcacaattgtcctggaataatcccactagccatcaaggatgtcttcagcatgatccaagatagtcctggaagagaatttttgctccgtgtgtcgtaccttgaaatctataatgaggtgataaatgatctacttgatcctactggccaaaatttgcgtgtgcgggaggatgcacagggaacctatgtagaaggaataaaagaagaagtagttctgtctccaggacatgctctttcttttattgcagcgggtgaagaacatcggcatgttggctctaacaacttcaacttatttagcagccgaagtcatactattttcacattgatgattgaaagtagcgcccgtggtgatgagtatgatggcgtcatgtattcacagctcaatttgattgatctagctggctctgagagctccaagacagagactacagggctaagaagaagggaagggtcatacattaacaagagccttttaacgcttggaacagtcattggcaagctcagtgaagggagggcaacacatataccctatcgtgattctaagttgacccgtctgctacagtcatcattaagtggccatggtcatgtctcactaatttgcacaattaccccagcatcaagtaacatggaagaaacccataatacattgaaatttgcaagcagagcaaaacgtgttgaaatttacgcctctcgtaaccggataattgatgagaaatcattgatcaagaagtatcagaaagaaatatcctctctaaagcaagaactcgatcagctaaggagaggaattgttggtggtgccagccaggaagaaattatgagtttacgtcagcagttggaggagggtcaggtcaagatgcagtctcgtctagaggaggaagaggaagcgaaagctgctctaatgagcaggatacaacgcttgaccaagttgatacttgtttccaccaaaaacaatattcctgccttgacagatggtcatcagcggcataattctgtcagcgagcaagataagttaagcacttcacaagatagctctacacttgtccaaaatgagggcacaacaaaagaccacctaccagactccttagatgagatcaaccaattaagatctggcagtggtgaacattcttcagctacttgttctgctacagattcaatgcaggcaggattcacggcatcagatcatatggacctactgattgagcaaattaagatgctcgctggggaggttgcatttggtaccagttcgctgaaaaggctaatcgaacagtccatagatgatcctgaagggtcaaaggaccaaagaatttagagcgtgaaatccagcaaaagagaagacatatgcgagccttggaaaaacaaatcatggaaagtggcgaggcatcagttgctaatgcatccatggtggatatgcagcagactattacaaaactaactgctcagtgcagtgagaaggcttttgagttagagttaaagtcagctgataatcgtgttctccaggagcagctacaacagaagaatgcggaagtcaacgatttacaagaaaaagtttttcaccttgagcaacaactctccgcaaaagtgggtatatcccctgagcaggaaactgattgcgcacagcaggaggctattgatttgaaatctaaacttcagtccaaggaagctgaattcgaaaagctaaaattcgagcatctgaaaattactgaggaacagtgcgacttgatcaatcaaaaccataaattaagtgaggaagctgcatatgcaaaagaattggcatcttcggctgctgttgaactcaagaatttggctgaagaagttacaaagctatctgtactaaatgtgaagcaagcaaaggagttactagttgctcaggagatggcacattcaagggttcatggtagaaagggtcgtacaaccagtaggggtagggacgaggttgggacatggagccttgatttagaggacatgaaaatagagctacaggccagaagacagagggaggctgctttggaagctgctttggcagagaaggagcttctcgaagaggagtacaagaaaaagtttgacgaggcaaagaaaaaggaactgtctttggaaaacgatctagcaggcatgtgggttcttgttgctaagttaaaaagaggggctttaggcatatccgattttaatgttgatgatcgaactgttaacctagctgatataactaatggcacaaaggaaaacaaaggtgaaaagaattttgctctagttgagaagcaagtttcagaagattctgtgaagtcgctgagcacagaagaacatagaagtccagagtttgaaccacttcttgttcgtctgaaggctaaaattcaggagatgaaggaaaaggacactgatcccctgagcgataaagatgggaactcacatgtctgcaaagtttgcttcgaatctgcaaccgctgcagtattgcttccttgccggcatttttgcttgtgcaagccttgctcgcttgcctgttcagagtgccctctgtgccgcacaagaatagcagacaggataatcacgttcacatgaacggcgtgctagcttcaggtgccaaacacttagatgcttgcatgttggtgctcatgccaacgctatccctctgaaatgtacctaatgatgtgctgtgtatctctgacaggccattctgaagcatggcgcactcttgtaaaatggtcggtggtatatgtttctctttttttccttagcaaagaaggtgccttttatgttccttctgtgttgtatcgccattctttgggttcccctatatggctatatagcttcaccttacgttctttatcaaggagctgcaaacgatgagaccccattggaatgcaggaattgtacaggaatttcacaaaagttcattttcatagaaaaaacacaacaaaaaggcaaaattactgtgttctagtggagccctgacttctcgctctgcaaatctctatctctgcaaatttttcaaaaaaactcctacatttttttataatcaatctgtacttatagtctcttatctactattataacatgatgagagtttatgtaaaaaaataaggtgaaattatgtataaatgagt

SEQ ID NO: 4057 - DNA, 3085 bp, Zea Mays
ctgggatccatactcccgaatcctctccacatcacattgcatccaatgtactccatccattataaattggcgagcacaattgtcctggaataatcccactagccatcaaggatgtcttcagcatgatccaagatagtcctggaagagaatttttgctccgtgtgtcgtaccttgaaatctataatgaggtgataaatgatctacttgatcctactggccaaaatttgcgtgtgcgggaggatgcacagggaacctatgtagaaggaataaaagaagaagtagttctgtctccaggacatgctctttcttttattgcagcgggtgaagatgacagaacatcggcatgttggctctaacaacttcaacttatttagcagccgaagtcatactattttcacattgatgattgaaagtagcgcccgtggtgatgagtatgatggcgtcatgtattcacagctcaatttgattgatctagctggctctgagagctccaagacagagactacagggctaagaagaagggaagggtcatacattaacaagagccttttaacgcttggaacagtcattggcaagctcagtgaagggagggcaacacatataccctatcgtgattctaagttgacccgtctgctacagtcatcattaagtggccatggtcatgtctcactaatttgcacaattaccccagcatcaagtaacatggaagaaacccataatacattgaaatttgcaagcagagcaaaacgtgttgaaatttacgcctctcgtaaccggataattgatgagaaatcattgatcaagaagtatcagaaagaaatatcctctctaaagcaagaactcgatcagctaaggagaggaattgttggtggtgccagccaggaagaaattatgagtttacgtcagcagttggaggagggtcaggtcaagatgcagtctcgtctagaggaggaagaggaagcgaaagctgctctaatgagcaggatacaacgcttgaccaagttgatacttgtttccaccaaaaacaatattcctgccttgacagatggtcatcagcggcataattctgtcagcgagcaagataagttaagcacttcacaagatagctctacacttgtccaaaatgagggcacaacaaaagaccacctaccagactccttagatgagatcaaccaattaagatctggcagtggtgaacattcttcagctacttgttctgctacagattcaatgcaggcaggattcacggcatcagatcatatggacctactgattgagcaaattaagatgctcgctggggaggttgcatttggtaccagttcgctgaaaaggctaatcgaacagtccatagatgatcctgaagggtcaaaggaccaaatagagaatttagagcgtgaaatccagcaaaagagaagacatatgcgagccttggaaaaacaaatcatggaaagtggcgaggcatcagttgctaatgcatccatggtggatatgcagcagactattacaaaactaactgctcagtgcagtgagaaggcttttgagttagagttaaagtcagctgataatcgtgttctccaggagcagctacaacagaagaatgcggaagtcaacgatttacaagaaaaagtttttcaccttgagcaacaactctccgcaaaagtgggtatatcccctgagcaggaaactgattgcgcacagcaggaggctattgatttgaaatctaaacttcagtccaaggaagctgaattcgaaaagctaaaattcgagcatctgaaaattactgaggaacagtgcgacttgatcaatcaaaaccataaattaagtgaggaagctgcatatgcaaaagaattggcatcttcggctgctgttgaactcaagaatttggctgaagaagttacaaagctatctgtactaaatgtgaagcaagcaaaggagttactagttgctcaggagatggcacattcaagggttcatggtagaaagggtcgtacaaccagtaggggtagggacgaggttgggacatggagccttgatttagaggacatgaaaatagagctacaggccagaagacagagggaggctgctttggaagctgctttggcagagaaggagcttctcgaagaggagtacaagaaaaagtttgacgaggcaaagaaaaaggaactgtctttggaaaacgatctagcaggcatgtgggttcttgttgctaagttaaaaagaggggctttaggcatatccgattttaatgttgatgatcgaactgttaacctagctgatataactaatggcacaaaggaaaacaaaggtgaaaagaattttgctctagttgagaagcaagtttcagaagattctgtgaagtcgctgagcacagaagaacatagaagtccagagtttgaaccacttcttgttcgtctgaaggctaaaattcaggagatgaaggaaaaggacactgatcccctgagcgataaagatgggaactcacatgtctgcaaagtttgcttcgaatctgcaaccgctgcagtattgcttccttgccggcatttttgcttgtgcaagccttgctcgcttgcctgttcagagtgccctctgtgccgcacaagaatagcagacaggataatcacgttcacatgaacggcgtgctagcttcaggccattctgaagcatggcgcactcttgtaaaatggtcggtggtatatgtttctctttttttccttagcaaagaaggtgccttttatgttccttctgtgttgtatcgccattctttgggttcccctatatggctatatagcttcaccttacgttctttatcaaggagctgcaaacgatgagaccccattggaatgcaggaattgtacaggaatttcacaaaagttcattttcatagaaaaaacacaacaaaaaggcaaaattactgtgttctagtggagccctgacttctcgctctgcaaatctctatctctgcaaatttttcaaaaaaactcctacatttttttataatcaatctgtacttatagtctcttatctactattataacatgatgagagtttatgtaaaaaaataaggtgaaattatgtataaatgagt

SEQ ID NO: 4058 - DNA, 3071 bp, Zea Mays
ccatactcccgaatcctctccacatcacattgcatccaatgtactccatccattataaattggcgagcacaattgtcctggaataatcccactagccatcaaggatgtcttcagcatgatccaagatagtcctggaagagaatttttgctccgtgtgtcgtaccttgaaatctataatgaggtgataaatgatctacttgatcctactggccaaaatttgcgtgtgcgggaggatgcacagggaacctatgtagaaggaataaaagaagaagtagttctgtctccaggacatgctctttcttttattgcagcgggtgaagaacatcggcatgttggctctaacaacttcaacttatttagcagccgaagtcatactattttcacattgatgattgaaagtagcgcccgtggtgatgagtatgatggcgtcatgtattcacagctcaatttgattgatctagctggctctgagagctccaagacagagactacagggctaagaagaagggaagggtcatacattaacaagagccttttaacgcttggaacagtcattggcaagctcagtgaagggagggcaacacatataccctatcgtgattctaagttgacccgtctgctacagtcatcattaagtggccatggtcatgtctcactaatttgcacaattaccccagcatcaagtaacatggaagaaacccataatacattgaaatttgcaagcagagcaaaacgtgttgaaatttacgcctctcgtaaccggataattgatgagaaatcattgatcaagaagtatcagaaagaaatatcctctctaaagcaagaactcgatcagctaaggagaggaattgttggtggtgccagccaggaagaaattatgagtttacgtcagcagttggaggagggtcaggtcaagatgcagtctcgtctagaggaggaagaggaagcgaaagctgctctaatgagcaggatacaacgcttgaccaagttgatacttgtttccaccaaaaacaatattcctgccttgacagatggtcatcagcggcataattctgtcagcgagcaagataagttaagcacttcacaagatagctctacacttgtccaaaatgagggcacaacaaaagaccacctaccagactccttagatgagatcaaccaattaagatctggcagtggtgaacattcttcagctacttgttctgctacagattcaatgcaggcaggattcacggcatcagatcatatggacctactgattgagcaaattaagatgctcgctggggaggttgcatttggtaccagttcgctgaaaaggctaatcgaacagtccatagatgatcctgaagggtcaaaggaccaaatagagaatttagagcgtgaaatccagcaaaagagaagacatatgcgagccttggaaaaacaaatcatggaaagtggcgaggcatcagttgctaatgcatccatggtggatatgcagcagactattacaaaactaactgctcagtgcagtgagaaggcttttgagttagagttaaagtcagctgataatcgtgttctccaggagcagctacaacagaagaatgcggaagtcaacgatttacaagaaaaagtttttcaccttgagcaacaactctccgcaaaagtgggtatatcccctgagcaggaaactgattgcgcacagcaggaggctattgatttgaaatctaaacttcagtccaaggaagctgaattcgaaaagctaaaattcgagcatctgaaaattactgaggaacagtgcgacttgatcaatcaaaaccataaattaagtgaggaagctgcatatgcaaaagaattggcatcttcggctgctgttgaactcaagaatttggctgaagaagttacaaagctatctgtactaaatgtgaagcaagcaaaggagttactagttgctcaggagatggcacattcaagggttcatggtagaaagggtcgtacaaccagtaggggtagggacgaggttgggacatggagccttgatttagaggacatgaaaatagagctacaggccagaagacagagggaggctgctttggaagctgctttggcagagaaggagcttctcgaagaggagtacaagaaaaagtttgacgaggcaaagaaaaaggaactgtctttggaaaacgatctagcaggcatgtgggttcttgttgctaagttaaaaagaggggctttaggcatatccgattttaatgttgatgatcgaactgttaacctagctgatataactaatggcacaaaggaaaacaaaggtgaaaagaattttgctctagttgagaagcaagtttcagaagattctgtgaagtcgctgagcacagaagaacatagaagtccagagtttgaaccacttcttgttcgtctgaaggctaaaattcaggagatgaaggaaaaggacactgatcccctgagcgataaagatgggaactcacatgtctgcaaagtttgcttcgaatctgcaaccgctgcagtattgcttccttgccggcatttttgcttgtgcaagccttgctcgcttgcctgttcagagtgccctctgtgccgcacaagaatagcagacaggataatcacgttcacatgaacggcgtgctagcttcaggccattctgaagcatggcgcactcttgtaaaatggtcggtggtatatgtttctctttttttccttagcaaagaaggtgccttttatgttccttctgtgttgtatcgccattctttgggttcccctatatggctatatagcttcaccttacgttctttatcaaggagctgcaaacgatgagaccccattggaatgcaggaattgtacaggaatttcacaaaagttcattttcatagaaaaaacacaacaaaaaggcaaaattactgtgttctagtggagccctgacttctcgctctgcaaatctctatctctgcaaatttttcaaaaaaactcctacatttttttataatcaatctgtacttatagtctcttatctactattataacatgatgagagtttatgtaaaaaaataaggtgaaattatgtataaatgagt

SEQ ID NO: 4059 - DNA, 3124 bp, Zea Mays
catcacattgcatccaatgtactccatccattataaattggcgagcacaattgtcctggaataatcccactagccatcaaggatgtcttcagcatgatccaagatagtcctggaagagaatttttgctccgtgtgtcgtaccttgaaatctataatgaggtgataaatgatctacttgatcctactggccaaaatttgcgtgtgcgggaggatgcacagggaacctatgtagaaggaataaaagaagaagtagttctgtctccaggacatgctctttcttttattgcagcgggtgaagaacatcggcatgttggctctaacaacttcaacttatttagcagccgaagtcatactattttcacattgatgattgaaagtagcgcccgtggtgatgagtatgatggcgtcatgtattcacagctcctggctctgagagctccaagacagagactacagggctaagaagaagggaagggtcatacattaacaagagccttttaacgcttggaacagtcattggcaagctcagtgaagggagggcaacacatataccctatcgtgattctaagttgacccgtctgctacagtcatcattaagtggccatggtcatgtctcactaatttgcacaattaccccagcatcaagtaacatggaagaaacccataatacattgaaatttgcaagcagagcaaaacgtgttgaaatttacgcctctcgtaaccggataattgatgagaaatcattgatcaagaagtatcagaaagaaatatcctctctaaagcaagaactcgatcagctaaggagaggaattgttggtggtgccagccaggaagaaattatgagtttacgtcagcagttggaggagggtcaggtcaagatgcagtctcgtctagaggaggaagaggaagcgaaagctgctctaatgagcaggatacaacgcttgaccaagttgatacttgtttccaccaaaaacaatattcctgccttgacagatggtcatcagcggcataattctgtcagcgagcaagataagttaagcacttcacaagatagctctacacttgtccaaaatgagggcacaacaaaagaccacctaccagactccttagatgagatcaaccaattaagatctggcagtggtgaacattcttcagctacttgttctgctacagattcaatgcaggcaggattcacggcatcagatcatatggacctactgattgagcaaattaagatgctcgctggggaggttgcatttggtaccagttcgctgaaaaggctaatcgaacagtccatagatgatcctgaagggtcaaaggaccaaatagagaatttagagcgtgaaatccagcaaaagagaagacatatgcgagccttggaaaaacaaatcatggaaagtggcgaggcatcagttgctaatgcatccatggtggatatgcagcagactattacaaaactaactgctcagtgcagtgagaaggcttttgagttagagttaaagtcagctgataatcgtgttctccaggagcagctacaacagaagaatgcggaagtcaacgatttacaagaaaaagtttttcaccttgagcaacaactctccgcaaaagtgggtatatcccctgagcaggaaactgattgcgcacagcaggaggctattgatttgaaatctaaacttcagtccaaggaagctgaattcgaaaagctaaaattcgagcatctgaaaattactgaggaacagtgcgacttgatcaatcaaaaccataaattaagtgaggaagctgcatatgcaaaagaattggcatcttcggctgctgttgaactcaagaatttggctgaagaagttacaaagctatctgtactaaatgtgaagcaagcaaaggagttactagttgctcaggagatggcacattcaagggttcatggtagaaagggtcgtacaaccagtaggggtagggacgaggttgggacatggagccttgatttagaggacatgaaaatagagctacaggccagaagacagagggaggctgctttggaagctgctttggcagagaaggagcttctcgaagaggagtacaagaaaaagtttgacgaggcaaagaaaaaggaactgtctttggaaaacgatctagcaggcatgtgggttcttgttgctaagttaaaaagaggggctttaggcatatccgattttaatgttgatgatcgaactgttaacctagctgatataactaatggcacaaaggaaaacaaaggtgaaaagaattttgctctagttgagaagcaagtttcagaagattctgtgaagtcgctgagcacagaagaacatagaagtccagagtttgaaccacttcttgttcgtctgaaggctaaaattcaggagatgaaggaaaaggacactgatcccctgagcgataaagatgggaactcacatgtctgcaaagtttgcttcgaatctgcaaccgctgcagtattgcttccttgccggcatttttgcttgtgcaagccttgctcgcttgcctgttcagagtgccctctgtgccgcacaagaatagcagacaggataatcacgttcacatgaacggcgtgctagcttcaggtgccaaacacttagatgcttgcatgttggtgctcatgccaacgctatccctctgaaatgtacctaatgatgtgctgtgtatctctgacaggccattctgaagcatggcgcactcttgtaaaatggtcggtggtatatgtttctctttttttccttagcaaagaaggtgccttttatgttccttctgtgttgtatcgccattctttgggttcccctatatggctatatagcttcaccttacgttctttatcaaggagctgcaaacgatgagaccccattggaatgcaggaattgtacaggaatttcacaaaagttcattttcatagaaaaaacacaacaaaaaggcaaaattactgtgttctagtggagccctgacttctcgctctgcaaatctctatctctgcaaatttttcaaaaaaactcctacatttttttataatcaatctgtacttatagtctcttatctactattataacatgatgagagtttatgtaaaaaaataaggtgaaattatgtataaatgagt

SEQ ID NO: 4060 - DNA, 2986 bp, Zea Mays
ttagcttcatgggaattcctagttggctttatacaagagattatctctgagtcctggaagagaatttttgctccgtgtgtcgtaccttgaaatctataatgaggtgataaatgatctacttgatcctactggccaaaatttgcgtgtgcgggaggatgcacagggaacctatgtagaaggaataaaagaagaagtagttctgtctccaggacatgctctttcttttattgcagcgggtgaagaacatcggcatgttggctctaacaacttcaacttatttagcagccgaagtcatactattttcacattgatgattgaaagtagcgcccgtggtgatgagtatgatggcgtcatgtattcacagctcaatttgattgatctagctggctctgagagctccaagacagagactacagggctaagaagaagggaagggtcatacattaacaagagccttttaacgcttggaacagtcattggcaagctcagtgaagggagggcaacacatataccctatcgtgattctaagttgacccgtctgctacagtcatcattaagtggccatggtcatgtctcactaatttgcacaattaccccagcatcaagtaacatggaagaaacccataatacattgaaatttgcaagcagagcaaaacgtgttgaaatttacgcctctcgtaaccggataattgatgagaaatcattgatcaagaagtatcagaaagaaatatcctctctaaagcaagaactcgatcagctaaggagaggaattgttggtggtgccagccaggaagaaattatgagtttacgtcagcagttggaggagggtcaggtcaagatgcagtctcgtctagaggaggaagaggaagcgaaagctgctctaatgagcaggatacaacgcttgaccaagttgatacttgtttccaccaaaaacaatattcctgccttgacagatggtcatcagcggcataattctgtcagcgagcaagatttaagcacttcacaagatagctctacacttgtccaaaatgagggcacaacaaaagaccacctaccagactccttagatgagatcaaccaattaagatctggcagtggtgaacattcttcagctacttgttctgctacagattcaatgcaggcaggattcacggcatcagatcatatggacctactgattgagcaaattaagatgctcgctggggaggttgcatttggtaccagttcgctgaaaaggctaatcgaacagtccatagatgatcctgaagggtcaaaggaccaaatagagaatttagagcgtgaaatccagcaaaagagaagacatatgcgagccttggaaaaacaaatcatggaaagtggcgaggcatcagttgctaatgcatccatggtggatatgcagcagactattacaaaactaactgctcagtgcagtgagaaggcttttgagttagagttaaagtcagctgataatcgtgttctccaggagcagctacaacagaagaatgcggaagtcaacgatttacaagaaaaagtttttcaccttgagcaacaactctccgcaaaagtgggtatatcccctgagcaggaaactgattgcgcacagcaggaggctattgatttgaaatctaaacttcagtccaagctgaattcgaaaagctaaaattcgagcatctgaaaattactgaggaacagtgcgacttgatcaatcaaaaccataaattaagtgaggaagctgcatatgcaaaagaattggcatcttcggctgctgttgaactcaagaatttggctgaagaagttacaaagctatctgtactaaatgtgaagcaagcaaaggagttactagttgctcaggagatggcacattcaagggttcatggtagaaagggtcgtacaaccagtaggggtagggacgaggttgggacatggagccttgatttagaggacatgaaaatagagctacaggccagaagacagagggaggctgctttggaagctgctttggcagagaaggagcttctcgaagaggagtacaagaaaaagtttgacgaggcaaagaaaaaggaactgtctttggaaaacgatctagcaggcatgtgggttcttgttgctaagttaaaaagaggggctttaggcatatccgattttaatgttgatgatcgaactgttaacctagctgatataactaatggcacaaaggaaaacaaaggtgaaaagaattttgctctagttgagaagcaagtttcagaagattctgtgaagtcgctgagcacagaagaacatagaagtccagagtttgaaccacttcttgttcgtctgaaggctaaaattcaggagatgaaggaaaaggacactgatcccctgagcgataaagatgggaactcacatgtctgcaaagtttgcttcgaatctgcaaccgctgcagtattgcttccttgccggcatttttgcttgtgcaagccttgctcgcttgcctgttcagagtgccctctgtgccgcacaagaatagcagacaggataatcacgttcacatgaacggcgtgctagcttcaggccattctgaagcatggcgcactcttgtaaaatggtcggtggtatatgtttctctttttttccttagcaaagaaggtgccttttatgttccttctgtgttgtatcgccattctttgggttcccctatatggctatatagcttcaccttacgttctttatcaaggagctgcaaacgatgagaccccattggaatgcaggaattgtacaggaatttcacaaaagttcattttcatagaaaaaacacaacaaaaaggcaaaattactgtgttctagtggagccctgacttctcgctctgcaaatctctatctctgcaaatttttcaaaaaaactcctacatttttttataatcaatctgtacttatagtctcttatctactattataacatgatgagagtttatgtaaaaaaataaggtgaaattatgtataaatgagt

SEQ ID NO: 4061 - DNA, 1260 bp, Zea Mays
gtcgcgaccgcaacagcttctccggactccctgggcatcagctggtcctcgcagtcgtcgctccgtgcgtacaaatagtgtcgaggaagcctcggtcgcgtgcaccaatgccttgccatccgcattctgccgctccctctcctctttgatccgcgcccagccgccgccgcgggaagcaggggggtcaccacggatggtcttcgccctggccatcggactcgccacgcgggatgatctatggatgaatgcggggctcgtgcgtggtgcactgggtaacccaggggcttggcgatgtctgggtcatcacgaattgctcaccggagcaatttgtactgccgcataccacacctcgccatggccgcctgtcgggagagaagaaaggaggggattccgccgccgccgagccccagttcaagctcttcttcactcgcatctccggaccgcctccctgggagctccatggacgatggcttctgctgcgccaccacgggtcgaacagagagaaaacgaaggagagagagagcggagggctctgcgtggtcacagcggctcctcatcgtcgatccggatccggggaagccgaccgagacctcgcggcggaacctacgtcgtcgcagcgcggggaatttctcggcggacgacgggggaagcaccgcgcctctggtcgtcgcggactgcctcacctacatcaatattctgggtgagaacctcgccactaatttcgccttgaactccgcattgcgtaggtgaagttaattgcgatatgaaccactggtttgccgaaatcgttgttcgccggaacctgtgcgccgccgtgggtttctggggtggcctcgccgtcggcgttgaggtgggagaaggcgtctctgccgtttgatctgagcgaacggtggagattagatcccgcgtaccctttcgtccaaacgaacttcgaccgtagatgcgagatccagtggtgcagagtagatctgtgattcattaaatccgtgccgttaatctttaatccaaccgtcacgggcacgtaccggttcacggtgggacggatctaatccgggccaaccgtttctgatcggacggtcctggaagcctgataccccttcggcttgcacattttgtaaaagagtccccgagaaaactactaaccaacccgcggtccagatcccagggttctgtgtctcggtatttttagcgccgagccccctgcacttttctataatggagacgcagtccagagggttagaaaaatcaggaaaatgttat

SEQ ID NO: 4062 - DNA, 1072 bp, Zea Mays
gtcgcgaccgcaacagcttctccggactccctgggcatcagctggtcctcgcagtcgtcgctccgtgcgtacaaatagtgtcgaggaagcctcggtcgcgtgcaccaatgccttgccatccgcattctgccgctccctctcctctttgatccgcgcccagccgccgccgcgggaagcaggggggtcaccacggatggtcttcgccctggccatcggactcgccacgcgggatgatctatggatgaatgcggggctcgtgcgtggtgcactgggtaacccaggggcttggcgatgtctgggtcatcacgaattgctcaccggagcaatttgtactgccgcataccacacctcgccatggccgcctgtcgggagagaagaaaggaggggattccgccgccgccgagccccagttcaagctcttcttcactcgcatctccggaccgcctccctgggagctccatggacgatggcttctgctgcgccaccacgggtcgaacagagagaaaacgaaggagagagagagcggagggctctgcgtggtcacagcggctcctcatcgtcgatccggatccggggaagccgaccgagacctcgcggcggaacctacgtcgtcgcagcgcggggaatttctcggcggacgacgggggaagcaccgcgcctctggtcgtcgcggactgcctcacctacatcaatattctggtgaggtcacgagtcatctgaagatcatcctgatacctggaatctcaagtctcaggcaagttgtgcccttgatcacttcttttacccactcatgttctgattaatcataatgatccgcataggttaattttgatgggacccaataggtcaccctagtttgttcgtcctgaataccttgtttacccctgaatcacttgggtagttctgctactgctttatatggttttgggttaatattccattacatctatgttccaattatgttgttattctatttatgttcatgacaagatcattaaatgttaattggaacatagagcttaacttgagaaccacgtgccaccacaagggtttaatgggacgcccttggctg

SEQ ID NO: 4063 - DNA, 1075 bp, Zea Mays
gtcgcgaccgcaacagcttctccggactccctgggcatcagctggtcctcgcagtcgtcgctccgtgcgtacaaatagtgtcgaggaagcctcggtcgcgtgcaccaatgccttgccatccgcattctgccgctccctctcctctttgatccgcgcccagccgccgccgcgggaagcaggggggtcaccacggatggtcttcgccctggccatcggactcgccacgcgggatgatctatggatgaatgcggggctcgtgcgtggtgcactgggtaacccaggggcttggcgatgtctgggtcatcacgaattgctcaccggagcaatttgtactgccgcataccacacctcgccatggccgcctgtcgggagagaagaaaggaggggattccgccgccgccgagccccagttcaagctcttcttcactcgcatctccggaccgcctccctgggagctccatggacgatggcttctgctgcgccaccacgggtcgaacagagagaaaacgaaggagagagagagcggagggctctgcgtggtcacagcggctcctcatcgtcgatccggatccggggaagccgaccgagacctcgcggcggaacctacgtcgtcgcagcgcggggaatttctcggcggacgacgggggaagcaccgcgcctctggtcgtcgcggactgcctcacctacatcaatattctggcagtgaggtcacgagtcatctgaagatcatcctgatacctggaatctcaagtctcaggcaagttgtgcccttgatcacttcttttacccactcatgttctgattaatcataatgatccgcataggttaattttgatgggacccaataggtcaccctagtttgttcgtcctgaataccttgtttacccctgaatcacttgggtagttctgctactgctttatatggttttgggttaatattccattacatctatgttccaattatgttgttattctatttatgttcatgacaagatcattaaatgttaattggaacatagagcttaacttgagaaccacgtgccaccacaagggtttaatgggacgcccttggctg

SEQ ID NO: 4064 - DNA, 871 bp, Zea Mays
gtcgcgaccgcaacagcttctccggactccctgggcatcagctggtcctcgcagtcgtcgctccgtgcgtacaaatagtgtcgaggaagcctcggtcgcgtgcaccaatgccttgccatccgcattctgccgctccctctcctctttgatccgcgcccagccgccgccgcgggaagcaggggggtcaccacggatggtcttcgccctggccatcggactcgccacgcgggatgatctatggatgaatgcggggctcgtgcgtggtgcactgggtaacccaggggcttggcgatgtctgggtcatcacgaattgctcaccggagcaatttgtactgccgcataccacacctcgccatggccgcctgtcgggagagaagaaaggaggggattccgccgccgccgagccccagttcaagctcttcttcactcgcatctccggaccgcctccctgggagctccatggacgatggcttctgctgcgccaccacgggtcgaacagagagaaaacgaaggagagagagagcggagggctctgcgtggtcacagcggctcctcatcgtcgatccggatccggggaagccgaccgagacctcgcggcggaacctacgtcgtcgcagcgcggggaatttctcggcggacgacgggggaagcaccgcgcctctggtcgtcgcggactgcctcacctacatcaatattctgggtcaagagcaggtaccgcaggatgaggcgcttggaggatgctgcgatgtgttcgtgagaggtctaggccgtcgtctcccagtcaactttgggttgctggaccgttgtctccttataatgtaactattatttgtatagaactcctgttatatataaagatgtgacattcgat

SEQ ID NO: 4065 - DNA, 3434 bp, Zea Mays
atggggcagtgctacgcgaggaacgtgcacggcgtcgacgcggacggcggcggcgtggaggcgaccaccatcacggtctcggcggcgggcgggccggaggatgcggcgtcggtagggggagggcgaggaggaggagggaggcggagcgcgcggccgtcgccggccgggacgccgcgcgggggcagggccggggcgactccggcgcggtcgtcggcggcgggcagcccctggacggggagcccgctcggcctccccgacggcatcgcgccgtcgcccgcgacctcggcgtccacgccgcgccggttcttccgccgccccttcccgccgccttccccggccaagcacatcaaggcgtccctcgctcgccggctcggccatcgctcgccggcctccgcgtcgcaggtgcccaggccgcccgtcgaggtcccgatcccggagcaaggggccggcggcgctggggaggtggagcgggagcttgacaagagcttcggctacgaccgccacttcgccgccaagtacgagctggggaaggaggtgggccgcggccatttcggccacacctgcctcgcgcgcgcccgcaagggagacatgagaggccaggtcctggctgtcaaggtcatctccaaagccaaggtcttgctattcgtgatctcacactgctcttttactggacgcacggcacgatcttacctatttcaatcggctcggttcctccaccggatcatgaacaaactgtgtgggatgacataattgccatcctgttgtgatcttttttaactctcatttagtagatcagtatctctgaagtgccactaccataggtgttgcaatcataagttcatgatttgcttcttggctgacttgcagggtgatcagtttttttcgatggtattggcattggcatttccccgcagggttagaagtacattgcagagatcttgtttcagcaacgccgcatttaatgatgtgcccattttcatgatctgagtgttcaactgttcatccatctatcacctgtttcatgcttttttgttctttctgtaagctatcatggcatagtagtttatgcagcggtagatcactagcttggcagcgacagagttccttgtgagacctcatagaacctgttcccgagtatctccatcatattgttgttcctgccatgagtttaggagtcccttggtccattctgcaccattttattatatgatcataagtagaagaaacatagggaaaagtgtaggaactaaagaaatgtctcttagattcttggtgccaaagctgaggacatgttgatattggggactgctttccactgacattgttctgattgttgaattatttaattttgatctcagttttacttggcatctaaaatgtttgtgcagcaagttgtcgagaaaacctagtgtacgatatgcgacacagaagaattctacgtgcatggctgcattgatgttttcatgcatgtatattgtcgttttttgagcgatacgacattaattaattaatgactattttggcctgctataattttcgcttgtgctactgaaattatttgagcaggagatgtatttattgagtctattgtgtttcttccttctatatagttctttatttgaattgcgtgcaattttattccttgttacaacatacacacatacatggtatatactttttgaggctagaagctaacagatgctcaaggtatcctttcaattaagattaaggtttctcttagacaacccatcagttagcgctactttcctagcacctagctcactgcaccaggggaaaaatatatcttgatctagatttttatatttagtttgcaaaattcacctcattcctttgtttttctcttgcagatgacaacagcaatatctattgaggatgtgcgcagagaggtgaaaattttgaaggcgttatctggacattccaaccttgtcaagttttatgatgcttgtgaggacgcccttaatgtctacataatcatggagctttgtgaaggtggagaactactggatagaatcttgtccagaggtggaagatacaatgaaggggatgcaaaaattattgttgaacagatattaaaagtagttgccttttgccatcttcagggtgttgttcaccgtgatctgaagccagagaatttcttattcagcactagggaagagcattctcctatgaagataattgattttggtctctcagattttataagaccagatgaaaggcttaatgacattgttggaagtgcatactatgttgctccagaagtcttgcataggtcatatagcacagaagcagacatgtggagcattggtgttatcacttatatattgctgtgtggtagcaggccattctgggcacgaactgaatcaggtatttttcgctcagtgctgagagctgatcctaattttgacgactcaccatggcaatcagtatcgcctgaagctaaagattttgtcaaaagacttcttaacaaggattacagaaaaagaatgactgctgcacaggcactctctcacccctggctgcgagatgaacaccgacaaatacctttggatatgctagtattcaagttggttaaagcataccttcgatcgacgcctctcaaacgggcggcattgaaggccttgtcaagagcaataacagaagatgagcttatctacatcagggcacaatacaacttgttagaaccagacagcggagatggtagaatatgtattgataatttcaggatggctcttttacagaactgtactgatgctatgaaagaatctagaacacttgagatcttgaatgcgctggagccactcgcgtataggagaatggactttgaggagttccgtgcagctacaataagcccttaccagcttgaggctgtgccgcgctgggaagaaatcgccagtactgcattcgagtactttgagcaggaaggcaaccgtgctatcacaatcgaggagcttgctcaggagatgaatctttctgcagcagcgtattccatcgtccgtgactggatcagaccgttggacggcaagcttagctttgtaggctacaccaagtttttgcatggactaacgatgcgaagcggcaacacaaggcggcaccattgattcccttgctgccgcggtggttgcttgaattggttccattggttttgttgatggggatttggagagatggtgttttgtccctcttcttttcttgccttagctttttgtagaatgcttgtagagagagagagaaagggtaaaaggaaaaaaagaaacggaaagtgatagctcaaaattgagttgtagaagaaaaggtcattttttttttgccttggttctggtacattgtttgctttcggctatgatgaatggcattgtacagttgtcagttggcacatgctacatggtgctgtgtcgaacttgggttgctcactg

SEQ ID NO: 4066 - DNA, 2181 bp, Zea Mays
atggggcagtgctacgcgaggaacgtgcacggcgtcgacgcggacggcggcggcgtggaggcgaccaccatcacggtctcggcggcgggcgggccggaggatgcggcgtcggtagggggagggcgaggaggaggagggaggcggagcgcgcggccgtcgccggccgggacgccgcgcgggggcagggccggggcgactccggcgcggtcgtcggcggcgggcagcccctggacggggagcccgctcggcctccccgacggcatcgcgccgtcgcccgcgacctcggcgtccacgccgcgccggttcttccgccgccccttcccgccgccttccccggccaagcacatcaaggcgtccctcgctcgccggctcggccatcgctcgccggcctccgcgtcgcaggtgcccaggccgcccgtcgaggtcccgatcccggagcaaggggccggcggcgctggggaggtggagcgggagcttgacaagagcttcggctacgaccgccacttcgccgccaagtacgagctggggaaggaggtgggccgcggccatttcggccacacctgcctcgcgcgcgcccgcaagggagacatgagaggccaggtcctggctgtcaagatgacaacagcaatatctattgaggatgtgcgcagagaggtgaaaattttgaaggcgttatctggacattccaaccttgtcaagttttatgatgcttgtgaggacgcccttaatgtctacataatcatggagctttgtgaaggtggagaactactggatagaatcttgtccagaggtggaagatacaatgaaggggatgcaaaaattattgttgaacagatattaaaagtagttgccttttgccatcttcagggtgttgttcaccgtgatctgaagccagagaatttcttattcagcactagggaagagcattctcctatgaagataattgattttggtctctcagattttataagaccagatgaaaggcttaatgacattgttggaagtgcatactatgttgctccagaagtcttgcataggtcatatagcacagaagcagacatgtggagcattggtgttatcacttatatattgctgtgtggtagcaggccattctgggcacgaactgaatcaggtatttttcgctcagtgctgagagctgatcctaattttgacgactcaccatggcaatcagtatcgcctgaagctaaagattttgtcaaaagacttcttaacaaggattacagaaaaagaatgactgctgcacaggcactctctcacccctggctgcgagatgaacaccgacaaatacctttggatatgctagtattcaagttggttaaagcataccttcgatcgacgcctctcaaacgggcggcattgaaggccttgtcaagagcaataacagaagatgagcttatctacatcagggcacaatacaacttgttagaaccagacagcggagatggtagaatatgtattgataatttcaggatggctcttttacagaactgtactgatgctatgaaagaatctagaacacttgagatcttgaatgcgctggagccactcgcgtataggagaatggactttgaggagttccgtgcagctacaataagcccttaccagcttgaggctgtgccgcgctgggaagaaatcgccagtactgcattcgagtactttgagcaggaaggcaaccgtgctatcacaatcgaggagcttgctcaggagatgaatctttctgcagcagcgtattccatcgtccgtgactggatcagaccgttggacggcaagcttagctttgtaggctacaccaagtttttgcatggactaacgatgcgaagcggcaacacaaggcggcaccattgattcccttgctgccgcggtggttgcttgaattggttccattggttttgttgatggggatttggagagatggtgttttgtccctcttcttttcttgccttagctttttgtagaatgcttgtagagagagagagaaagggtaaaaggaaaaaaagaaacggaaagtgatagctcaaaattgagttgtagaagaaaaggtcattttttttttgccttggttctggtacattgtttgctttcggctatgatgaatggcattgtacagttgtcagttggcacatgctacatggtgctgtgtcgaacttgggttgctcactg

SEQ ID NO: 4067 - DNA, 2173 bp, Zea Mays
atggggcagtgctacgcgaggaacgtgcacggcgtcgacgcggacggcggcggcgtggaggcgaccaccatcacggtctcggcggcgggcgggccggaggatgcggcgtcggtagggggagggcgaggaggaggagggaggcggagcgcgcggccgtcgccggccgggacgccgcgcgggggcagggccggggcgactccggcgcggtcgtcggcggcgggcagcccctggacggggagcccgctcggcctccccgacggcatcgcgccgtcgcccgcgacctcggcgtccacgccgcgccggttcttccgccgccccttcccgccgccttccccggccaagcacatcaaggcgtccctcgctcgccggctcggccatcgctcgccggcctccgcgtcgcaggtgcccaggccgcccgtcgaggtcccgatcccggagcaaggggccggcggcgctggggaggtggagcgggagcttgacaagagcttcggctacgaccgccacttcgccgccaagtacgagctggggaaggaggtgggccgcggccatttcggccacacctgcctcgcgcgcgcccgcaagggagacatgagaggccaggtcctggctgtcaaggtcatctccaaagccaagatgacaacagcaatatctattgaggatgtgcgcagagaggtgaaaattttgaaggcgttatctggacattccaaccttgtcaagttttatgatgcttgtgaggacgcccttaatgtctacataatcatggagctttgtgaaggtggagaactactggatagaatcttgtccagaggtggaagatacaatgaaggggatgcaaaaattattgttgaacagatattaaaagtagttgccttttgccatcttcagggtgttgttcaccgtgatctgaagccagagcactagggaagagcattctcctatgaagataattgattttggtctctcagattttataagaccagatgaaaggcttaatgacattgttggaagtgcatactatgttgctccagaagtcttgcataggtcatatagcacagaagcagacatgtggagcattggtgttatcacttatatattgctgtgtggtagcaggccattctgggcacgaactgaatcaggtatttttcgctcagtgctgagagctgatcctaattttgacgactcaccatggcaatcagtatcgcctgaagctaaagattttgtcaaaagacttcttaacaaggattacagaaaaagaatgactgctgcacaggcactctctcacccctggctgcgagatgaacaccgacaaatacctttggatatgctagtattcaagttggttaaagcataccttcgatcgacgcctctcaaacgggcggcattgaaggccttgtcaagagcaataacagaagatgagcttatctacatcagggcacaatacaacttgttagaaccagacagcggagatggtagaatatgtattgataatttcaggatgaactgtactgatgctatgaaagaatctagaacacttgagatcttgaatgcgctggagccactcgcgtataggagaatggactttgaggagttccgtgcagctacaataagcccttaccagcttgaggctgtgccgcgctgggaagaaatcgccagtactgcattcgagtactttgagcaggaaggcaaccgtgctatcacaatcgaggagcttgctcaggagatgaatctttctgcagcagcgtattccatcgtccgtgactggatcagaccgttggacggcaagcttagctttgtaggctacaccaagtttttgcatggactaacgatgcgaagcggcaacacaaggcggcaccattgattcccttgctgccgcggtggttgcttgaattggttccattggttttgttgatggggatttggagagatggtgttttgtccctcttcttttcttgccttagctttttgtagaatgcttgtagagagagagagaaagggtaaaaggaaaaaaagaaacggaaagtgatagctcaaaattgagttgtagaagaaaaggtcattttttttttgccttggttctggtacattgtttgctttcggctatgatgaatggcattgtacagttgtcagttggcacatgctacatggtgctgtgtcgaacttgggttgctcactg

SEQ ID NO: 4068 - DNA, 1076 bp, Zea Mays
ggccattctgggcacgaactgaatcaggtatttttcgctcagtgctgagagctgatcctaattttgacgactcaccatggcaatcagtatcgcctgaagctaaagattttgtcaaaagacttcttaacaaggattacagaaaaagaatgactgctgcacaggcactctctcacccctggctgcgagatgaacaccgacaaatacctttggatatgctagtattcaagttggttaaagcataccttcgatcgacgcctctcaaacgggcggcattgaaggccttgtcaagagcaataacagaagatgagcttatctacatcagggcacaatacaacttgttagaaccagacagcggagatggtagaatatgtattgataatttcaggatggctcttttacagaactgtactgatgctatgaaagaatctagaacacttgagatcttgaatgcgctggagccactcgcgtataggagaatggactttgaggagttccgtgcagctacaataagcccttaccagcttgaggctgtgccgcgctgggaagaaatcgccagtactgcattcgagtactttgagcaggaaggcaaccgtgctatcacaatcgaggagcttgctcaggagatgaatctttctgcagcagcgtattccatcgtccgtgactggatcagaccgttggacggcaagcttagctttgtaggctacaccaagtttttgcatggactaacgatgcgaagcggcaacacaaggcggcaccattgattcccttgctgccgcggtggttgcttgaattggttccattggttttgttgatggggatttggagagatggtgttttgtccctcttcttttcttgccttagctttttgtagaatgcttgtagagagagagagaaagggtaaaaggaaaaaaagaaacggaaagtgatagctcaaaattgagttgtagaagaaaaggtcattttttttttgccttggttctggtacattgtttgctttcggctatgatgaatggcattgtacagttgtcagttggcacatgctacatggtgctgtgtcgaacttgggttgctcactg

SEQ ID NO: 4069 - DNA, 2496 bp, Zea Mays
ccggccggagccggacgcgccgagccgccgacgggcgtccccatgccgttgccgctgcgggtgccggcgcggctgctgttcgcgcggcacaagactaccgcggcgcagcacgtggcggcgcggcacctggaccacgccttcgagcggctcgcggcggcgcacctgcccctcgtcgcggcgtcgccgctggtcgacgcgctgcgggcctcccccgaaccgctcgcgctgccgaacctggcgcgccgcctcccgctccgcctccaccgccgcggcccactccacttcctccgcctcttcccgcgcgtgttcgacctccgcgccccgctcccgctctccctgtccctgacccccgccgccgcgggcctcctcgcagtcgccagctcccccgccgacgcagcgcggacgctccaccgcctcctagcgatgtcggtcacccgctccctgcccctccgcgccgtcttccgcgtctggcgcgagctcgccctccccgacgacttcgaggactccgtcgtcgaggggcacccacacctcttccgcctcgtctccaatcccgccgagcccaacactcacatcctccacctcgtcgccgaccaggcgaccgaggacttcaccccggcggtggagaaggcccgcccggacaggtacgccttcaaactgcagtttccgccggggttcaggctggccaaggaatatcggaagaaggtgaaggagtggcagctgctgccttacaccggaccgtatcaggtcgtcagtccgagcgctggaggtagcaagagggtgtcgaagttggcgaggaggaagatggagaagagggcagtagggattgcgcacgagttcctgagcctgaccgtggagaagatggtggaggtggagaagttcagtcagttcaggaagtggtttgggatcgaggtcaatgtccgggacgtgttcttggatcatcccgggatattctacctctcggcgaaagggaagcggcacacggtgtttctgagggagatgtatgatcgtggaaagcttctcgagtcgaatgatgtctctgaggcaagagccaaactcgttgagctcatgctccttcgtcggcgtggtctcgggaatgccaattcaagtgccaacatggcttcaggtgccactgctgatgccagagagagtggtgatgattttgttgatcatgaggattgtttgttggatgtatcagagaagtgatggtagaaggatgttgtcaacttcatgggaactcatgtcagtaagccatgttgaacggtgcttagcgcacttctgatggagaatggattaatggtaccacggacaggaggtttgtgtgctggagataaccaaatgagaaggtgcatggatttccagagtggtatgacttggtcgacaaagctagaggccatggatatgcttggaactcaaaagtcatgtttcaactgtgcgctaccatgttggtaggtcgagattcatgaggaaatgttgaacctttgaatttcggtccccttcagttctctgctcagattctttttcctgacaaatcattctgccaaggttgcttcattccatttgatttgtcaggattcatgagtttgctctacttcttcactttgatctggcagatgtactttttggttgtggcaatcgcctgaagtacaaccactggttggtgtcattgcctgaatcttattatttgaacaaagcattgcctgaattgaagagccaggcatcattcttcagcaatttttgcaacccgggtcgtttttgcaacattcttaggttcaacagaccagcaagatgtgcaaacatgcttcatgttgttggaccacttcaggcacctacatcgctagttcagcttttgagttccttattcgtacgatataactttatcctttcaacaattacgcctactctgatgtggggacattgagcacctatgaatcttaaggttttctgctggttgtcatcacaaaactagttcctgatgttcaaatatcaagaagagatggtggttgaatagccctatatgttggctaatggagagacagtccggcaccttgtgataggcagataggggtggagtaatggtactgcattgttgctagctgtttctctatatctaacaattttgtggcaaggaaacttaccagccagtctgtgtgctgaagattggtggttaccgtctgcctcgctgcagctgtatcttcaattcttcatacacattacttctgctgtcttttcttgcctggagttggttctgactcttcgctttggagggcaaaatgctagtattataattcagaaccattgttgcgataatttaaaattactttaggttattccagttatcagcctattattgttggagattggctgttaaactatgcctaaaatttgaaatggggagagaaccaagttttgttcgctgatcaaagttagcaggagatgattctgccttctgcgcaagaagcaaagaggggctatggatgttgaggagcacaactctag

SEQ ID NO: 4070 - DNA, 2510 bp, Zea Mays
ccggccggagccggacgcgccgagccgccgacgggcgtccccatgccgttgccgctgcgggtgccggcgcggctgctgttcgcgcggcacaagactaccgcggcgcagcacgtggcggcgcggcacctggaccacgccttcgagcggctcgcggcggcgcacctgcccctcgtcgcggcgtcgccgctggtcgacgcgctgcgggcctcccccgaaccgctcgcgctgccgaacctggcgcgccgcctcccgctccgcctccaccgccgcggcccactccacttcctccgcctcttcccgcgcgtgttcgacctccgcgccccgctcccgctctccctgtccctgacccccgccgccgcgggcctcctcgcagtcgccagctcccccgccgacgcagcgcggacgctccaccgcctcctagcgatgtcggtcacccgctccctgcccctccgcgccgtcttccgcgtctggcgcgagctcgccctccccgacgacttcgaggactccgtcgtcgaggggcacccacacctcttccgcctcgtctccaatcccgccgagcccaacactcacatcctccacctcgtcgccgaccaggcgaccgaggacttcaccccggcggtggagaaggcccgcccggacaggtacgccttcaaactgcagtttccgccggggttcaggctggccaaggaatatcggaagaaggtgaaggagtggcagctgctgccttacaccggaccgtatcaggtcgtcagtccgagcgctggaggtagcaagagggtgtcgaagttggcgaggaggaagatggagaagagggcagtagggattgcgcacgagttcctgagcctgaccgtggagaagatggtggaggtggagaagttcagtcagttcaggaagtggtttgggatcgaggtcaatgtccgggacgtgttcttggatcatcccgggatattctacctctcggcgaaagggaagcggcacacggtgtttctgagggagatgtatgatcgtggaaagcttctcgagtcgaatgatgtctctgaggcaagagccaaactcgttgagctcatgctccttcgtcggcgtggtctcgggaatgccaattcaagtgccaacatggcttcaggtgccactgctgatgccagagagagtggtgatgattttgttgatcatgaggattgtttgttggatgtatcagagaagtgatggtagaaggatgttgtcaacttcatgggaactcatgtcagtaagccatgttgaacggtgcttagcgcacttctgatggagaatggattaatggtaccacggacaggaggtttgtgtgctggagataaccaaatgagaaggtgcatggatttccagagtggtatgacttggtcgacaaagctagaggccatggatatgcttggaactcaaaagtcatgtttcaactgtgcgctaccatgttggtaggtcgagattcatgaggaaatgttgaacctttgaatttcggtccccttcagttctctgctcagattctttttcctgacaaatcattctgccaaggttgcttcattccatttgatttgtcaggattcatgagtttgctctacttcttcactttgatctggcagatgtactttttggttgtggcaatcgcctgaagtacaaccactggttggtgtcattgcctgaatcttattatttgaacaaagcattgcctgaattgaagagccaggcatcattcttcagcaatttttgcaacccgggtcgtttttgcaacattcttaggttcaacagaccagcaagatgtgcaaacatgcttcatgttgttggaccacttcaggcacctacatcgctagttcagcttttgagttccttattcgtacgatataactttatcctttcaacaattacgcctactctgatgtggggacattgagcacctatgaatcttaaggttttctgctggttgtcatcacaaaactagttcctgatgttcaaatatcaagaagagatggtggttgaatagccctatatgttggctaatggagagacagtccggcaccttgtgataggcagataggggtggagtaatggtactgcattgttgctagctgtttctctatatctaacaattttgtggcaaggaaacttaccagccagtctgtgtgctgaagattggtggttaccgtctgcctcgctgcagctgtatcttcaattcttcatacacattacttctgctgtcttttcttgcctggagttggttctgactcttcgctttggagggcaaaatgctagtattataattcagaaccattgttgcgataatttaaaattactttaggttattccagttatcagcctattattgttggagattggctgttaaactatgcctaaaatttgaaatggggagagaaccaagttttgttcgctgatcaaagttagcaggagatgattctgccttctgcgcaagaagcaaagatggaggaatcacagggggctatggatgttgaggagcacaactctag

SEQ ID NO: 4071 - DNA, 579 bp, Zea Mays
atgtcacgcagcaacgccttgatgtggttgttgcttctcgcgctctcgtgctggtcgtggtgcgcggggacggactacccggccctgtgcaacgcgacgctggccccgtacgcggcggaggtcggggccagcccggcgcgcctgtcgctggcggcgctgacggtcacgctggacggcgcgcggagggcgacggccgcgatgaaggcaatggcggcgggcggcgcgagcagccaccacctcgtgcccgtggcggccgaggcggcggcagactgcgtgggcatgctcgaggacgccgtggacctgctgcggcagtcggtggaggcaatggagcgcctcggcaaggagccggccagcgccagtgccagcgccagcgggcaggccgggcggagcgtcaggttccaggtgaacagcgtgcagacgtgggcgagcgccgcgctgacgaacgacggcatgtgcatggaggggttcaagggccagcccgccgtcgtgagggaggccgtgcggaggaacgtcgccggcgccatgcacctcacggccatcgcgctcgccatcatcaacgccatggccaagcaaatgtag

SEQ ID NO: 4072 - DNA, 7272 bp, Zea Mays
atggacagcacggcgaacttgttcaccgccgcccccttggacaacgacagcaatagaagcaagcctccggccactaggtgcagcgcctggaggagcaaaccaccacgaacactcatcagatcaataaccgccaatgacggcaagagatggaggagcgaatccaggaggcaagcttgccgtcacctgcacgaggatgaggcgcgcgaggcgggatctgccctcggcgaccctctggaaaccggagccaccgccgctgctcccgctgcttgggtatctaacgccgccacgacggccccatctgagcccacaggatcccctgctgatgtcgaagccttcgctgatcctactgccgtcggtgacgatgagcacgactccaaggaggtcttcctgcgcaggtacttcctccatgagtgggagctggtctccgcgatcctccgccgtatcgtcgccggcggcggcgttgtccaatccgtcgatgtccacagtgtccgctttctcgtaagcactcttctctccccatttccaaatgctccctgccgttgagaggagcgtgtagctctgagaacaacattgacttctgtttggttattttaaaggatattatctgctttagcgtcttattctaaatgcacaacaaccgaatttgaagacatcatgtccaatttcttgcaaccttttagttgtctaggtggcagtttaaactgtttggttgatgttaatctgtgaatgcacaatttatttgctaatataggataacaaaggctgagctgagatacatatgacttacatgaatcaatcctaggccctagaatgatatgttatttaggaatcacattctgctttccctggtacaaaaatggttctgagtaagagttatgactaatgatctattaccacctatgttttctggtcgagcgaccagctggtcgaaccgggggaacgaccaggcgactaatctcgattagtcgacgactaggtcgactaatcgacctctggtcgacctagtcgtatattagtcgtcatgttgatccaggacatatgtatatactatatagtatataattatataactatatataaaggatagggtaaacatggcatgaattctgcaatactgatttaagaaattgagagaagatatttgttcatccaaatatccaactgaaaacatcaaagaaacacttactagttactaccagataccacatagcacacattatcatgacggcgacaaccaaactctatatgtatcaaaggaataaggattcagaggatggcaacatgaacaaggatggcaacatgaacagaatctctattgtctacatgaactgagtcagaaacatagaaggacataacacaatacataagacagaagtgaatacgacctccagatcatgaactcatgttgtgcaccggtgatctggggccgctgacgccaaggaagaccaactgggctgaggttttttaatacgtcgactgtcactaaagccgcgccgccggtgatcaacttaccaggaggcaggaaccttgcgcagtgcaccgacaccggtgataaaaaaccaggagctaggaggatagagaacgacgacaggagaagagattagagatagagaagcaaaactgcagaagcaaggagatgaagacgccaacaatcaaggagattggaaacaaaccgtcgtgtgcaagggtatttcacgacggcgcctcctgtagacgggccgcccgccaaaaaaaaccaacgattcttttacaggatataaaccctagtcgctaagcactacctgatcgaggatttatcggacctaatcgtcgactagtcggatgactaggtcgaccagatcacctgatcgggtcggatccctaatcgcctacccctaaaccgaccagcccgactaatcgcgactaatcgcgattagtcggacgacttgaaatcagaggcacctctatagataaaagacaacaagaggcaaaggtccacatgatgtagaaacattaggaaaacaactgatatatttggataacacccagacatcgtatttctgacttgaagtgtaaagagttatactccctctgttccaaatgtaagatgtttaaagtttttctaagtcaaacatcttcaaatttgatcagatttatagaaaaacatagcaaatgtcaaacaccaagaaaatatactataaaacaatcaatgctggatttaattaaactaatttggctttgtagatgttgctacatttttttctataaactttgtcaaactgtaatatgtttgacttaggacaaaaccaaaacaccttatactttagaattgagtgattattttttccttctttggttcacagatgaatgacatattgaaaatcaacatggtccctgatgcaactttggccactactttcaataatagtatgtttgtaaaacacagtaagattgtgctattatgaaagcacttttaagaaaaatatgtgtgttacattttcatatatccagcgttaatatttgtagagcgtcaacctttgaactgatattcacgacactcttacagagatggcctattgccgctagcgtgtaggatttgttaattccactcaccctactatggtctacaaactcaataagtctatgtatggactgaagcaggcacctaggacttggtacagtagatttgcttcttacttgctctccttagggtttactacgaccaagtcagacacttccttgttcatctaccagcgtggtaatgacactgtgtacctcctcatgtatgttgatgacattgtgctcactacctctactttggctctcttgcaccgtgttatgcccgtggtcgccagcgatgatcgccgaggacatgagcgccaataaatctgtcgccgtcagagagacaaaatcgaggtatgtgtgtgatgttgtatttcagatattcagtgtccaacacagagttcgattacagcttttatccctcacacacgccacggcccacacgacccaacaccattacaagatacggcccacacttatttattgtgccccatccggcacgccagccttgtcaccatctttaggcatcacctcccgcactaccggctctcgcttcttcctccctcgccttgctctccctggttgtcaggcgtgacatctgctccctcctgagtgcttgcttgtccccaagcaacaacatatggaaagcactgacgcaccacgtaaaagtcttcccaagttgctgaatcgctgggaatatggctccagcggatgagtacctttggaacagcgcgaccacctttctttaccaggcgcctgtccagaatctcttcaggaacgacatcctgttgagccaagtcattgtatcaaggcaaaatagagaaaactggggagtaattggcagtgaacagcttcaattgcgacatgtgaaagacaggatggatctgggcagacgaaggtaactccaggcgataggcaactttaccaattaatattaccaatattcctctcactccacttatggagccccttagtaagctgctgaagctttaccttagccatggcaacctgcaccttaatattactcttataggtatgaccgttagcccaccactccaaggctttaaccatcttgtcactcttcatcatctcaccattggccaccttgactgctgccagcccacatttgatcagtggtaaccccaatctgtcaaccatatgcctgctgatgaagctggctgaccttccggaatccaccaacacaagcatcacttggttcttaatgagggccctcactcccatgcactcctctaaagtggtaccagtgatagcatgcaacgacaacagatactcctcacttttctccttttgctcaatcttacccaacatttcctcggtcagagtcattcccaaaccttcagcagacaatgcgcattcagctgcatctgcagtttctttggacacttggcttggtggcctggttcaaaaaaatttcccacacgtaaaataaagtacattttgtctacaatactccttaactagtcgttcctttgacaactccattggtgtgttctgaactcgggtttcaggttgaggaagaaccactgaaccggtgttgtacaactaacttcaattttttgcctctgcttctccaacaccagtttctgcatctgagcgagtaaagctgctcggtccacagtagacagcaaatgagactgcactggaccctgcaactccggtttcactcctttcataaactgggaaacataaagtgtctcatgcaacttggggttatgcgctgctgtcgaataccgaatttcctcaaactccttcaggtaatcttctacataccccttttgatacgagttcagcagattgtgcatcgccttgggatattcctctgccccaaattttgctttcaccgcctcaccaaattcctcccaatttcccagcccgtgctctggtttgtaaatctgaaaccaacgggatgcatttccctccatatgcaaagaagtagacgtgaccctcactgtttcaagaacacggtacataacgaaaaaatccacacacttcgctaaccagatcttcggctcaaccccttcaaactttggaaaagttggcctaggtagtggaacatgctgataatcctgatcctcctcccgacgagaatttccctcgcgttgctggactggagaaattccacgatgcctttggggttgtggaggagtgttgagtcgtgcgttcagacgtggttccccgttcgggcgctccccgatcggcgtctccgagaactccagatccggagccatcatctccagcctcatctccgccaccaccttcctcgtctattccagctgttgcgccaaccgcacccgttcctccgccgccttctgggccacggtcgccgtgagctccgcttggaccatcagttgttgttgcaccgcatccactccttcaaccttctccgacagccgatccagcttgtccatcatccgatccccttgctccttctcctagttgtccatggtgtccaggataaactgggtctacatagatggcttaggcaccggcgccgtggcgactacccacgccgaggacaaagggctttgataccagatgttatgcccgtggccgccagcgacgatcgccgaggatgtgagcgccaagaaatctaccgccgtcagagagacaacgtcgaggtatgtgtgtgatgttgtatttcagatgttcagtgtctagaacaaagttcgattacagcttttatccctcacacacgtcacgtcccacacgaccaacgccattacaagatgtggcccacacttatttaatgtgccccatccggcatgccagccttgccgccatcttcaggcatcacctctcgcaccaccgccatcaacattgtctacctctttgtcaactcgatccagcaatgcatgaagcatgttgagattgatattcactttgtccatgagcacgtcgtcgtcggggacgttcgtatcctccacatcccaacaagctcgcattttccagtcatcttcaccaagggtcttccatcctcggtgttcttggagttatggtccagtctcaacatctaccgtggctagagtttcgactgtggaaagtgttagacagtaattatattatgcccgcttttatggttatgtaggtgtgtgttggctatgtgttatgggcctagctgagccgagcccatgtatagcctattaggcctaatagggttagggaaaccctagacctatatattataatccctacaccaatcaatacatcttcgaatcattctcctaaatcctctgataatgttcaaaatgaagtgccaaggggtttgaatctaaagtaatgggattttacctataagtacatctagtttcttgaatgatgttgttttctatgaacctatagttgccttttgaaaatattgccttaataattatttacaacactgattattctataaacttatttgagcgacccgagcctctacctcaacctcgtaggaagaccgaaccgagccgcaccgagcggagactggctcgactcagctcgtttctagccctagaaatttggtcaccaatttgtggatattatttgtcttggtggtggtattgttgtttcacatttaactgattcacattttaccaataagttcctactgtagcatatccaccattggtgaaacttcttcaggttagctattatagcaagcatgtgctctcagggctcgtgatctctacaggtggattgcaagtgtctttgaagaaaacttcaacgtcagctttggtagggtatctccaggattcagacatcaatactaattgtgaagggaaaagtagagagtatatattgagttgtgatctcctatcggtccttcagcactaccagaaatgtgatcgcgtaattactcccacattgaagactattgaggctctcgagtaaaaaggttttcttgaacaaggaggggtacagtgagttctacggtggactggtagattcggcgggttttgagatgaagggatccaaggatttcacaaagttatgtgcaggtccctcaatccttggatacatttcttcacagtcagatggaatttgcactacggcattttctcaactcctcacattcctaggccacagataccccaagatagcatttatcatttcttgcctgagaacgcagaactccgtgcaaggatcagctcagctgagctcaaatactctgcattctgcaatcttacagatccgaaaagctgcagccgaccaggtgtacgtgtaccttgtgctgctgcaaaatgatggtcttattacgtcggagaatatggataaagcccgggaattacttgtggagacatgctgggaaggagatgtgaaggaagcagcgcaggaggtcagaaatcaacgagatggctggtcaccactacacaggagtctggaaaccaagaaacaaaaaagaacgcttgccacttcgactgatgagaacaaatcttattcgtcgttggtcgatttcagtggatactaaggatgattggggttttcgttggccttccatcttattttcgaccaaaagtttgtatgagtgttgctctccgcatttaactgtactagcgcagtagcgctcactgtcgaatgtcgctatctgtttggatgagtgtggttgttttgagattttcgttattttgtctggtggtggactggtggttggggtggggaggagagagttgtactgctggacgatgtaatttttggaacgtctgatcaaagtagtaagttactcttaca

SEQ ID NO: 4073 - DNA, 3932 bp, Zea Mays
atggacagcacggcgaacttgttcaccgccgcccccttggacaacgacagcaatagaagcaagcctccggccactaggtgcagcgcctggaggagcaaaccaccacgaacactcatcagatcaataaccgccaatgacggcaagagatggaggagcgaatccaggaggcaagcttgccgtcacctgcacgaggatgaggcgcgcgaggcgggatctgccctcggcgaccctctggaaaccggagccaccgccgctgctcccgctgcttgggtatctaacgccgccacgacggccccatctgagcccacaggatcccctgctgatgtcgaagccttcgctgatcctactgccgtcggtgacgatgagcacgactccaaggaggtcttcctgcgcaggtacttcctccatgagtgggagctggtctccgcgatcctccgccgtatcgtcgccggcggcggcgttgtccaatccgtcgatgtccacagtgtccgctttctcgtaagcactcttctctccccatttccaaatgctccctgccgttgagaggagcgtgtagctctgagaacaacattgacttctgtttggttattttaaaggatattatctgctttagcgtcttattctaaatgcacaacaaccgaatttgaagacatcatgtccaatttcttgcaaccttttagttgtctaggtggcagtttaaactgtttggttgatgttaatctgtgaatgcacaatttatttgctaatataggataacaaaggctgagctgagatacatatgacttacatgaatcaatcctaggccctagaatgatatgttatttaggaatcacattctgctttccctggtacaaaaatggttctgagtaagagttatgactaatgatctattaccacctatgttttctggtcgagcgaccagctggtcgaaccgggggaacgaccaggcgactaatctcgattagtcgacgactaggtcgactaatcgacctctggtcgacctagtcgtatattagtcgtcatgttgatccaggacatatgtatatactatatagtatataattatataactatatataaaggatagggtaaacatggcatgaattctgcaatactgatttaagaaattgagagaagatatttgttcatccaaatatccaactgaaaacatcaaagaaacacttactagttactaccagataccacatagcacacattatcatgacggcgacaaccaaactctatatgtatcaaaggaataaggattcagaggatggcaacatgaacaaggatggcaacatgaacagaatctctattgtctacatgaactgagtcagaaacatagaaggacataacacaatacataagacagaagtgaatacgacctccagatcatgaactcatgttgtgcaccggtgatctggggccgctgacgccaaggaagaccaactgggctgaggttttttaatacgtcgactgtcactaaagccgcgccgccggtgatcaacttaccaggaggcaggaaccttgcgcagtgcaccgacaccggtgataaaaaaccaggagctaggaggatagagaacgacgacaggagaagagattagagatagagaagcaaaactgcagaagcaaggagatgaagacgccaacaatcaaggagattggaaacaaaccgtcgtgtgcaagggtatttcacgacggcgcctcctgtagacgggccgcccgccaaaaaaaaccaacgattcttttacaggatataaaccctagtcgctaagcactacctgatcgaggatttatcggacctaatcgtcgactagtcggatgactaggtcgaccagatcacctgatcgggtcggatccctaatcgcctacccctaaaccgaccagcccgactaatcgcgactaatcgcgattagtcggacgacttgaaatcagaggcacctctatagataaaagacaacaagaggcaaaggtccacatgatgtagaaacattaggaaaacaactgatatatttggataacacccagacatcgtatttctgacttgaagtgtaaagagttatactccctctgttccaaatgtaagatgtttaaagtttttctaagtcaaacatcttcaaatttgatcagatttatagaaaaacatagcaaatgtcaaacaccaagaaaatatactataaaacaatcaatgctggatttaattaaactaatttggctttgtagatgttgctacatttttttctataaactttgtcaaactgtaatatgtttgacttaggacaaaaccaaaacaccttatactttagaattgagtgattattttttccttctttggttcacagatgaatgacatattgaaaatcaacatggtccctgatgcaactttggccactactttcaataatagtatgtttgtaaaacacagtaagattgtgctattatgaaagcacttttaagaaaaatatgtgtgttacattttcatatatccagcgttaatatttgtagagcgtcaacctttgaactgatattcacgacactcttacagagatggcctattgccgctagcgtgtaggatttgttaattccactcaccctactatggtctacaaactcaataagtctatgtatggactgaagcaggcacctaggacttggtacagtagatttgcttcttacttgctctccttagggtttactacgaccaagtcagacacttccttgttcatctaccagcgtggtaatgacactgtgtacctcctcatgtatgttgatgacattgtgctcactacctctactttggctctcttgcaccgtgttatgcccgtggtcgccagcgatgatcgccgaggacatgagcgccaataaatctgtcgccgtcagagagacaaaatcgaggtggattgcaagtgtctttgaagaaaacttcaacgtcagctttggtagggtatctccaggattcagacatcaatactaattgtgaagggaaaagtagagagtatatattgagttgtgatctcctatcggtccttcagcactaccagaaatgtgatcgcgtaattactcccacattgaagactattgaggctctcgagtaaaaaggttttcttgaacaaggaggggtacagtgagttctacggtggactggtagattcggcgggttttgagatgaagggatccaaggatttcacaaagttatgtgcaggtccctcaatccttggatacatttcttcacagtcagatggaatttgcactacggcattttctcaactcctcacattcctaggccacagataccccaagatagcatttatcatttcttgcctgagaacgcagaactccgtgcaaggatcagctcagctgagctcaaatactctgcattctgcaatcttacagatccgaaaagctgcagccgaccaggtgtacgtgtaccttgtgctgctgcaaaatgatggtcttattacgtcggagaatatggataaagcccgggaattacttgtggagacatgctgggaaggagatgtgaaggaagcagcgcaggaggtcagaaatcaacgagatggctggtcaccactacacaggagtctggaaaccaagaaacaaaaaagaacgcttgccacttcgactgatgagaacaaatcttattcgtcgttggtcgatttcagtggatactaaggatgattggggttttcgttggccttccatcttattttcgaccaaaagtttgtatgagtgttgctctccgcatttaactgtactagcgcagtagcgctcactgtcgaatgtcgctatctgtttggatgagtgtggttgttttgagattttcgttattttgtctggtggtggactggtggttggggtggggaggagagagttgtactgctggacgatgtaatttttggaacgtctgatcaaagtagtaagttactcttaca

SEQ ID NO: 4074 - DNA, 1998 bp, Zea Mays
cattgttgaacagaactccccaaaacacccccgcccttcgcacgctgtctcggtatctcctctgcgccttctctctctccatctcctcaccaaccaaggcactctcgcctcccgtcttctccccctcttcttctctctctagttgccaaatcggagcggcagcaacgacagatccaatacatataggttccattgcatcacacatcagtcactccaaaaccatcaaatcacacgcccatcagatcacacaggcaaagaggagagagagagagaggagggtgggtgaggaggaagatgatgagagatatatcctactaaactatccatccatccatcaatcaggtagcccggcagcaatcgcgtgccgcctttccactcacgtacaccaccaccaccaccacctctcagcacagcagtcggctcggttcgttcgttgccgcgtcaaatcggggcaagaagccagcagctagccagccccctgtcgcagtgttgcttcgcgtgccctgctgttgcttgcaccgcgcacgtacgtacctggagcaagctgcggtcgattgatcgaccggtggttcgctgtcgccgcggtcggcatgtcgtcctcgtcctcgtcctcctcggccgccacggtgttcccgccgtccccgcagctgccgccgcctctcctggtggagaacctgccgccgctgcatcagcttacgccgccggtagccgcggcggccgcgccggcctccgagcagctctgctacgtgcactgccacttctgcgacaccgtcctcgtcgtgagcgtgcctacgagcagcctgttcaagacggtgacggtacgatgcggccactgcagcagcttgctcaccgtcaacatgaggggcctcctcttcccgggcacgccggcgaacacagccgcggccgccgcggccgcgccgccaccaccaccagctgctgctgtcaccagtactaccgccaccatgaccacggcgccgccgccgccgccagccacctcggtcaacaacaacgggcagttccacttcatcccccactcgctcgacctcgcgctgcccatccctccccaccaatccctcctgctggacgagatatccagcgccgcgaacccgagcctgcagttgctggagcagcacggcctcggcggcatgattaccagcggcaggaacgcggccgcgccgcacccgcacccgccccagccccaggcgcctgcagcgggtaaaggggccaaagagccgtcgccgcgcgctaactccgccatcaacagacggacgaaatccaacgcatcaaggctggcaatcccgacatctcgcacagggaggccttcagcgcggcggccaagaactgggcgcactttccacacatccactttggactcatgccagatcaccaggggcccaagaagacaagcctgctacctcaggatcaccagagaagcgacggcggcgggctactaaaggaagggctgtacgctgcggcagccaacatgggggttgctccatactaatattagagtagcaaagctgctacgtactgttagggctctatggactactacgaagctatggacgtgtttggtaggctgcatatgggccggccaggctggtaagatacagcgtacgcttgtttggttgcttgtctctgtatctggtgggctgaggggcggtgtttggttgcctgtatgtctgtgctcacctgcactgcgggatgcaacatctcgctgtgagccaggctgtggagaaacgagtttcatttctgtatctcgggagccaggccctggctagcctgtttggagcgggcaggctccactgcgaaacgaaccaaacacgccctatatgtatctagctagctagggctgttacgttaagttagacaaggccgggcttagcgtgacctcataaattggcttgttaaacgttgcagtcacgtacgtatccgctatactagctgtgtaaacgacatgcatggtcgatcgatggagcttgttaaaccttgcatgtt

SEQ ID NO: 4075 - DNA, 1978 bp, Zea Mays
cccaaaacacccccgcccttcgcacgctgtctcggtatctcctctgcgccttctctctctccatctcctcaccaaccaaggcactctcgcctcccgtcttctccccctcttcttctctctctagttgccaaatcggagcggcagcaacgacagatccaatacatataggttccattgcatcacacatcagtcactccaaaaccatcaaatcacacgcccatcagatcacacaggcaaagaggagagagagagagaggagggtgggtgaggaggaagatgatgagagatatatcctactaaactatccatccatccatcaatcaggtagcccggcagcaatcgcgtgccgcctttccactcacgtacaccaccaccaccaccacctctcagcacagcagtcggctcggttcgttcgttgccgcgtcaaatcggggcaagaagccagcagctagccagccccctgtcgcagtgttgcttcgcgtgccctgctgttgcttgcaccgcgcacgtacgtacctggagcaagctgcggtcgattgatcgaccggtggttcgctgtcgccgcggtcggcatgtcgtcctcgtcctcgtcctcctcggccgccacggtgttcccgccgtccccgcagctgccgccgcctctcctggtggagaacctgccgccgctgcatcagcttacgccgccggtagccgcggcggccgcgccggcctccgagcagctctgctacgtgcactgccacttctgcgacaccgtcctcgtcgtgagcgtgcctacgagcagcctgttcaagacggtgacggtacgatgcggccactgcagcagcttgctcaccgtcaacatgaggggcctcctcttcccgggcacgccggcgaacacagccgcggccgccgcggccgcgccgccaccaccaccagctgctgctgtcaccagtactaccgccaccatgaccacggcgccgccgccgccgccagccacctcggtcaacaacaacgggcagttccacttcatcccccactcgctcgacctcgcgctgcccatccctccccaccaatccctcctgctggacgagatatccagcgccgcgaacccgagcctgcagttgctggagcagcacggcctcggcggcatgattaccagcggcaggaacgcggccgcgccgcacccgcacccgccccagccccaggcgcctgcagcggctccggagaagaggcagcgcgtgccgtcggcgtacaaccgcttcatcaaggacgaaatccaacgcatcaaggctggcaatcccgacatctcgcacagggaggccttcagcgcggcggccaagaactgggcgcactttccacacatccactttggactcatgccagatcaccaggggcccaagaagacaagcctgctacctcaggatcaccagagaagcgacggcggcgggctactaaaggaagggctgtacgctgcggcagccaacatgggggttgctccatactaatattagagtagcaaagctgctacgtactgttagggctctatggactactacgaagctatggacgtgtttggtaggctgcatatgggccggccaggctggtaagatacagcgtacgcttgtttggttgcttgtctctgtatctggtgggctgaggggcggtgtttggttgcctgtatgtctgtgctcacctgcactgcgggatgcaacatctcgctgtgagccaggctgtggagaaacgagtttcatttctgtatctcgggagccaggccctggctagcctgtttggagcgggcaggctccactgcgaaacgaaccaaacacgccctatatgtatctagctagctagggctgttacgttaagttagacaaggccgggcttagcgtgacctcataaattggcttgttaaacgttgcagtcacgtacgtatccgctatactagctgtgtaaacgacatgcatggtcgatcgatggagcttgttaaaccttgcatgtt

SEQ ID NO: 4076 - DNA, 804 bp, Zea Mays
cgagcagctagtgaggaacacatctccggagaagaggcagcgcgtgccgtcggcgtacaaccgcttcatcaaggacgaaatccaacgcatcaaggctggcaatcccgacatctcgcacagggaggccttcagcgcggcggccaagaactgggcgcactttccacacatccactttggactcatgccagatcaccaggggcccaagaagacaagcctgctacctcaggatcaccagagaagcgacggcggcgggctactaaaggaagggctgtacgctgcggcagccaacatgggggttgctccatactaatattagagtagcaaagctgctacgtactgttagggctctatggactactacgaagctatggacgtgtttggtaggctgcatatgggccggccaggctggtaagatacagcgtacgcttgtttggttgcttgtctctgtatctggtgggctgaggggcggtgtttggttgcctgtatgtctgtgctcacctgcactgcgggatgcaacatctcgctgtgagccaggctgtggagaaacgagtttcatttctgtatctcgggagccaggccctggctagcctgtttggagcgggcaggctccactgcgaaacgaaccaaacacgccctatatgtatctagctagctagggctgttacgttaagttagacaaggccgggcttagcgtgacctcataaattggcttgttaaacgttgcagtcacgtacgtatccgctatactagctgtgtaaacgacatgcatggtcgatcgatggagcttgttaaaccttgcatgtt

SEQ ID NO: 4077 - DNA, 3120 bp, Zea Mays
ctggcttgctgcagaagttgaagaacatcattacaaacgagctccctacaaagtatacagactaaaaaaaatagaaaaggaattccgcataaacccctcccagccaaaaaaaaccacccccgccgcggccgccgagcgagcggtaagcagccgccgcaccacgagagcgggatggcgtcggctccggagccggagaacgggagggaactctacgcgctgctccacctctcgccggacgcctccagcgaggaagtccgcagggcgtaccgccagtttgcgcaaatctaccaccccgataaataccaggacccgcagatgaaggatgtagcaactgaaaacttccaacgaatatgtgaagcttatgagatactatcagatgataacaaaagacaggtgtatgacatctatggtatggaaggtttaaattctggcctggaacttggtcccaagctaactaaaccagaagaaatcaaggaacagttagaacgactgcggcggcgcaaggaggaagaaaaacttttcaagcatgctctacccaatggctcaatcattgctaatttctcagtgccacaatatttaaatgacgggagcatcatgagaggaatggcgatgcttagtcaagttgagttgccagtgtccaagcaaaatactgtcgttgttggtgggaatttgattgtaaatggctcagctggatctggagcagcaaccactgtgctgcgacaccagttgtctcctgtttcctctattgagtttatggccacagctggactacgttctgttattggtgggcagatgtttcgtcaaatttcaccacattctacagcaacttctggacttgctgtttctttgagagatgggtctatcaacttgtcaaatgcctggactcgccaattgtctgacaatactgttggaaatatacagctagtccttggcgatgaatcaagtatttctgttggatggcaaaagaaggatgaaaaacgtactgcaactggagaagtaaaggtagtttcacttaggtagtgtttggttgaagagccaagtagaacggaactgttctgtcccagttttgttgttgtttggttacaaagtaactagaacggaatgactccaattagggaatattctcctcagatctggaaccatcccgctccaaaaaatcaaccggacggagccgcttcgttcccagcccgctcgcacagtcacgctccgttccgttcactctccaaccaaacaaaaaacagagccgctccgttccatattaccaaacacagaacagagcggctccgttcctagaatcagggatggaacgactccgttctacttggcttctcaaccaaacactaccttagaagccaactcagacattaatgaaactgttggcattatcttagaaatgcatggttaactccgtatagatctagtttgatagatgtgttcttattgttttgttctgaagaatctatgccccttttcatataaatattcccatctagttctctttggaacataagagtagtacttgttgtagtcgtttcaaaaactttccattgtgttctgaagctagttgtgtagtcagtaatgaggtaggattatagagcagcttaaaagtggtcatagcttcatggccatcatatactttattttttaggagaacagtgatgaaggtcctccagaaattttaatatcattgatataggctaatgttgtgcaaagacttgcaaaacaaaacaaaggtcttcatgaccaggaaaaggcagtatacttctaaaagatgaagatgcatttttctgtctaatagtttaagaactatcttgtgtttaatgtgggtccttgaaaacaagaagcacatctatgcacataacctgtggtgagtatgctacaattccatgtgatatcttcttacaacacatgcggagtatattgtccacacatttgaactgattttgtgtattttggttgtaaatctgcaatgccttcttccttcaacagctatctgtttttatgtattttctcctcttatgtcaggccaacatctgatgctctcagtggtgttcatttattaattaccttttctttttctctttagtttggaactaatttttttggtgcatctgctcattatacacatcgcttctcctccaaatctcatgcacgcatcgctggtagagttggaagcacaatccttgattttgaaattggaggagggaggcgaatatcagaatttagtactgtaaggatgatgtataacataggaattcagggcgtatcttggaagtttgagttacatcgtgctggtcaaaagttaatcatcccagtcttgctttcaactgatttaaatccattatttgttaccagtgcatttgctattccttcaacactgtattttctacttcagacatatgttgtaaagccttactaccttaagcgagaaaagcagaaaacactagaaaagatggaaggcttatctacacagctaactgaagccagaaaggcagctgaaaaagctcaaaaattactggaacctgtctccaaccgtaagaagaatagacagctagagaacaacggattggtgataacgaaggctctatatggcagtcgccaaaaaatcaaaatgagcagtgaattgaatgatatacacaatgacatggcttcacaagtatttgatgtgaccatcccactgaacttcctcgttactgaggcaggccagctcaagcttcatgacgggataaagaagtctggaataatgggtttctacgatccttgtcctggagacccgaagctattacttgtcgagtatacgtttcatggtcataaatacaaggtcatggtggatgactatgaggcgctgttgataccacaagatatccatcaattttgaacggttcctgatgtaaaagccacatcaaaacgattttgggtcatcagctccctttctcacattttttgttccttttgtgttgagctatctctgttttcggtcattccttaatgcgcctcgtatttgtatacacatgtcggtttgtgccacctcgaggtcatacacaccaacagcaggtaataaagctgtagccagtagttttccagaaagaaaaaaaataaaaataaaagtaaaactcaatg

SEQ ID NO: 4078 - DNA, 1992 bp, Zea Mays
agaacatcattacaaacgagctccctacaaagtatacagactaaaaaaaatagaaaaggaattccgcataaacccctcccagccaaaaaaaaccacccccgccgcggccgccgagcgagcggtaagcagccgccgcaccacgagagcgggatggcgtcggctccggagccggagaacgggagggaactctacgcgctgctccacctctcgccggacgcctccagcgaggaagtccgcagggcgtaccgccagtttgcgcaaatctaccaccccgataaataccaggacccgcagatgaaggatgtagcaactgaaaacttccaacgaatatgtgaagcttatgagatactatcagatgataacaaaagacaggtgtatgacatctatggtatggaaggtttaaattctggcctggaacttggtcccaagctaactaaaccagaagaaatcaaggaacagttagaacgactgcggcggcgcaaggaggaagaaaaacttttcaagcatgctctacccaatggctcaatcattgctaatttctcagtgccacaatatttaaatgacgggagcatcatgagaggaatggcgatgcttagtcaagttgagttgccagtgtccaagcaaaatactgtcgttgttggtgggaatttgattgtaaatggctcagctggatctggagcagcaaccactgtgctgcgacaccagttgtctcctgtttcctctattgagtttatggccacagctggactacgttctgttattggtgggcagatgtttcgcaacttctggacttgctgtttctttgagagatgggtctatcaacttgtcaaatgcctggactcgccaattgtctgacaatactgttggaaatatacagctagtccttggcgatgaatcaagtatttctgttggatggcaaaagaaggatgaaaaacgtactgcaactggagaagtaaagtttggaactaatttttttggtgcatctgctcattatacacatcgcttctcctccaaatctcatgcacgcatcgctggtagagttggaagcacaatccttgattttgaaattggaggagggaggcgaatatcagaatttagtactgtaaggatgatgtataacataggaattcagggcgtatcttggaagtttgagttacatcgtgctggtcaaaagttaatcatcccagtcttgctttcaactgatttaaatccattatttgttaccagtgcatttgctattccttcaacactgtattttctacttcagacatatgttgtaaagccttactaccttaagcgagaaaagcagaaaacactagaaaagatggaaggcttatctacacagctaactgaagccagaaaggcagctgaaaaagctcaaaaattactggaacctgtctccaaccgtaagaagaatagacagctagagaacaacggattggtgataacgaaggctctatatggcagtcgccaaaaaatcaaaatgagcagtgaattgaatgatatacacaatgacatggcttcacaagtatttgatgtgaccatcccactgaacttcctcgttactgaggcaggccagctcaagcttcatgacgggataaagaagtctggaataatgggtttctacgatccttgtcctggagacccgaagctattacttgtcgagtatacgtttcatggtcataaatacaaggtcatggtggatgactatgaggcgctgttgataccacaagatatccatcaattttgaacggttcctgatgtaaaagccacatcaaaacgattttgggtcatcagctccctttctcacattttttgttccttttgtgttgagctatctctgttttcggtcattccttaatgcgcctcgtatttgtatacacatgtcggtttgtgccacctcgaggtcatacacaccaacagcaggtaataaagctgtagccagtagttttccagaaagaaaaaaaataaaaataaaagtaaaactcaatg

SEQ ID NO: 4079 - DNA, 2009 bp, Zea Mays
agaacatcattacaaacgagctccctacaaagtatacagactaaaaaaaatagaaaaggaattccgcataaacccctcccagccaaaaaaaaccacccccgccgcggccgccgagcgagcggtaagcagccgccgcaccacgagagcgggatggcgtcggctccggagccggagaacgggagggaactctacgcgctgctccacctctcgccggacgcctccagcgaggaagtccgcagggcgtaccgccagtttgcgcaaatctaccaccccgataaataccaggacccgcagatgaaggatgtagcaactgaaaacttccaacgaatatgtgaagcttatgagatactatcagatgataacaaaagacaggtgtatgacatctatggtatggaaggtttaaattctggcctggaacttggtcccaagctaactaaaccagaagaaatcaaggaacagttagaacgactgcggcggcgcaaggaggaagaaaaacttttcaagcatgctctacccaatggctcaatcattgctaatttctcagtgccacaatatttaaatgacgggagcatcatgagaggaatggcgatgcttagtcaagttgagttgccagtgtccaagcaaaatactgtcgttgttggtgggaatttgattgtaaatggctcagctggatctggagcagcaaccactgtgctgcgacaccagttgtctcctgtttcctctattgagtttatggccacagctggactacgttctgttattggtgggcagatgtttcgtcaaatttcaccacattctacagcaacttctggacttgctgtttctttgagagatgggtctatcaacttgtcaaatgcctggactcgccaattgtctgacaatactgttggaaatatacagctagtccttggcgatgaatcaagtatttctgttggatggcaaaagaaggatgaaaaacgtactgcaactggagaatttggaactaatttttttggtgcatctgctcattatacacatcgcttctcctccaaatctcatgcacgcatcgctggtagagttggaagcacaatccttgattttgaaattggaggagggaggcgaatatcagaatttagtactgtaaggatgatgtataacataggaattcagggcgtatcttggaagtttgagttacatcgtgctggtcaaaagttaatcatcccagtcttgctttcaactgatttaaatccattatttgttaccagtgcatttgctattccttcaacactgtattttctacttcagacatatgttgtaaagccttactaccttaagcgagaaaagcagaaaacactagaaaagatggaaggcttatctacacagctaactgaagccagaaaggcagctgaaaaagctcaaaaattactggaacctgtctccaaccgtaagaagaatagacagctagagaacaacggattggtgataacgaaggctctatatggcagtcgccaaaaaatcaaaatgagcagtgaattgaatgatatacacaatgacatggcttcacaagtatttgatgtgaccatcccactgaacttcctcgttactgaggcaggccagctcaagcttcatgacgggataaagaagtctggaataatgggtttctacgatccttgtcctggagacccgaagctattacttgtcgagtatacgtttcatggtcataaatacaaggtcatggtggatgactatgaggcgctgttgataccacaagatatccatcaattttgaacggttcctgatgtaaaagccacatcaaaacgattttgggtcatcagctccctttctcacattttttgttccttttgtgttgagctatctctgttttcggtcattccttaatgcgcctcgtatttgtatacacatgtcggtttgtgccacctcgaggtcatacacaccaacagcaggtaataaagctgtagccagtagttttccagaaagaaaaaaaataaaaataaaagtaaaactcaatg

SEQ ID NO: 4080 - DNA, 1177 bp, Zea Mays
cagcgcctgacctccaaagcccaccttttcccaccgtttctttcctcacctcccgcgacagcaccggtagctgccatggcctcttgcgacctccttgatgtcgaccctctggagcttcagtttccgttcgtgctcgacaagcagatcccctgcccgctgcggctcgccaacaggactgaccgtaccgtcgcctttaaggtgaagacgacgaacccgaggaagtactgcgtgcgccccaacaatggcatcgtaccgccccgatccttgtgtacggttgtagtcacgatgcaggcgcagacggtggtgcctccggatttgcagtgcaaggacaagttcatggtgcagagcgtggtcatcagtgatagcttgtcagccaaggacataacctctcaaatgttcgcgaaagaggggggtaatgtgctccaggaggtaaaattgaaggttgcttatgtgatgccacctgaaccaccatcagagattgcagaggagcacgatggtttagatcgagttttagtgcctatgcagaggatcgtggataatgggaaaagtacttcagagctatcgagtggctccgtgtcattgaggagtttggatcacctgttggtcgaattgtgaagagtgaggagtttctgaaggctgcaggacctgctatggaaacaaaaacatatgcaggacctggtgaacaatctcatcagctgtcagctataattacaaagctgactgaagaaaagaattctgctcttgagcaaaacagaaagcttcaagttgaattggaacttgtaaggtgcgaagccaggaaacagcaaagcgcgttctcgttggttctcctaatagcgtttgggctccttggcattgttctaggttacattgttaagaaatgataatttcatagtctaatcgagcaatcgctatggtaaataaaaggtaacatgtcgtgtgattcttacattcatcagccagctgccaatgctacagagaagtgcaagcgtcagttgacaaaccgggggtgggggtgggggtgcggagtacaatagcatgtattttgatccacatgatgtatttacacgaatcactggaaaagtgattgttgtttggtttctgtatctatcccataccgtttgtctctaaaattgtgaattgggtccactcatggatgtgaccacgttgttaacaaaat

SEQ ID NO: 4081 - DNA, 1146 bp, Zea Mays
ctcacctcccgcgacagcaccggtagctgccatggcctcttgcgacctccttgatgtcgaccctctggagcttcagtttccgttcgtgctcgacaagcagatcccctgcccgctgcggctcgccaacaggactgaccgtaccgtcgcctttaagtaggtgaagacgacgaacccgaggaagtactgcgtgcgccccaacaatggcatcgtaccgccccgatccttgtgtacggttgtagtcacgatgcaggcgcagacggtggtgcctccggatttgcagtgcaaggacaagttcatggtgcagagcgtggtcatcagtgatagcttgtcagccaaggacataacctctcaaatgttcgcgaaagaggggggtaatgtgctccaggaggtaaaattgaaggttgcttatgtgatgccacctgaaccaccatcagagattgcagaggagcacgatggtttagatcgagttttagtgcctatgcagaggatcgtggataatgggaaaagtacttcagagctatcgagtggctccgtgtcattgaggtcagctgaggagtttggatcacctgttggtcgaattgtgaagagtgaggagtttctgaaggctgcaggacctgctatggaaacaaaaacatatgcaggacctggtgaacaatctcatcagctgtcagctataattacaaagctgactgaagaaaagaattctgctcttgagcaaaacagaaagcttcaagttgaattggaacttgtaaggtgcgaagccaggaaacagcaaagcgcgttctcgttggttctcctaatagcgtttgggctccttggcattgttctaggttacattgttaagaaatgataatttcatagtctaatcgagcaatcgctatggtaaataaaaggtaacatgtcgtgtgattcttacattcatcagccagctgccaatgctacagagaagtgcaagcgtcagttgacaaaccgggggtgggggtgggggtgcggagtacaatagcatgtattttgatccacatgatgtatttacacgaatcactggaaaagtgattgttgtttggtttctgtatctatcccataccgtttgtctctaaaattgtgaattgggtccactcatggatgtgaccacgttgttaacaaaat

SEQ ID NO: 4082 - DNA, 3374 bp, Zea Mays
aaaatgtttcctcatgagtggaccgacactttgtagaaattcgctcaatagcccggctgacgtcactaattcaccctctctttccggccgccgccacgggctctccatggaacggctcaaatcggcggtgccgcccgacctccggcgggccgtcggcgagggcacggccgccgatctagctaacaccacctctcgcctgttcgccttcttcgacagccttcctctcttccaccaggttatgcaagaactgaccgaccccgagcttgcgttgtgtcgcaaagacaaggtgaaggctgtagagttgaagggccacggcaacgcgtgcttctctaggagggagttcgggaaagctctcaggttctattcgcaggcattgcgccatgtcccaattaattcgggtggcatggatgtgaacttggtatcttcattatatgtcaatcgagcctccaccatgcataaattaggtctgttcgaagaatctctaagggactgtgacagggccataaccatttctcctaattattctaaggcttggtacaggaagggaatggtaaaaacagcgctcaagaattattcatctgcaatacatgatttagaggtggcattgagccaggaagtgacttcttcggggaagagtaacatagaacaagagctgaagttgattttagagaagcatgaaagtgtcaatgaagctgggacatcaaactgtgatagcaaggatagagatttgcctcttgcaggacaacctcataaaattgttatagagagtatttcaacaccaaacaaaggtagaggaatgatttctacagatgatatccccccagcttcgttgattcatgttgaggaccctcttgctgcgattatcatgaaatcttcccgtgaaacacactgccacttttgcttcagtgaaactccagccgatgttgtattctgtccttcatgtacaataccaatttattgttcaaaaaggtgccaggagcaatcagcaggtcatatttctcgtgatgaagatactaatcttggatattcaacgaatgttgcaaacctgagtataacttcgagttgcaagtctccaagatctaagctatttgctgaacataggcatgaatgtggaggtgcccactgggcagctgttttaccagctgatgtagttttagctggacgaataatagcacacagcatagtaaaaaggatgccgtctgggaagagctttgctttctctggcccaaatttggatctagttcaccattatgatcaacattctcctgccaacaagttggaatcacatatatatgcaattgtcctattgttatgcctccaaaatcattatagatcagaccttttgtggacagaagattctttatcacaggtatatatggcgtttatcttcagacattattgttctgatatacctggttaatgagtatgatctgaaattgatggcgatttcagctcaagattttttataaattttcacaatgctaattgttatcaaatgtcttggtccatactgttttggtggagataaccagtctccttggggattgccagtttcatgttccttagtaatcttaatctcatctctacaataccagtgtttgtcgaacttccttctgtatagtccctttgaacttccttctgtatagtcctctttacacacttttacttgttctgatacttagaaagccattttttaacatgcaagaatttgtatcattacatttaaaaaaggacacaataaaagctctttcacttgtaaattaggtgaacacatcaaaccaaacaaaataggcagaaaagcagaaccaacgaggattattgttatataatcaaatcttaaatgactaaatagcctctagatcaatagccatcctgcaatgcaagtctgcaactgtgtctaacatgttacctaaagcccactggttacactcatggtggtcagacaagaaatcagacaagcttggaactcaagcttcagtcagatatgcctaagctggttcttttgatatttcaaatcaaagtcaattcaattgctattgtctgtatgaggtcgatggacagaggcccagagcacacaataaatagaggtttttatgtagctgaaggtgcaaaaatgtgtagtgtggagcaggtcagggttgcacaagctctttatgtatctggtagcctgttcaatcactcatgtcagcccaatgtgcacgcatattttctttcacgtgcgttcgtgctgagaactactgaatttataaagtccgggagcccagttgaactgtcatatggtccacaggttggcgagatgcatatttcagagagacagaagtcacttcaagagaattactacttcagttgtcaatgttcaagttgttcagagctaaacctatcagaccttgttatgaattcattctgttgtccacaaagcaactgccttggtgccatatcggaatcaacttactacaggtccaaagagaatttcgtgaatgtttcccttggaggatcttatgtctgcaaactatcattgcccgatgtatcgaaggttgatatggatatggagaatgtcgccaaatctctcttgcaaaatagtggtgtcagtctgaacatagatcatggatgttgcatgagttgtagatcctgtattgatctgtcgtctgctctggctacatcacacagggaagaatctaccatcgataggttgaagaaacatacattcctagacaagactctcatcacagaggcattacaatctctaaaacaactcaagaagttgaggcacccatatagcaaggctctcgcgcaggccgaagacacaatcgcagaggcctttgcgaaggtcggagaccaagaactagcacgaaagcactgtgaagcatcaattcagatcctcgagaagctgtaccacccaaaacacatcatcattgctcacgagcttattaagcttgtttcgattctgctgtccctgggagatggggcaagcgccgcagccacattcgctcaagcagaggcaatattctctctttactacggatctcatgtggagaaggttttgacatacatgggtgccctgaagaaagctgtcattgacgtgtagcgtgctgacaatcctcacgcgggaatggccaacacggttctgcagaatcatctcaccttttgcgcttcttcgaggagttaatgtaggggaaaacccaaaaaatatttacaaagcagtgtggtattgcttgtagtttagtttgttctagaaaacacaaactagctcaaccaaacttcctggctaatgagtttggtggatgttctgagtgcctatgttaatgacttgtttcataaatttttttcgtatatactcgttgccttacaaactcggtcggtagaggaaagatcgc

SEQ ID NO: 4083 - DNA, 3384 bp, Zea Mays
aaaatgtttcctcatgagtggaccgacactttgtagaaattcgctcaatagcccggctgacgtcactaattcaccctctctttccggccgccgccacgggctctccatggaacggctcaaatcggcggtgccgcccgacctccggcgggccgtcggcgagggcacggccgccgatctagctaacaccacctctcgcctgttcgccttcttcgacagccttcctctcttccaccaggttatgcaagaactgaccgaccccgagcttgcgttgtgtcgcaaagacaaggtgaaggctgtagagttgaagggccacggcaacgcgtgcttctctaggagggagttcgggaaagctctcaggttctattcgcaggcattgcgccatgtcccaattaattcgggtggcatggatgtgaacttggtatcttcattatatgtcaatcgagcctccaccatgcataaattaggtctgttcgaagaatctctaagggactgtgacagggccataaccatttctcctaattattctaaggcttggtacaggaagggaatggtaaaaacagcgctcaagaattattcatctgcaatacatgatttagaggtggcattgagccaggaagtgacttcttcggggaagagtaacatagaacaagagctgaagttgattttagagaagcatgaaagtgtcaatgaagctgggacatcaaactgtgatagcaaggatagagatttgcctcttgcaggacaacctcataaaattgttatagagagtatttcaacaccaaacaaaggtagaggaatgatttctacagatgatatccccccagcttcgttgattcatgttgaggaccctcttgctgcgttgaatgcagattatcatgaaatcttcccgtgaaacacactgccacttttgcttcagtgaaactccagccgatgttgtattctgtccttcatgtacaataccaatttattgttcaaaaaggtgccaggagcaatcagcaggtcatatttctcgtgatgaagatactaatcttggatattcaacgaatgttgcaaacctgagtataacttcgagttgcaagtctccaagatctaagctatttgctgaacataggcatgaatgtggaggtgcccactgggcagctgttttaccagctgatgtagttttagctggacgaataatagcacacagcatagtaaaaaggatgccgtctgggaagagctttgctttctctggcccaaatttggatctagttcaccattatgatcaacattctcctgccaacaagttggaatcacatatatatgcaattgtcctattgttatgcctccaaaatcattatagatcagaccttttgtggacagaagattctttatcacaggtatatatggcgtttatcttcagacattattgttctgatatacctggttaatgagtatgatctgaaattgatggcgatttcagctcaagattttttataaattttcacaatgctaattgttatcaaatgtcttggtccatactgttttggtggagataaccagtctccttggggattgccagtttcatgttccttagtaatcttaatctcatctctacaataccagtgtttgtcgaacttccttctgtatagtccctttgaacttccttctgtatagtcctctttacacacttttacttgttctgatacttagaaagccattttttaacatgcaagaatttgtatcattacatttaaaaaaggacacaataaaagctctttcacttgtaaattaggtgaacacatcaaaccaaacaaaataggcagaaaagcagaaccaacgaggattattgttatataatcaaatcttaaatgactaaatagcctctagatcaatagccatcctgcaatgcaagtctgcaactgtgtctaacatgttacctaaagcccactggttacactcatggtggtcagacaagaaatcagacaagcttggaactcaagcttcagtcagatatgcctaagctggttcttttgatatttcaaatcaaagtcaattcaattgctattgtctgtatgaggtcgatggacagaggcccagagcacacaataaatagaggtttttatgtagctgaaggtgcaaaaatgtgtagtgtggagcaggtcagggttgcacaagctctttatgtatctggtagcctgttcaatcactcatgtcagcccaatgtgcacgcatattttctttcacgtgcgttcgtgctgagaactactgaatttataaagtccgggagcccagttgaactgtcatatggtccacaggttggcgagatgcatatttcagagagacagaagtcacttcaagagaattactacttcagttgtcaatgttcaagttgttcagagctaaacctatcagaccttgttatgaattcattctgttgtccacaaagcaactgccttggtgccatatcggaatcaacttactacaggtccaaagagaatttcgtgaatgtttcccttggaggatcttatgtctgcaaactatcattgcccgatgtatcgaaggttgatatggatatggagaatgtcgccaaatctctcttgcaaaatagtggtgtcagtctgaacatagatcatggatgttgcatgagttgtagatcctgtattgatctgtcgtctgctctggctacatcacacagggaagaatctaccatcgataggttgaagaaacatacattcctagacaagactctcatcacagaggcattacaatctctaaaacaactcaagaagttgaggcacccatatagcaaggctctcgcgcaggccgaagacacaatcgcagaggcctttgcgaaggtcggagaccaagaactagcacgaaagcactgtgaagcatcaattcagatcctcgagaagctgtaccacccaaaacacatcatcattgctcacgagcttattaagcttgtttcgattctgctgtccctgggagatggggcaagcgccgcagccacattcgctcaagcagaggcaatattctctctttactacggatctcatgtggagaaggttttgacatacatgggtgccctgaagaaagctgtcattgacgtgtagcgtgctgacaatcctcacgcgggaatggccaacacggttctgcagaatcatctcaccttttgcgcttcttcgaggagttaatgtaggggaaaacccaaaaaatatttacaaagcagtgtggtattgcttgtagtttagtttgttctagaaaacacaaactagctcaaccaaacttcctggctaatgagtttggtggatgttctgagtgcctatgttaatgacttgtttcataaatttttttcgtatatactcgttgccttacaaactcggtcggtagaggaaagatcgc

SEQ ID NO: 4084 - DNA, 2750 bp, Zea Mays
aaaatgtttcctcatgagtggaccgacactttgtagaaattcgctcaatagcccggctgacgtcactaattcaccctctctttccggccgccgccacgggctctccatggaacggctcaaatcggcggtgccgcccgacctccggcgggccgtcggcgagggcacggccgccgatctagctaacaccacctctcgcctgttcgccttcttcgacagccttcctctcttccaccaggttatgcaagaactgaccgaccccgagcttgcgttgtgtcgcaaagacaaggtgaaggctgtagagttgaagggccacggcaacgcgtgcttctctaggagggagttcgggaaagctctcaggttctattcgcaggcattgcgccatgtcccaattaattcgggtggcatggatgtgaacttggtatcttcattatatgtcaatcgagcctccaccatgcataaattaggtctgttcgaagaatctctaagggactgtgacagggccataaccatttctcctaattattctaaggcttggtacaggaagggaatggtaaaaacagcgctcaagaattattcatctgcaatacatgatttagaggtggcattgagccaggaagtgacttcttcggggaagagtaacatagaacaagagctgaagttgattttagagaagcatgaaagtgtcaatgaagctgggacatcaaactgtgatagcaaggatagagatttgcctcttgcaggacaacctcataaaattgttatagagagtatttcaacaccaaacaaaggtagaggaatgatttctacagatgatatccccccagcttcgttgattcatgttgaggaccctcttgctgcgattatcatgaaatcttcccgtgaaacacactgccacttttgcttcagtgaaactccagccgatgttgtattctgtccttcatgtacaataccaatttattgttcaaaaaggtgccaggagcaatcagcaggtcatatttctcgtgatgaagatactaatcttggatattcaacgaatgttgcaaacctgagtataacttcgagttgcaagtctccaagatctaagctatttgctgaacataggcatgaatgtggaggtgcccactgggcagctgttttaccagctgatgtagttttagctggacgaataatagcacacagcatagtaaaaaggatgccgtctgggaagagctttgctttctctggcccaaatttggatctagttcaccattatgatcaacattctcctgccaacaagttggaatcacatatatatgcaattgtcctattgttatgcctccaaaatcattatagatcagaccttttgtggacagaagattctttatcacagctggttcttttgatatttcaaatcaaagtcaattcaattgctattgtctgtatgaggtcgatggacagaggcccagagcacacaataaatagaggtttttatgtagctgaaggtgcaaaaatgtgtagtgtggagcaggtcagggttgcacaagctctttatgtatctggtagcctgttcaatcactcatgtcagcccaatgtgcacgcatattttctttcacgtgcgttcgtgctgagaactactgaatttataaagtccgggagcccagttgaactgtcatatggtccacaggttggcgagatgcatatttcagagagacagaagtcacttcaagagaattactacttcagttgtcaatgttcaagttgttcagagctaaacctatcagaccttgttatgaattcattctgttgtccacaaagcaactgccttggtgccatatcggaatcaacttactacaggtccaaagagaatttcgtgaatgtttcccttggaggatcttatgtctgcaaactatcattgcccgatgtatcgaaggttgatatggatatggagaatgtcgccaaatctctcttgcaaaatagtggtgtcagtctgaacatagatcatggatgttgcatgagttgtagatcctgtattgatctgtcgtctgctctggctacatcacacagggaagaatctaccatcgataggttgaagaaacatacattcctagacaagactctcatcacagaggcattacaatctctaaaacaactcaagaagttgaggcacccatatagcaaggctctcgcgcaggccgaagacacaatcgcagaggcctttgcgaaggtcggagaccaagaactagcacgaaagcactgtgaagcatcaattcagatcctcgagaagctgtaccacccaaaacacatcatcattgctcacgagcttattaagcttgtttcgattctgctgtccctgggagatggggcaagcgccgcagccacattcgctcaagcagaggcaatattctctctttactacggatctcatgtggagaaggttttgacatacatgggtgccctgaagaaagctgtcattgacgtgtagcgtgctgacaatcctcacgcgggaatggccaacacggttctgcagaatcatctcaccttttgcgcttcttcgaggagttaatgtaggggaaaacccaaaaaatatttacaaagcagtgtggtattgcttgtagtttagtttgttctagaaaacacaaactagctcaaccaaacttcctggctaatgagtttggtggatgttctgagtgcctatgttaatgacttgtttcataaatttttttcgtatatactcgttgccttacaaactcggtcggtagaggaaagatcgc

SEQ ID NO: 4085 - DNA, 3479 bp, Zea Mays
ccgacactttgtagaaattcgctcaatagcccggctgacgtcactaattcaccctctctttccggccgccgccacgggctctccatggaacggctcaaatcggcggtgccgcccgacctccggcgggccgtcggcgagggcacggccgccgatctagctaacaccacctctcgcctgttcgccttcttcgacagccttcctctcttccaccaggttatgcaagaactgaccgaccccgagcttgcgttgtgtcgcaaagacaaggtgaaggctgtagagttgaagggccacggcaacgcgtgcttctctaggagggagttcgggaaagctctcaggttctattcgcaggcattgcgccatgtcccaattaattcgggtggcatggatgtgaacttggtatcttcattatatgtcaatcgagcctccaccatgcataaattaggtctgttcgaagaatctctaagggactgtgacagggccataaccatttctcctaattattctaaggcttggtacaggaagggaatggtaaaaacagcgctcaagaattattcatctgcaatacatgatttagaggtggcattgagccaggaagtgacttcttcggggaagagtaacatagaacaagagctgaagttgattttagagaagcatgaaagtgtcaatgaagctgggacatcaaactgtgatagcaaggatagagatttgcctcttgcaggacaacctcataaaattgttatagagagtatttcaacaccaaacaaaggtagaggaatgatttctacagatgatatccccccagcttcgttgattcatgttgaggaccctcttgctgcgttgaatgcagattatcatgaaatcttcccgtgaaacacactgccacttttgcttcagtgaaactccagccgatgttgtattctgtccttcatgtacaataccaatttattgttcaaaaaggtgccaggagcaatcagcaggtcatatttctcgtgatgaagatactaatcttggatattcaacgaatgttgcaaacctgagtataacttcgagttgcaagtctccaagatctaagctatttgctgaacataggcatgaatgtggaggtgcccactgggcagctgttttaccagctgatgtagttttagctggacgaataatagcacacagcatagtaaaaaggatgccgtctgggaagagctttgctttctctggcccaaatttggatctagttcaccattatgatcaacattctcctgccaacaagttggaatcacatatatatgcaattgtcctattgttatgcctccaaaatcattatagatcagaccttttgtggacagaagattctttatcacaggtatatatggcgtttatcttcagacattattgttctgatatacctggttaatgagtatgatctgaaattgatggcgatttcagctcaagattttttataaattttcacaatgctaattgttatcaaatgtcttggtccatactgttttggtggagataaccagtctccttggggattgccagtttcatgttccttagtaatcttaatctcatctctacaataccagtgtttgtcgaacttccttctgtatagtccctttgaacttccttctgtatagtcctctttacacacttttacttgttctgatacttagaaagccattttttaacatgcaagaatttgtatcattacatttaaaaaaggacacaataaaagctctttcacttgtaaattaggtgaacacatcaaaccaaacaaaataggcagaaaagcagaaccaacgaggattattgttatataatcaaatcttaaatgactaaatagcctctagatcaatagccatcctgcaatgcaagtctgcaactgtgtctaacatgttacctaaagcccactggttacactcatggtggtcagacaagaaatcagacaagcttggaactcaagcttcagtcagatatgcctaaggtacctgggttcaacgatgttcttatctataccatggttttgtttctcattactaagctttcctatatactgcaattcccccaaaacttttttctctgggggtatagagaaactatggggtatcacattcacattttgtttttgggaaagaagaaactcatgtgttgattatcctctacagctggttcttttgatatttcaaatcaaagtcaattcaattgctattgtctgtatgaggtcgatggacagaggcccagagcacacaataaatagaggtttttatgtagctgaaggtgcaaaaatgtgtagtgtggagcaggtcagggttgcacaagctctttatgtatctggtagcctgttcaatcactcatgtcagcccaatgtgcacgcatattttctttcacgtgcgttcgtgctgagaactactgaatttataaagtccgggagcccagttgaactgtcatatggtccacaggttggcgagatgcatatttcagagagacagaagtcacttcaagagaattactacttcagttgtcaatgttcaagttgttcagagctaaacctatcagaccttgttatgaattcattctgttgtccacaaagcaactgccttggtgccatatcggaatcaacttactacaggatgtatcgaaggttgatatggatatggagaatgtcgccaaatctctcttgcaaaatagtggtgtcagtctgaacatagatcatggatgttgcatgagttgtagatcctgtattgatctgtcgtctgctctggctacatcacacagggaagaatctaccatcgataggttgaagaaacatacattcctagacaagactctcatcacagaggcattacaatctctaaaacaactcaagaagttgaggcacccatatagcaaggctctcgcgcaggccgaagacacaatcgcagaggcctttgcgaaggtcggagaccaagaactagcacgaaagcactgtgaagcatcaattcagatcctcgagaagctgtaccacccaaaacacatcatcattgctcacgagcttattaagcttgtttcgattctgctgtccctgggagatggggcaagcgccgcagccacattcgctcaagcagaggcaatattctctctttactacggatctcatgtggagaaggttttgacatacatgggtgccctgaagaaagctgtcattgacgtgtagcgtgctgacaatcctcacgcgggaatggccaacacggttctgcagaatcatctcaccttttgcgcttcttcgaggagttaatgtaggggaaaacccaaaaaatatttacaaagcagtgtggtattgcttgtagtttagtttgttctagaaaacacaaactagctcaaccaaacttcctggctaatgagtttggtggatgttctgagtgcctatgttaatgacttgtttcataaatttttttcgtatatactcgttgccttacaaactcggtcggtagaggaaagatcgc

SEQ ID NO: 4086 - DNA, 3504 bp, Zea Mays
ccgacactttgtagaaattcgctcaatagcccggctgacgtcactaattcaccctctctttccggccgccgccacgggctctccatggaacggctcaaatcggcggtgccgcccgacctccggcgggccgtcggcgagggcacggccgccgatctagctaacaccacctctcgcctgttcgccttcttcgacagccttcctctcttccaccaggtcgctgggtctgaatggctgtttccgactgcaaggttatgcaagaactgaccgaccccgagcttgcgttgtgtcgcaaagacaaggtgaaggctgtagagttgaagggccacggcaacgcgtgcttctctaggagggagttcgggaaagctctcaggttctattcgcaggcattgcgccatgtcccaattaattcgggtggcatggatgtgaacttggtatcttcattatatgtcaatcgagcctccaccatgcataaattaggtctgttcgaagaatctctaagggactgtgacagggccataaccatttctcctaattattctaaggcttggtacaggaagggaatggtaaaaacagcgctcaagaattattcatctgcaatacatgatttagaggtggcattgagccaggaagtgacttcttcggggaagagtaacatagaacaagagctgaagttgattttagagaagcatgaaagtgtcaatgaagctgggacatcaaactgtgatagcaaggatagagatttgcctcttgcaggacaacctcataaaattgttatagagagtatttcaacaccaaacaaaggtagaggaatgatttctacagatgatatccccccagcttcgttgattcatgttgaggaccctcttgctgcgattatcatgaaatcttcccgtgaaacacactgccacttttgcttcagtgaaactccagccgatgttgtattctgtccttcatgtacaataccaatttattgttcaaaaaggtgccaggagcaatcagcaggtcatatttctcgtgatgaagatactaatcttggatattcaacgaatgttgcaaacctgagtataacttcgagttgcaagtctccaagatctaagctatttgctgaacataggcatgaatgtggaggtgcccactgggcagctgttttaccagctgatgtagttttagctggacgaataatagcacacagcatagtaaaaaggatgccgtctgggaagagctttgctttctctggcccaaatttggatctagttcaccattatgatcaacattctcctgccaacaagttggaatcacatatatatgcaattgtcctattgttatgcctccaaaatcattatagatcagaccttttgtggacagaagattctttatcacaggtatatatggcgtttatcttcagacattattgttctgatatacctggttaatgagtatgatctgaaattgatggcgatttcagctcaagattttttataaattttcacaatgctaattgttatcaaatgtcttggtccatactgttttggtggagataaccagtctccttggggattgccagtttcatgttccttagtaatcttaatctcatctctacaataccagtgtttgtcgaacttccttctgtatagtccctttgaacttccttctgtatagtcctctttacacacttttacttgttctgatacttagaaagccattttttaacatgcaagaatttgtatcattacatttaaaaaaggacacaataaaagctctttcacttgtaaattaggtgaacacatcaaaccaaacaaaataggcagaaaagcagaaccaacgaggattattgttatataatcaaatcttaaatgactaaatagcctctagatcaatagccatcctgcaatgcaagtctgcaactgtgtctaacatgttacctaaagcccactggttacactcatggtggtcagacaagaaatcagacaagcttggaactcaagcttcagtcagatatgcctaaggtacctgggttcaacgatgttcttatctataccatggttttgtttctcattactaagctttcctatatactgcaattcccccaaaacttttttctctgggggtatagagaaactatggggtatcacattcacattttgtttttgggaaagaagaaactcatgtgttgattatcctctacagctggttcttttgatatttcaaatcaaagtcaattcaattgctattgtctgtatgaggtcgatggacagaggcccagagcacacaataaatagaggtttttatgtagctgaaggtgcaaaaatgtgtagtgtggagcaggtcagggttgcacaagctctttatgtatctggtagcctgttcaatcactcatgtcagcccaatgtgcacgcatattttctttcacgtgcgttcgtgctgagaactactgaatttataaagtccgggagcccagttgaactgtcatatggtccacaggttggcgagatgcatatttcagagagacagaagtcacttcaagagaattactacttcagttgtcaatgttcaagttgttcagagctaaacctatcagaccttgttatgaattcattctgttgtccacaaagcaactgccttggtgccatatcggaatcaacttactacaggatgtatcgaaggttgatatggatatggagaatgtcgccaaatctctcttgcaaaatagtggtgtcagtctgaacatagatcatggatgttgcatgagttgtagatcctgtattgatctgtcgtctgctctggctacatcacacagggaagaatctaccatcgataggttgaagaaacatacattcctagacaagactctcatcacagaggcattacaatctctaaaacaactcaagaagttgaggcacccatatagcaaggctctcgcgcaggccgaagacacaatcgcagaggcctttgcgaaggtcggagaccaagaactagcacgaaagcactgtgaagcatcaattcagatcctcgagaagctgtaccacccaaaacacatcatcattgctcacgagcttattaagcttgtttcgattctgctgtccctgggagatggggcaagcgccgcagccacattcgctcaagcagaggcaatattctctctttactacggatctcatgtggagaaggttttgacatacatgggtgccctgaagaaagctgtcattgacgtgtagcgtgctgacaatcctcacgcgggaatggccaacacggttctgcagaatcatctcaccttttgcgcttcttcgaggagttaatgtaggggaaaacccaaaaaatatttacaaagcagtgtggtattgcttgtagtttagtttgttctagaaaacacaaactagctcaaccaaacttcctggctaatgagtttggtggatgttctgagtgcctatgttaatgacttgtttcataaatttttttcgtatatactcgttgccttacaaactcggtcggtagaggaaagatcgc

SEQ ID NO: 4087 - DNA, 2590 bp, Zea Mays
ccgacactttgtagaaattcgctcaatagcccggctgacgtcactaattcaccctctctttccggccgccgccacgggctctccatggaacggctcaaatcggcggtgccgcccgacctccggcgggccgtcggcgagggcacggccgccgatctagctaacaccacctctcgcctgttcgccttcttcgacagccttcctctcttccaccaggttatgcaagaactgaccgaccccgagcttgcgttgtgtcgcaaagacaaggtgaaggctgtagagttgaagggccacggcaacgcgtgcttctctaggagggagttcgggaaagctctcaggttctattcgcaggcattgcgccatgtcccaattaattcgggtggcatggatgtgaacttggtatcttcattatatgtcaatcgagcctccaccatgcataaattaggtctgttcgaagaatctctaagggactgtgacagggccataaccatttctcctaattattctaaggcttggtacaggaagggaatggtaaaaacagcgctcaagaattattcatctgcaatacatgatttagaggtggcattgagccaggaagtgacttcttcggggaagagtaacatagaacaagagctgaagttgattttagagaagcatgaaagtgtcaatgaagctgggacatcaaactgtgatagcaaggatagagatttgcctcttgcaggacaacctcataaaattgttatagagagtatttcaacaccaaacaaaggtagaggaatgatttctacagatgatatccccccagcttcgttgattcatgttgaggaccctcttgctgcgattatcatgaaatcttcccgtgaaacacactgccacttttgcttcagtgaaactccagccgatgttgtattctgtccttcatgtacaataccaatttattgttcaaaaaggtgccaggagcaatcagcaggtcatatttctcgtgatgaagatactaatcttggatattcaacgaatgttgcaaacctgagtataacttcgagttgcaagtctccaagatctaagctatttgctgaacataggcatgaatgtggaggtgcccactgggcagctgttttaccagctgatgtagttttagctggacgaataatagcacacagcatagtaaaaaggatgccgtctgggaagagctttgctttctctggcccaaatttggatctagttcaccattatgatcaacattctcctgccaacaagttggaatcacatatatatgcaattgtcctattgttatgcctccaaaatcattatagatcagaccttttgtggacagaagattctttatcacaggtcagggttgcacaagctctttatgtatctggtagcctgttcaatcactcatgtcagcccaatgtgcacgcatattttctttcacgtgcgttcgtgctgagaactactgaatttataaagtccgggagcccagttgaactgtcatatggtccacaggttggcgagatgcatatttcagagagacagaagtcacttcaagagaattactacttcagttgtcaatgttcaagttgttcagagctaaacctatcagaccttgttatgaattcattctgttgtccacaaagcaactgccttggtgccatatcggaatcaacttactacaggtccaaagagaatttcgtgaatgtttcccttggaggatcttatgtctgcaaactatcattgcccgatgtatcgaaggttgatatggatatggagaatgtcgccaaatctctcttgcaaaatagtggtgtcagtctgaacatagatcatggatgttgcatgagttgtagatcctgtattgatctgtcgtctgctctggctacatcacacagggaagaatctaccatcgataggttgaagaaacatacattcctagacaagactctcatcacagaggcattacaatctctaaaacaactcaagaagttgaggcacccatatagcaaggctctcgcgcaggccgaagacacaatcgcagaggcctttgcgaaggtcggagaccaagaactagcacgaaagcactgtgaagcatcaattcagatcctcgagaagctgtaccacccaaaacacatcatcattgctcacgagcttattaagcttgtttcgattctgctgtccctgggagatggggcaagcgccgcagccacattcgctcaagcagaggcaatattctctctttactacggatctcatgtggagaaggttttgacatacatgggtgccctgaagaaagctgtcattgacgtgtagcgtgctgacaatcctcacgcgggaatggccaacacggttctgcagaatcatctcaccttttgcgcttcttcgaggagttaatgtaggggaaaacccaaaaaatatttacaaagcagtgtggtattgcttgtagtttagtttgttctagaaaacacaaactagctcaaccaaacttcctggctaatgagtttggtggatgttctgagtgcctatgttaatgacttgtttcataaatttttttcgtatatactcgttgccttacaaactcggtcggtagaggaaagatcgc

SEQ ID NO: 4088 - DNA, 2664 bp, Zea Mays
ccgacactttgtagaaattcgctcaatagcccggctgacgtcactaattcaccctctctttccggccgccgccacgggctctccatggaacggctcaaatcggcggtgccgcccgacctccggcgggccgtcggcgagggcacggccgccgatctagctaacaccacctctcgcctgttcgccttcttcgacagccttcctctcttccaccaggttatgcaagaactgaccgaccccgagcttgcgttgtgtcgcaaagacaaggtgaaggctgtagagttgaagggccacggcaacgcgtgcttctctaggagggagttcgggaaagctctcaggttctattcgcaggcattgcgccatgtcccaattaattcgggtggcatggatgtgaacttggtatcttcattatatgtcaatcgagcctccaccatgcataaattaggtctgttcgaagaatctctaagggactgtgacagggccataaccatttctcctaattattctaaggcttggtacaggaagggaatggtaaaaacagcgctcaagaattattcatctgcaatacatgatttagaggtggcattgagccaggaagtgacttcttcggggaagagtaacatagaacaagagctgaagttgattttagagaagcatgaaagtgtcaatgaagctgggacatcaaactgtgatagcaaggatagagatttgcctcttgcaggacaacctcataaaattgttatagagagtatttcaacaccaaacaaaggtagaggaatgatttctacagatgatatccccccagcttcgttgattcatgttgaggaccctcttgctgcgattatcatgaaatcttcccgtgaaacacactgccacttttgcttcagtgaaactccagccgatgttgtattctgtccttcatgtacaataccaatttattgttcaaaaaggtgccaggagcaatcagcaggtcatatttctcgtgatgaagatactaatcttggatattcaacgaatgttgcaaacctgagtataacttcgagttgcaagtctccaagatctaagctatttgctgaacataggcatgaatgtggaggtgcccactgggcagctgttttaccagctgatgtagttttagctggacgaataatagcacacagcatagtaaaaaggatgccgtctgggaagagctttgctttctctggcccaaatttggatctagttcaccattatgatcaacattctcctgccaacaagttggaatcacatatatatgcaattgtcctattgttatgcctccaaaatcattatagatcagaccttttgtggacagaagattctttatcacagctggttcttttgatatttcaaatcaaagtcaattcaattgctattgtctgtatgaggtcgatggacagaggcccagagcacacaataaatagaggtttttatgtagctgaaggtgcaaaaatgtgtagtgtggagcaggtcagggttgcacaagctctttatgtatctggtagcctgttcaatcactcatgtcagcccaatgtgcacgcatattttctttcacgtgcgttcgtgctgagaactactgaatttataaagtccgggagcccagttgaactgtcatatggtccacaggttggcgagatgcatatttcagagagacagaagtcacttcaagagaattactacttcagttgtcaatgttcaagttgttcagagctaaacctatcagaccttgttatgaattcattctgttgtccacaaagcaactgccttggtgccatatcggaatcaacttactacaggatgtatcgaaggttgatatggatatggagaatgtcgccaaatctctcttgcaaaatagtggtgtcagtctgaacatagatcatggatgttgcatgagttgtagatcctgtattgatctgtcgtctgctctggctacatcacacagggaagaatctaccatcgataggttgaagaaacatacattcctagacaagactctcatcacagaggcattacaatctctaaaacaactcaagaagttgaggcacccatatagcaaggctctcgcgcaggccgaagacacaatcgcagaggcctttgcgaaggtcggagaccaagaactagcacgaaagcactgtgaagcatcaattcagatcctcgagaagctgtaccacccaaaacacatcatcattgctcacgagcttattaagcttgtttcgattctgctgtccctgggagatggggcaagcgccgcagccacattcgctcaagcagaggcaatattctctctttactacggatctcatgtggagaaggttttgacatacatgggtgccctgaagaaagctgtcattgacgtgtagcgtgctgacaatcctcacgcgggaatggccaacacggttctgcagaatcatctcaccttttgcgcttcttcgaggagttaatgtaggggaaaacccaaaaaatatttacaaagcagtgtggtattgcttgtagtttagtttgttctagaaaacacaaactagctcaaccaaacttcctggctaatgagtttggtggatgttctgagtgcctatgttaatgacttgtttcataaatttttttcgtatatactcgttgccttacaaactcggtcggtagaggaaagatcgc

SEQ ID NO: 4089 - DNA, 2736 bp, Zea Mays
gacactttgtagaaattcgctcaatagcccggctgacgtcactaattcaccctctctttccggccgccgccacgggctctccatggaacggctcaaatcggcggtgccgcccgacctccggcgggccgtcggcgagggcacggccgccgatctagctaacaccacctctcgcctgttcgccttcttcgacagccttcctctcttccaccaggttatgcaagaactgaccgaccccgagcttgcgttgtgtcgcaaagacaaggtgaaggctgtagagttgaagggccacggcaacgcgtgcttctctaggagggagttcgggaaagctctcaggttctattcgcaggcattgcgccatgtcccaattaattcgggtggcatggatgtgaacttggtatcttcattatatgtcaatcgagcctccaccatgcataaattaggtctgttcgaagaatctctaagggactgtgacagggccataaccatttctcctaattattctaaggcttggtacaggaagggaatggtaaaaacagcgctcaagaattattcatctgcaatacatgatttagaggtggcattgagccaggaagtgacttcttcggggaagagtaacatagaacaagagctgaagttgattttagagaagcatgaaagtgtcaatgaagctgggacatcaaactgtgatagcaaggatagagatttgcctcttgcaggacaacctcataaaattgttatagagagtatttcaacaccaaacaaaggtagaggaatgatttctacagatgatatccccccagcttcgttgattcatgttgaggaccctcttgctgcgttgaatgcagattatcatgaaatcttcccgtgaaacacactgccacttttgcttcagtgaaactccagccgatgttgtattctgtccttcatgtacaataccaatttattgttcaaaaaggtgccaggagcaatcagcaggtcatatttctcgtgatgaagatactaatcttggatattcaacgaatgttgcaaacctgagtataacttcgagttgcaagtctccaagatctaagctatttgctgaacataggcatgaatgtggaggtgcccactgggcagctgttttaccagctgatgtagttttagctggacgaataatagcacacagcatagtaaaaaggatgccgtctgggaagagctttgctttctctggcccaaatttggatctagttcaccattatgatcaacattctcctgccaacaagttggaatcacatatatatgcaattgtcctattgttatgcctccaaaatcattatagatcagaccttttgtggacagaagattctttatcacagctggttcttttgatatttcaaatcaaagtcaattcaattgctattgtctgtatgaggtcgatggacagaggcccagagcacacaataaatagaggtttttatgtagctgaaggtgcaaaaatgtgtagtgtggagcaggtcagggttgcacaagctctttatgtatctggtagcctgttcaatcactcatgtcagcccaatgtgcacgcatattttctttcacgtgcgttcgtgctgagaactactgaatttataaagtccgggagcccagttgaactgtcatatggtccacaggttggcgagatgcatatttcagagagacagaagtcacttcaagagaattactacttcagttgtcaatgttcaagttgttcagagctaaacctatcagaccttgttatgaattcattctgttgtccacaaagcaactgccttggtgccatatcggaatcaacttactacaggtccaaagagaatttcgtgaatgtttcccttggaggatcttatgtctgcaaactatcattgcccgatgtatcgaaggttgatatggatatggagaatgtcgccaaatctctcttgcaaaatagtggtgtcagtctgaacatagatcatggatgttgcatgagttgtagatcctgtattgatctgtcgtctgctctggctacatcacacagggaagaatctaccatcgataggttgaagaaacatacattcctagacaagactctcatcacagaggcattacaatctctaaaacaactcaagaagttgaggcacccatatagcaaggctctcgcgcaggccgaagacacaatcgcagaggcctttgcgaaggtcggagaccaagaactagcacgaaagcactgtgaagcatcaattcagatcctcgagaagctgtaccacccaaaacacatcatcattgctcacgagcttattaagcttgtttcgattctgctgtccctgggagatggggcaagcgccgcagccacattcgctcaagcagaggcaatattctctctttactacggatctcatgtggagaaggttttgacatacatgggtgccctgaagaaagctgtcattgacgtgtagcgtgctgacaatcctcacgcgggaatggccaacacggttctgcagaatcatctcaccttttgcgcttcttcgaggagttaatgtaggggaaaacccaaaaaatatttacaaagcagtgtggtattgcttgtagtttagtttgttctagaaaacacaaactagctcaaccaaacttcctggctaatgagtttggtggatgttctgagtgcctatgttaatgacttgtttcataaatttttttcgtatatactcgttgccttacaaactcggtcggtagaggaaagatcgc

SEQ ID NO: 4090 - DNA, 3896 bp, Zea Mays
cactttgtagaaattcgctcaatagcccggctgacgtcactaattcaccctctctttccggccgccgccacgggctctccatggaacggctcaaatcggcggtgccgcccgacctccggcgggccgtcggcgagggcacggccgccgatctagctaacaccacctctcgcctgttcgccttcttcgacagccttcctctcttccaccaggttatgcaagaactgaccgaccccgagcttgcgttgtgtcgcaaagacaaggtgaaggctgtagagttgaagggccacggcaacgcgtgcttctctaggagggagttcgggaaagctctcaggttctattcgcaggcattgcgccatgtcccaattaattcgggtggcatggatgtgaacttggtatcttcattatatgtcaatcgagcctccaccatgcataaattaggtctgttcgaagaatctctaagggactgtgacagggccataaccatttctcctaattattctaaggcttggtacaggaagggaatggtaaaaacagcgctcaagaattattcatctgcaatacatgatttagaggtggcattgagccaggaagtgacttcttcggggaagagtaacatagaacaagagctgaagttgattttagagaagcatgaaagtgtcaatgaagctgggacatcaaactgtgatagcaaggatagagatttgcctcttgcaggacaacctcataaaattgttatagagagtatttcaacaccaaacaaaggtagaggaatgatttctacagatgatatccccccagcttcgttgattcatgttgaggaccctcttgctgcgattatcatgaaatcttcccgtgaaacacactgccacttttgcttcagtgaaactccagccgatgttgtattctgtccttcatgtacaataccaatttattgttcaaaaaggtgccaggagcaatcagcaggtcatatttctcgtgatgaagatactaatcttggatattcaacgaatgttgcaaacctgagtataacttcgagttgcaagtctccaagatctaagctatttgctgaacataggcatgaatgtggaggtgcccactgggcagctgttttaccagctgatgtagttttagctggacgaataatagcacacagcatagtaaaaaggatgccgtctgggaagagctttgctttctctggcccaaatttggatctagttcaccattatgatcaacattctcctgccaacaagttggaatcacatatatatgcaattgtcctattgttatgcctccaaaatcattatagatcagaccttttgtggacagaagattctttatcacaggtatatatggcgtttatcttcagacattattgttctgatatacctggttaatgagtatgatctgaaattgatggcgatttcagctcaagattttttataaattttcacaatgctaattgttatcaaatgtcttggtccatactgttttggtggagataaccagtctccttggggattgccagtttcatgttccttagtaatcttaatctcatctctacaataccagtgtttgtcgaacttccttctgtatagtccctttgaacttccttctgtatagtcctctttacacacttttacttgttctgatacttagaaagccattttttaacatgcaagaatttgtatcattacatttaaaaaaggacacaataaaagctctttcacttgtaaattaggtgaacacatcaaaccaaacaaaataggcagaaaagcagaaccaacgaggattattgttatataatcaaatcttaaatgactaaatagcctctagatcaatagccatcctgcaatgcaagtctgcaactgtgtctaacatgttacctaaagcccactggttacactcatggtggtcagacaagaaatcagacaagcttggaactcaagcttcagtcagatatgcctaaggtacctgggttcaacgatgttcttatctataccatggttttgtttctcattactaagctttcctatatactgcaattcccccaaaacttttttctctgggggtatagagaaactatggggtatcacattcacattttgtttttgggaaagaagaaactcatgtgttgattatcctctacagctggttcttttgatatttcaaatcaaagtcaattcaattgctattgtctgtatgaggtcgatggacagaggcccagagcacacaataaatagaggtttttatgtagctgaaggtgcaaaaatgtgtagtgtggagcaggtcagggttgcacaagctctttatgtatctggtagcctgttcaatcactcatgtcagcccaatgtgcacgcatattttctttcacgtgcgttcgtgctgagaactactgaatttataaagtccgggagcccagttgaactgtcatatggtccacaggttggcgagatgcatatttcagagagacagaagtcacttcaagagaattactacttcagttgtcaatgttcaagttgttcagagctaaacctatcagaccttgttatgaattcattctgttgtccacaaagcaactgccttggtgccatatcggaatcaacttactacaggtccaaagagaatttcgtgaatgtttcccttggaggatcttatgtctgcaaactatcattgcccgtacggttattttcattaccatggtttttaatatcttctcatttactctagtcacaaataattgaccttttaaacattgatatgatcttcaaaacacaactttgagtactgtttttgttacaaaatatttatgaatcaaagaaaattggttacttttatgaaactatatttaatgaaaactctgacaaatctgctcgtgctattttgaaatatccaaactcaacatataaaaactagtatacgatcaaaattttgaatggttaacttgagataacttcaaaacgacacttgtgactggagtgagtacttaatgctgatggatcacatatgacatgatgctgagtttcttttaggatgtatcgaaggttgatatggatatggagaatgtcgccaaatctctcttgcaaaatagtggtgtcagtctgaacatagatcatggatgttgcatgagttgtagatcctgtattgatctgtcgtctgctctggctacatcacacagggaagaatctaccatcgataggttgaagaaacatacattcctagacaagactctcatcacagaggcattacaatctctaaaacaactcaagaagttgaggcacccatatagcaaggctctcgcgcagtatgttgtatgtaggccgaagacacaatcgcagaggcctttgcgaaggtcggagaccaagaactagcacgaaagcactgtgaagcatcaattcagatcctcgagaagctgtaccacccaaaacacatcatcattgctcacgagcttattaagcttgtttcgattctgctgtccctgggagatggggcaagcgccgcagccacattcgctcaagcagaggcaatattctctctttactacggatctcatgtggagaaggttttgacatacatgggtgccctgaagaaagctgtcattgacgtgtagcgtgctgacaatcctcacgcgggaatggccaacacggttctgcagaatcatctcaccttttgcgcttcttcgaggagttaatgtaggggaaaacccaaaaaatatttacaaagcagtgtggtattgcttgtagtttagtttgttctagaaaacacaaactagctcaaccaaacttcctggctaatgagtttggtggatgttctgagtgcctatgttaatgacttgtttcataaatttttttcgtatatactcgttgccttacaaactcggtcggtagaggaaagatcgc

SEQ ID NO: 4091 - DNA, 3524 bp, Zea Mays
cactttgtagaaattcgctcaatagcccggctgacgtcactaattcaccctctctttccggccgccgccacgggctctccatggaacggctcaaatcggcggtgccgcccgacctccggcgggccgtcggcgagggcacggccgccgatctagctaacaccacctctcgcctgttcgccttcttcgacagccttcctctcttccaccaggttatgcaagaactgaccgaccccgagcttgcgttgtgtcgcaaagacaaggtgaaggctgtagagttgaagggccacggcaacgcgtgcttctctaggagggagttcgggaaagctctcaggttctattcgcaggcattgcgccatgtcccaattaattcgggtggcatggatgtgaacttggtatcttcattatatgtcaatcgagcctccaccatgcataaattaggtctgttcgaagaatctctaagggactgtgacagggccataaccatttctcctaattattctaaggcttggtacaggaagggaatggtaaaaacagcgctcaagaattattcatctgcaatacatgatttagaggtggcattgagccaggaagtgacttcttcggggaagagtaacatagaacaagagctgaagttgattttagagaagcatgaaagtgtcaatgaagctgggacatcaaactgtgatagcaaggatagagatttgcctcttgcaggacaacctcataaaattgttatagagagtatttcaacaccaaacaaaggtagaggaatgatttctacagatgatatccccccagcttcgttgattcatgttgaggaccctcttgctgcgattatcatgaaatcttcccgtgaaacacactgccacttttgcttcagtgaaactccagccgatgttgtattctgtccttcatgtacaataccaatttattgttcaaaaaggtgccaggagcaatcagcaggtcatatttctcgtgatgaagatactaatcttggatattcaacgaatgttgcaaacctgagtataacttcgagttgcaagtctccaagatctaagctatttgctgaacataggcatgaatgtggaggtgcccactgggcagctgttttaccagctgatgtagttttagctggacgaataatagcacacagcatagtaaaaaggatgccgtctgggaagagctttgctttctctggcccaaatttggatctagttcaccattatgatcaacattctcctgccaacaagttggaatcacatatatatgcaattgtcctattgttatgcctccaaaatcattatagatcagaccttttgtggacagaagattctttatcacaggtatatatggcgtttatcttcagacattattgttctgatatacctggttaatgagtatgatctgaaattgatggcgatttcagctcaagattttttataaattttcacaatgctaattgttatcaaatgtcttggtccatactgttttggtggagataaccagtctccttggggattgccagtttcatgttccttagtaatcttaatctcatctctacaataccagtgtttgtcgaacttccttctgtatagtccctttgaacttccttctgtatagtcctctttacacacttttacttgttctgatacttagaaagccattttttaacatgcaagaatttgtatcattacatttaaaaaaggacacaataaaagctctttcacttgtaaattaggtgaacacatcaaaccaaacaaaataggcagaaaagcagaaccaacgaggattattgttatataatcaaatcttaaatgactaaatagcctctagatcaatagccatcctgcaatgcaagtctgcaactgtgtctaacatgttacctaaagcccactggttacactcatggtggtcagacaagaaatcagacaagcttggaactcaagcttcagtcagatatgcctaaggtacctgggttcaacgatgttcttatctataccatggttttgtttctcattactaagctttcctatatactgcaattcccccaaaacttttttctctgggggtatagagaaactatggggtatcacattcacattttgtttttgggaaagaagaaactcatgtgttgattatcctctacagctggttcttttgatatttcaaatcaaagtcaattcaattgctattgtctgtatgaggtcgatggacagaggcccagagcacacaataaatagaggtttttatgtagctgaaggtgcaaaaatgtgtagtgtggagcagggttgcacaagctctttatgtatctggtagcctgttcaatcactcatgtcagcccaatgtgcacgcatattttctttcacgtgcgttcgtgctgagaactactgaatttataaagtccgggagcccagttgaactgtcatatggtccacaggttggcgagatgcatatttcagagagacagaagtcacttcaagagaattactacttcagttgtcaatgttcaagttgttcagagctaaacctatcagaccttgttatgaattcattctgttgtccacaaagcaactgccttggtgccatatcggaatcaacttactacaggtccaaagagaatttcgtgaatgtttcccttggaggatcttatgtctgcaaactatcattgcccgatgtatcgaaggttgatatggatatggagaatgtcgccaaatctctcttgcaaaatagtggtgtcagtctgaacatagatcatggatgttgcatgagttgtagatcctgtattgatctgtcgtctgctctggctacatcacacagggaagaatctaccatcgataggttgaagaaacatacattcctagacaagactctcatcacagaggcattacaatctctaaaacaactcaagaagttgaggcacccatatagcaaggctctcgcgcaggccgaagacacaatcgcagaggcctttgcgaaggtcggagaccaagaactagcacgaaagcactgtgaagcatcaattcagatcctcgagaagctgtaccacccaaaacacatcatcattgctcacgagcttattaagcttgtttcgattctgctgtccctgggagatggggcaagcgccgcagccacattcgctcaagcagaggcaatattctctctttactacggatctcatgtggagaaggttttgacatacatgggtgccctgaagaaagctgtcattgacgtgtagcgtgctgacaatcctcacgcgggaatggccaacacggttctgcagaatcatctcaccttttgcgcttcttcgaggagttaatgtaggggaaaacccaaaaaatatttacaaagcagtgtggtattgcttgtagtttagtttgttctagaaaacacaaactagctcaaccaaacttcctggctaatgagtttggtggatgttctgagtgcctatgttaatgacttgtttcataaatttttttcgtatatactcgttgccttacaaactcggtcggtagaggaaagatcgc

SEQ ID NO: 4092 - DNA, 3556 bp, Zea Mays
cactttgtagaaattcgctcaatagcccggctgacgtcactaattcaccctctctttccggccgccgccacgggctctccatggaacggctcaaatcggcggtgccgcccgacctccggcgggccgtcggcgagggcacggccgccgatctagctaacaccacctctcgcctgttcgccttcttcgacagccttcctctcttccaccaggttatgcaagaactgaccgaccccgagcttgcgttgtgtcgcaaagacaaggtgaaggctgtagagttgaagggccacggcaacgcgtgcttctctaggagggagttcgggaaagctctcaggttctattcgcaggcattgcgccatgtcccaattaattcgggtggcatggatgtgaacttggtatcttcattatatgtcaatcgagcctccaccatgcataaattaggtctgttcgaagaatctctaagggactgtgacagggccataaccatttctcctaattattctaaggcttggtacaggaagggaatggtaaaaacagcgctcaagaattattcatctgcaatacatgatttagaggtggcattgagccaggaagtgacttcttcggggaagagtaacatagaacaagagctgaagttgattttagagaagcatgaaagtgtcaatgaagctgggacatcaaactgtgatagcaaggatagagatttgcctcttgcaggacaacctcataaaattgttatagagagtatttcaacaccaaacaaaggtagaggaatgatttctacagatgatatccccccagcttcgttgattcatgttgaggaccctcttgctgcgattatcatgaaatcttcccgtgaaacacactgccacttttgcttcagtgaaactccagccgatgttgtattctgtccttcatgtacaataccaatttattgttcaaaaaggtgccaggagcaatcagcaggtcatatttctcgtgatgaagatactaatcttggatattcaacgaatgttgcaaacctgagtataacttcgagttgcaagtctccaagatctaagctatttgctgaacataggcatgaatgtggaggtgcccactgggcagctgttttaccagctgatgtagttttagctggacgaataatagcacacagcatagtaaaaaggatgccgtctgggaagagctttgctttctctggcccaaatttggatctagttcaccattatgatcaacattctcctgccaacaagttggaatcacatatatatgcaattgtcctattgttatgcctccaaaatcattatagatcagaccttttgtggacagaagattctttatcacaggtatatatggcgtttatcttcagacattattgttctgatatacctggttaatgagtatgatctgaaattgatggcgatttcagctcaagattttttataaattttcacaatgctaattgttatcaaatgtcttggtccatactgttttggtggagataaccagtctccttggggattgccagtttcatgttccttagtaatcttaatctcatctctacaataccagtgtttgtcgaacttccttctgtatagtccctttgaacttccttctgtatagtcctctttacacacttttacttgttctgatacttagaaagccattttttaacatgcaagaatttgtatcattacatttaaaaaaggacacaataaaagctctttcacttgtaaattaggtgaacacatcaaaccaaacaaaataggcagaaaagcagaaccaacgaggattattgttatataatcaaatcttaaatgactaaatagcctctagatcaatagccatcctgcaatgcaagtctgcaactgtgtctaacatgttacctaaagcccactggttacactcatggtggtcagacaagaaatcagacaagcttggaactcaagcttcagtcagatatgcctaaggtacctgggttcaacgatgttcttatctataccatggttttgtttctcattactaagctttcctatatactgcaattcccccaaaacttttttctctgggggtatagagaaactatggggtatcacattcacattttgtttttgggaaagaagaaactcatgtgttgattatcctctacagctggttcttttgatatttcaaatcaaagtcaattcaattgctattgtctgtatgaggtcgatggacagaggcccagagcacacaataaatagaggtttttatgtagctgaaggtgcaaaaatgtgtagtgtggagcagggttgcacaagctctttatgtatctggtagcctgttcaatcactcatgtcagcccaatgtgcacgcatattttctttcacgtgcgttcgtgctgagaactactgaatttataaagtccgggagcccagttgaactgtcatatggtccacaggtttcactgaaccccagctccctccaggcctccatttctctctgaatcagatatgaatgtcttctgctttgaacttttcatgcttctgatttctaggttggcgagatgcatatttcagagagacagaagtcacttcaagagaattactacttcagttgtcaatgttcaagttgttcagagctaaacctatcagaccttgttatgaattcattctgttgtccacaaagcaactgccttggtgccatatcggaatcaacttactacaggatgtatcgaaggttgatatggatatggagaatgtcgccaaatctctcttgcaaaatagtggtgtcagtctgaacatagatcatggatgttgcatgagttgtagatcctgtattgatctgtcgtctgctctggctacatcacacagggaagaatctaccatcgataggttgaagaaacatacattcctagacaagactctcatcacagaggcattacaatctctaaaacaactcaagaagttgaggcacccatatagcaaggctctcgcgcaggccgaagacacaatcgcagaggcctttgcgaaggtcggagaccaagaactagcacgaaagcactgtgaagcatcaattcagatcctcgagaagctgtaccacccaaaacacatcatcattgctcacgagcttattaagcttgtttcgattctgctgtccctgggagatggggcaagcgccgcagccacattcgctcaagcagaggcaatattctctctttactacggatctcatgtggagaaggttttgacatacatgggtgccctgaagaaagctgtcattgacgtgtagcgtgctgacaatcctcacgcgggaatggccaacacggttctgcagaatcatctcaccttttgcgcttcttcgaggagttaatgtaggggaaaacccaaaaaatatttacaaagcagtgtggtattgcttgtagtttagtttgttctagaaaacacaaactagctcaaccaaacttcctggctaatgagtttggtggatgttctgagtgcctatgttaatgacttgtttcataaatttttttcgtatatactcgttgccttacaaactcggtcggtagaggaaagatcgc

SEQ ID NO: 4093 - DNA, 3608 bp, Zea Mays
cactttgtagaaattcgctcaatagcccggctgacgtcactaattcaccctctctttccggccgccgccacgggctctccatggaacggctcaaatcggcggtgccgcccgacctccggcgggccgtcggcgagggcacggccgccgatctagctaacaccacctctcgcctgttcgccttcttcgacagccttcctctcttccaccaggttatgcaagaactgaccgaccccgagcttgcgttgtgtcgcaaagacaaggtgaaggctgtagagttgaagggccacggcaacgcgtgcttctctaggagggagttcgggaaagctctcaggttctattcgcaggcattgcgccatgtcccaattaattcgggtggcatggatgtgaacttggtatcttcattatatgtcaatcgagcctccaccatgcataaattaggtctgttcgaagaatctctaagggactgtgacagggccataaccatttctcctaattattctaaggcttggtacaggaagggaatggtaaaaacagcgctcaagaattattcatctgcaatacatgatttagaggtggcattgagccaggaagtgacttcttcggggaagagtaacatagaacaagagctgaagttgattttagagaagcatgaaagtgtcaatgaagctgggacatcaaactgtgatagcaaggatagagatttgcctcttgcaggacaacctcataaaattgttatagagagtatttcaacaccaaacaaaggtagaggaatgatttctacagatgatatccccccagcttcgttgattcatgttgaggaccctcttgctgcgattatcatgaaatcttcccgtgaaacacactgccacttttgcttcagtgaaactccagccgatgttgtattctgtccttcatgtacaataccaatttattgttcaaaaaggtgccaggagcaatcagcaggtcatatttctcgtgatgaagatactaatcttggatattcaacgaatgttgcaaacctgagtataacttcgagttgcaagtctccaagatctaagctatttgctgaacataggcatgaatgtggaggtgcccactgggcagctgttttaccagctgatgtagttttagctggacgaataatagcacacagcatagtaaaaaggatgccgtctgggaagagctttgctttctctggcccaaatttggatctagttcaccattatgatcaacattctcctgccaacaagttggaatcacatatatatgcaattgtcctattgttatgcctccaaaatcattatagatcagaccttttgtggacagaagattctttatcacaggtatatatggcgtttatcttcagacattattgttctgatatacctggttaatgagtatgatctgaaattgatggcgatttcagctcaagattttttataaattttcacaatgctaattgttatcaaatgtcttggtccatactgttttggtggagataaccagtctccttggggattgccagtttcatgttccttagtaatcttaatctcatctctacaataccagtgtttgtcgaacttccttctgtatagtccctttgaacttccttctgtatagtcctctttacacacttttacttgttctgatacttagaaagccattttttaacatgcaagaatttgtatcattacatttaaaaaaggacacaataaaagctctttcacttgtaaattaggtgaacacatcaaaccaaacaaaataggcagaaaagcagaaccaacgaggattattgttatataatcaaatcttaaatgactaaatagcctctagatcaatagccatcctgcaatgcaagtctgcaactgtgtctaacatgttacctaaagcccactggttacactcatggtggtcagacaagaaatcagacaagcttggaactcaagcttcagtcagatatgcctaaggtacctgggttcaacgatgttcttatctataccatggttttgtttctcattactaagctttcctatatactgcaattcccccaaaacttttttctctgggggtatagagaaactatggggtatcacattcacattttgtttttgggaaagaagaaactcatgtgttgattatcctctacagctggttcttttgatatttcaaatcaaagtcaattcaattgctattgtctgtatgaggtcgatggacagaggcccagagcacacaataaatagaggtttttatgtagctgaaggtgcaaaaatgtgtagtgtggagcagggttgcacaagctctttatgtatctggtagcctgttcaatcactcatgtcagcccaatgtgcacgcatattttctttcacgtgcgttcgtgctgagaactactgaatttataaagtccgggagcccagttgaactgtcatatggtccacaggtttcactgaaccccagctccctccaggcctccatttctctctgaatcagatatgaatgtcttctgctttgaacttttcatgcttctgatttctaggttggcgagatgcatatttcagagagacagaagtcacttcaagagaattactacttcagttgtcaatgttcaagttgttcagagctaaacctatcagaccttgttatgaattcattctgttgtccacaaagcaactgccttggtgccatatcggaatcaacttactacaggtccaaagagaatttcgtgaatgtttcccttggaggatcttatgtctgcaaactatcattgcccgttgatatggatatggagaatgtcgccaaatctctcttgcaaaatagtggtgtcagtctgaacatagatcatggatgttgcatgagttgtagatcctgtattgatctgtcgtctgctctggctacatcacacagggaagaatctaccatcgataggttgaagaaacatacattcctagacaagactctcatcacagaggcattacaatctctaaaacaactcaagaagttgaggcacccatatagcaaggctctcgcgcaggccgaagacacaatcgcagaggcctttgcgaaggtcggagaccaagaactagcacgaaagcactgtgaagcatcaattcagatcctcgagaagctgtaccacccaaaacacatcatcattgctcacgagcttattaagcttgtttcgattctgctgtccctgggagatggggcaagcgccgcagccacattcgctcaagcagaggcaatattctctctttactacggatctcatgtggagaaggttttgacatacatgggtgccctgaagaaagctgtcattgacgtgtagcgtgctgacaatcctcacgcgggaatggccaacacggttctgcagaatcatctcaccttttgcgcttcttcgaggagttaatgtaggggaaaacccaaaaaatatttacaaagcagtgtggtattgcttgtagtttagtttgttctagaaaacacaaactagctcaaccaaacttcctggctaatgagtttggtggatgttctgagtgcctatgttaatgacttgtttcataaatttttttcgtatatactcgttgccttacaaactcggtcggtagaggaaagatcgc

SEQ ID NO: 4094 - DNA, 3882 bp, Zea Mays
cactttgtagaaattcgctcaatagcccggctgacgtcactaattcaccctctctttccggccgccgccacgggctctccatggaacggctcaaatcggcggtgccgcccgacctccggcgggccgtcggcgagggcacggccgccgatctagctaacaccacctctcgcctgttcgccttcttcgacagccttcctctcttccaccaggttatgcaagaactgaccgaccccgagcttgcgttgtgtcgcaaagacaaggtgaaggctgtagagttgaagggccacggcaacgcgtgcttctctaggagggagttcgggaaagctctcaggttctattcgcaggcattgcgccatgtcccaattaattcgggtggcatggatgtgaacttggtatcttcattatatgtcaatcgagcctccaccatgcataaattaggtctgttcgaagaatctctaagggactgtgacagggccataaccatttctcctaattattctaaggcttggtacaggaagggaatggtaaaaacagcgctcaagaattattcatctgcaatacatgatttagaggtggcattgagccaggaagtgacttcttcggggaagagtaacatagaacaagagctgaagttgattttagagaagcatgaaagtgtcaatgaagctgggacatcaaactgtgatagcaaggatagagatttgcctcttgcaggacaacctcataaaattgttatagagagtatttcaacaccaaacaaaggtagaggaatgatttctacagatgatatccccccagcttcgttgattcatgttgaggaccctcttgctgcgattatcatgaaatcttcccgtgaaacacactgccacttttgcttcagtgaaactccagccgatgttgtattctgtccttcatgtacaataccaatttattgttcaaaaaggtgccaggagcaatcagcaggtcatatttctcgtgatgaagatactaatcttggatattcaacgaatgttgcaaacctgagtataacttcgagttgcaagtctccaagatctaagctatttgctgaacataggcatgaatgtggaggtgcccactgggcagctgttttaccagctgatgtagttttagctggacgaataatagcacacagcatagtaaaaaggatgccgtctgggaagagctttgctttctctggcccaaatttggatctagttcaccattatgatcaacattctcctgccaacaagttggaatcacatatatatgcaattgtcctattgttatgcctccaaaatcattatagatcagaccttttgtggacagaagattctttatcacaggtatatatggcgtttatcttcagacattattgttctgatatacctggttaatgagtatgatctgaaattgatggcgatttcagctcaagattttttataaattttcacaatgctaattgttatcaaatgtcttggtccatactgttttggtggagataaccagtctccttggggattgccagtttcatgttccttagtaatcttaatctcatctctacaataccagtgtttgtcgaacttccttctgtatagtccctttgaacttccttctgtatagtcctctttacacacttttacttgttctgatacttagaaagccattttttaacatgcaagaatttgtatcattacatttaaaaaaggacacaataaaagctctttcacttgtaaattaggtgaacacatcaaaccaaacaaaataggcagaaaagcagaaccaacgaggattattgttatataatcaaatcttaaatgactaaatagcctctagatcaatagccatcctgcaatgcaagtctgcaactgtgtctaacatgttacctaaagcccactggttacactcatggtggtcagacaagaaatcagacaagcttggaactcaagcttcagtcagatatgcctaaggtacctgggttcaacgatgttcttatctataccatggttttgtttctcattactaagctttcctatatactgcaattcccccaaaacttttttctctgggggtatagagaaactatggggtatcacattcacattttgtttttgggaaagaagaaactcatgtgttgattatcctctacagctggttcttttgatatttcaaatcaaagtcaattcaattgctattgtctgtatgaggtcgatggacagaggcccagagcacacaataaatagaggtttttatgtagctgaaggtgcaaaaatgtgtagtgtggagcagggttgcacaagctctttatgtatctggtagcctgttcaatcactcatgtcagcccaatgtgcacgcatattttctttcacgtgcgttcgtgctgagaactactgaatttataaagtccgggagcccagttgaactgtcatatggtccacaggttggcgagatgcatatttcagagagacagaagtcacttcaagagaattactacttcagttgtcaatgttcaagttgttcagagctaaacctatcagaccttgttatgaattcattctgttgtccacaaagcaactgccttggtgccatatcggaatcaacttactacaggtccaaagagaatttcgtgaatgtttcccttggaggatcttatgtctgcaaactatcattgcccgtacggttattttcattaccatggtttttaatatcttctcatttactctagtcacaaataattgaccttttaaacattgatatgatcttcaaaacacaactttgagtactgtttttgttacaaaatatttatgaatcaaagaaaattggttacttttatgaaactatatttaatgaaaactctgacaaatctgctcgtgctattttgaaatatccaaactcaacatataaaaactagtatacgatcaaaattttgaatggttaacttgagataacttcaaaacgacacttgtgactggagtgagtacttaatgctgatggatcacatatgacatgatgctgagtttcttttaggatgtatcgaaggttgatatggatatggagaatgtcgccaaatctctcttgcaaaatagtggtgtcagtctgaacatagatcatggatgttgcatgagttgtagatcctgtattgatctgtcgtctgctctggctacatcacacagggaagaatctaccatcgataggttgaagaaacatacattcctagacaagactctcatcacagaggcattacaatctctaaaacaactcaagaagttgaggcacccatatagcaaggctctcgcgcaggtgaggccgaagacacaatcgcagaggcctttgcgaaggtcggagaccaagaactagcacgaaagcactgtgaagcatcaattcagatcctcgagaagctgtaccacccaaaacacatcatcattgctcacgagcttattaagcttgtttcgattctgctgtccctgggagatggggcaagcgccgcagccacattcgctcaagcagaggcaatattctctctttactacggatctcatgtggagaaggttttgacatacatgggtgccctgaagaaagctgtcattgacgtgtagcgtgctgacaatcctcacgcgggaatggccaacacggttctgcagaatcatctcaccttttgcgcttcttcgaggagttaatgtaggggaaaacccaaaaaatatttacaaagcagtgtggtattgcttgtagtttagtttgttctagaaaacacaaactagctcaaccaaacttcctggctaatgagtttggtggatgttctgagtgcctatgttaatgacttgtttcataaatttttttcgtatatactcgttgccttacaaactcggtcggtagaggaaagatcgc

SEQ ID NO: 4095 - DNA, 2659 bp, Zea Mays
cactttgtagaaattcgctcaatagcccggctgacgtcactaattcaccctctctttccggccgccgccacgggctctccatggaacggctcaaatcggcggtgccgcccgacctccggcgggccgtcggcgagggcacggccgccgatctagctaacaccacctctcgcctgttcgccttcttcgacagccttcctctcttccaccaggttatgcaagaactgaccgaccccgagcttgcgttgtgtcgcaaagacaaggtgaaggctgtagagttgaagggccacggcaacgcgtgcttctctaggagggagttcgggaaagctctcaggttctattcgcaggcattgcgccatgtcccaattaattcgggtggcatggatgtgaacttggtatcttcattatatgtcaatcgagcctccaccatgcataaattaggtctgttcgaagaatctctaagggactgtgacagggccataaccatttctcctaattattctaaggcttggtacaggaagggaatggtaaaaacagcgctcaagaattattcatctgcaatacatgatttagaggtggcattgagccaggaagtgacttcttcggggaagagtaacatagaacaagagctgaagttgattttagagaagcatgaaagtgtcaatgaagctgggacatcaaactgtgatagcaaggatagagatttgcctcttgcaggacaacctcataaaattgttatagagagtatttcaacaccaaacaaaggtagaggaatgatttctacagatgatatccccccagcttcgttgattcatgttgaggaccctcttgctgcgttgaatgcagattatcatgaaatcttcccgtgaaacacactgccacttttgcttcagtgaaactccagccgatgttgtattctgtccttcatgtacaataccaatttattgttcaaaaaggtgccaggagcaatcagcaggtcatatttctcgtgatgaagatactaatcttggatattcaacgaatgttgcaaacctgagtataacttcgagttgcaagtctccaagatctaagctatttgctgaacataggcatgaatgtggaggtgcccactgggcagctgttttaccagctgatgtagttttagctggacgaataatagcacacagcatagtaaaaaggatgccgtctgggaagagctttgctttctctggcccaaatttggatctagttcaccattatgatcaacattctcctgccaacaagttggaatcacatatatatgcaattgtcctattgttatgcctccaaaatcattatagatcagaccttttgtggacagaagattctttatcacaggtcagggttgcacaagctctttatgtatctggtagcctgttcaatcactcatgtcagcccaatgtgcacgcatattttctttcacgtgcgttcgtgctgagaactactgaatttataaagtccgggagcccagttgaactgtcatatggtccacagagagacagaagtcacttcaagagaattactacttcagttgtcaatgttcaagttgttcagagctaaacctatcagaccttgttatgaattcattctgttgtccacaaagcaactgccttggtgccatatcggaatcaacttactacaggtccaaagagaatttcgtgaatgtttcccttggaggatcttatgtctgcaaactatcattgcccgatgtatcgaaggttgatatggatatggagaatgtcgccaaatctctcttgcaaaatagtggtgtcagtctgaacatagatcatggatgttgcatgagttgtagatcctgtattgatctgtcgtctgctctggctacatcacacagggaagaatctaccatcgataggttgaagaaacatacattcctagacaagactctcatcacagaggcattacaatctctaaaacaactcaagaagttgaggcacccatatagcaaggctctcgcgcaggtgaggttgctcacttgcctttgttcaaattcagtatccaagttcaccttgcacttatgaacacatggaagtatgttgtatgtaggccgaagacacaatcgcagaggcctttgcgaaggtcggagaccaagaactagcacgaaagcactgtgaagcatcaattcagatcctcgagaagctgtaccacccaaaacacatcatcattgctcacgagcttattaagcttgtttcgattctgctgtccctgggagatggggcaagcgccgcagccacattcgctcaagcagaggcaatattctctctttactacggatctcatgtggagaaggttttgacatacatgggtgccctgaagaaagctgtcattgacgtgtagcgtgctgacaatcctcacgcgggaatggccaacacggttctgcagaatcatctcaccttttgcgcttcttcgaggagttaatgtaggggaaaacccaaaaaatatttacaaagcagtgtggtattgcttgtagtttagtttgttctagaaaacacaaactagctcaaccaaacttcctggctaatgagtttggtggatgttctgagtgcctatgttaatgacttgtttcataaatttttttcgtatatactcgttgccttacaaactcggtcggtagaggaaagatcgc

SEQ ID NO: 4096 - DNA, 3284 bp, Zea Mays
cactttgtagaaattcgctcaatagcccggctgacgtcactaattcaccctctctttccggccgccgccacgggctctccatggaacggctcaaatcggcggtgccgcccgacctccggcgggccgtcggcgagggcacggccgccgatctagctaacaccacctctcgcctgttcgccttcttcgacagccttcctctcttccaccaggttatgcaagaactgaccgaccccgagcttgcgttgtgtcgcaaagacaaggtgaaggctgtagagttgaagggccacggcaacgcgtgcttctctaggagggagttcgggaaagctctcaggttctattcgcaggcattgcgccatgtcccaattaattcgggtggcatggatgtgaacttggtatcttcattatatgtcaatcgagcctccaccatgcataaattaggtctgttcgaagaatctctaagggactgtgacagggccataaccatttctcctaattattctaaggcttggtacaggaagggaatggtaaaaacagcgctcaagaattattcatctgcaatacatgatttagaggtggcattgagccaggaagtgacttcttcggggaagagtaacatagaacaagagctgaagttgattttagagaagcatgaaagtgtcaatgaagctgggacatcaaactgtgatagcaaggatagagatttgcctcttgcaggacaacctcataaaattgttatagagagtatttcaacaccaaacaaaggtagaggaatgatttctacagatgatatccccccagcttcgttgattcatgttgaggaccctcttgctgcgattatcatgaaatcttcccgtgaaacacactgccacttttgcttcagtgaaactccagccgatgttgtattctgtccttcatgtacaataccaatttattgttcaaaaaggtgccaggagcaatcagcaggtcatatttctcgtgatgaagatactaatcttggatattcaacgaatgttgcaaacctgagtataacttcgagttgcaagtctccaagatctaagctatttgctgaacataggcatgaatgtggaggtgcccactgggcagctgttttaccagctgatgtagttttagctggacgaataatagcacacagcatagtaaaaaggatgccgtctgggaagagctttgctttctctggcccaaatttggatctagttcaccattatgatcaacattctcctgccaacaagttggaatcacatatatatgcaattgtcctattgttatgcctccaaaatcattatagatcagaccttttgtggacagaagattctttatcacaggtatatatggcgtttatcttcagacattattgttctgatatacctggttaatgagtatgatctgaaattgatggcgatttcagctcaagattttttataaattttcacaatgctaattgttatcaaatgtcttggtccatactgttttggtggagataaccagtctccttggggattgccagtttcatgttccttagtaatcttaatctcatctctacaataccagtgtttgtcgaacttccttctgtatagtccctttgaacttccttctgtatagtcctctttacacacttttacttgttctgatacttagaaagccattttttaacatgcaagaatttgtatcattacatttaaaaaaggacacaataaaagctctttcacttgtaaattaggtgaacacatcaaaccaaacaaaataggcagaaaagcagaaccaacgaggattattgttatataatcaaatcttaaatgactaaatagcctctagatcaatagccatcctgcaatgcaagtctgcaactgtgtctaacatgttacctaaagcccactggttacactcatggtggtcagacaagaaatcagacaagcttggaactcaagcttcagtcagatatgcctaagctggttcttttgatatttcaaatcaaagtcaattcaattgctattgtctgtatgaggtcgatggacagaggcccagagcacacaataaatagaggtttttatgtagctgaaggtgcaaaaatgtgtagtgtggagcaggtcagggttgcacaagctctttatgtatctggtagcctgttcaatcactcatgtcagcccaatgtgcacgcatattttctttcacgtgcgttcgtgctgagaactactgaatttataaagtccgggagcccagttgaactgtcatatggtccacaggttggcgagatgcatatttcagagagacagaagtcacttcaagagaattactacttcagttgtcaatgttcaagttgttcagagctaaacctatcagaccttgttatgaattcattctgttgtccacaaagcaactgccttggtgccatatcggaatcaacttactacaggatgtatcgaaggttgatatggatatggagaatgtcgccaaatctctcttgcaaaatagtggtgtcagtctgaacatagatcatggatgttgcatgagttgtagatcctgtattgatctgtcgtctgctctggctacatcacacagggaagaatctaccatcgataggttgaagaaacatacattcctagacaagactctcatcacagaggcattacaatctctaaaacaactcaagaagttgaggcacccatatagcaaggctctcgcgcaggccgaagacacaatcgcagaggcctttgcgaaggtcggagaccaagaactagcacgaaagcactgtgaagcatcaattcagatcctcgagaagctgtaccacccaaaacacatcatcattgctcacgagcttattaagcttgtttcgattctgctgtccctgggagatggggcaagcgccgcagccacattcgctcaagcagaggcaatattctctctttactacggatctcatgtggagaaggttttgacatacatgggtgccctgaagaaagctgtcattgacgtgtagcgtgctgacaatcctcacgcgggaatggccaacacggttctgcagaatcatctcaccttttgcgcttcttcgaggagttaatgtaggggaaaacccaaaaaatatttacaaagcagtgtggtattgcttgtagtttagtttgttctagaaaacacaaactagctcaaccaaacttcctggctaatgagtttggtggatgttctgagtgcctatgttaatgacttgtttcataaatttttttcgtatatactcgttgccttacaaactcggtcggtagaggaaagatcgc

SEQ ID NO: 4097 - DNA, 3711 bp, Zea Mays
cactttgtagaaattcgctcaatagcccggctgacgtcactaattcaccctctctttccggccgccgccacgggctctccatggaacggctcaaatcggcggtgccgcccgacctccggcgggccgtcggcgagggcacggccgccgatctagctaacaccacctctcgcctgttcgccttcttcgacagccttcctctcttccaccaggttatgcaagaactgaccgaccccgagcttgcgttgtgtcgcaaagacaaggtgaaggctgtagagttgaagggccacggcaacgcgtgcttctctaggagggagttcgggaaagctctcaggttctattcgcaggcattgcgccatgtcccaattaattcgggtggcatggatgtgaacttggtatcttcattatatgtcaatcgagcctccaccatgcataaattaggtctgttcgaagaatctctaagggactgtgacagggccataaccatttctcctaattattctaaggcttggtacaggaagggaatggtaaaaacagcgctcaagaattattcatctgcaatacatgatttagaggtggcattgagccaggaagtgacttcttcggggaagagtaacatagaacaagagctgaagttgattttagagaagcatgaaagtgtcaatgaagctgggacatcaaactgtgatagcaaggatagagatttgcctcttgcaggacaacctcataaaattgttatagagagtatttcaacaccaaacaaaggtagaggaatgatttctacagatgatatccccccagcttcgttgattcatgttgaggaccctcttgctgcgttgaatgcagattatcatgaaatcttcccgtgaaacacactgccacttttgcttcagtgaaactccagccgatgttgtattctgtccttcatgtacaataccaatttattgttcaaaaaggtgccaggagcaatcagcaggtcatatttctcgtgatgaagatactaatcttggatattcaacgaatgttgcaaacctgagtataacttcgagttgcaagtctccaagatctaagctatttgctgaacataggcatgaatgtggaggtgcccactgggcagctgttttaccagctgatgtagttttagctggacgaataatagcacacagcatagtaaaaaggatgccgtctgggaagagctttgctttctctggcccaaatttggatctagttcaccattatgatcaacattctcctgccaacaagttggaatcacatatatatgcaattgtcctattgttatgcctccaaaatcattatagatcagaccttttgtggacagaagattctttatcacaggtatatatggcgtttatcttcagacattattgttctgatatacctggttaatgagtatgatctgaaattgatggcgatttcagctcaagattttttataaattttcacaatgctaattgttatcaaatgtcttggtccatactgttttggtggagataaccagtctccttggggattgccagtttcatgttccttagtaatcttaatctcatctctacaataccagtgtttgtcgaacttccttctgtatagtccctttgaacttccttctgtatagtcctctttacacacttttacttgttctgatacttagaaagccattttttaacatgcaagaatttgtatcattacatttaaaaaaggacacaataaaagctctttcacttgtaaattaggtgaacacatcaaaccaaacaaaataggcagaaaagcagaaccaacgaggattattgttatataatcaaatcttaaatgactaaatagcctctagatcaatagccatcctgcaatgcaagtctgcaactgtgtctaacatgttacctaaagcccactggttacactcatggtggtcagacaagaaatcagacaagcttggaactcaagcttcagtcagatatgcctaagctggttcttttgatatttcaaatcaaagtcaattcaattgctattgtctgtatgaggtcgatggacagaggcccagagcacacaataaatagaggtttttatgtagctgaaggtgcaaaaatgtgtagtgtggagcaggtcagggttgcacaagctctttatgtatctggtagcctgttcaatcactcatgtcagcccaatgtgcacgcatattttctttcacgtgcgttcgtgctgagaactactgaatttataaagtccgggagcccagttgaactgtcatatggtccacaggttggcgagatgcatatttcagagagacagaagtcacttcaagagaattactacttcagttgtcaatgttcaagttgttcagagctaaacctatcagaccttgttatgaattcattctgttgtccacaaagcaactgccttggtgccatatcggaatcaacttactacaggtccaaagagaatttcgtgaatgtttcccttggaggatcttatgtctgcaaactatcattgcccgtacggttattttcattaccatggtttttaatatcttctcatttactctagtcacaaataattgaccttttaaacattgatatgatcttcaaaacacaactttgagtactgtttttgttacaaaatatttatgaatcaaagaaaattggttacttttatgaaactatatttaatgaaaactctgacaaatctgctcgtgctattttgaaatatccaaactcaacatataaaaactagtatacgatcaaaattttgaatggttaacttgagataacttcaaaacgacacttgtgactggagtgagtacttaatgctgatggatcacatatgacatgatgctgagtttcttttaggatgtatcgaaggttgatatggatatggagaatgtcgccaaatctctcttgcaaaatagtggtgtcagtctgaacatagatcatggatgttgcatgagttgtagatcctgtattgatctgtcgtctgctctggctacatcacacagggaagaatctaccatcgataggttgaagaaacatacattcctagacaagactctcatcacagaggcattacaatctctaaaacaactcaagaagttgaggcacccatatagcaaggctctcgcgcaggccgaagacacaatcgcagaggcctttgcgaaggtcggagaccaagaactagcacgaaagcactgtgaagcatcaattcagatcctcgagaagctgtaccacccaaaacacatcatcattgctcacgagcttattaagcttgtttcgattctgctgtccctgggagatggggcaagcgccgcagccacattcgctcaagcagaggcaatattctctctttactacggatctcatgtggagaaggttttgacatacatgggtgccctgaagaaagctgtcattgacgtgtagcgtgctgacaatcctcacgcgggaatggccaacacggttctgcagaatcatctcaccttttgcgcttcttcgaggagttaatgtaggggaaaacccaaaaaatatttacaaagcagtgtggtattgcttgtagtttagtttgttctagaaaacacaaactagctcaaccaaacttcctggctaatgagtttggtggatgttctgagtgcctatgttaatgacttgtttcataaatttttttcgtatatactcgttgccttacaaactcggtcggtagaggaaagatcgc

SEQ ID NO: 4098 - DNA, 3889 bp, Zea Mays
cactttgtagaaattcgctcaatagcccggctgacgtcactaattcaccctctctttccggccgccgccacgggctctccatggaacggctcaaatcggcggtgccgcccgacctccggcgggccgtcggcgagggcacggccgccgatctagctaacaccacctctcgcctgttcgccttcttcgacagccttcctctcttccaccaggttatgcaagaactgaccgaccccgagcttgcgttgtgtcgcaaagacaaggtgaaggctgtagagttgaagggccacggcaacgcgtgcttctctaggagggagttcgggaaagctctcaggttctattcgcaggcattgcgccatgtcccaattaattcgggtggcatggatgtgaacttggtatcttcattatatgtcaatcgagcctccaccatgcataaattaggtctgttcgaagaatctctaagggactgtgacagggccataaccatttctcctaattattctaaggcttggtacaggaagggaatggtaaaaacagcgctcaagaattattcatctgcaatacatgatttagaggtggcattgagccaggaagtgacttcttcggggaagagtaacatagaacaagagctgaagttgattttagagaagcatgaaagtgtcaatgaagctgggacatcaaactgtgatagcaaggatagagatttgcctcttgcaggacaacctcataaaattgttatagagagtatttcaacaccaaacaaagttgaatgcagattatcatgaaatcttcccgtgaaacacactgccacttttgcttcagtgaaactccagccgatgttgtattctgtccttcatgtacaataccaatttattgttcaaaaaggtgccaggagcaatcagcaggtcatatttctcgtgatgaagatactaatcttggatattcaacgaatgttgcaaacctgagtataacttcgagttgcaagtctccaagatctaagctatttgctgaacataggcatgaatgtggaggtgcccactgggcagctgttttaccagctgatgtagttttagctggacgaataatagcacacagcatagtaaaaaggatgccgtctgggaagagctttgctttctctggcccaaatttggatctagttcaccattatgatcaacattctcctgccaacaagttggaatcacatatatatgcaattgtcctattgttatgcctccaaaatcattatagatcagaccttttgtggacagaagattctttatcacaggtatatatggcgtttatcttcagacattattgttctgatatacctggttaatgagtatgatctgaaattgatggcgatttcagctcaagattttttataaattttcacaatgctaattgttatcaaatgtcttggtccatactgttttggtggagataaccagtctccttggggattgccagtttcatgttccttagtaatcttaatctcatctctacaataccagtgtttgtcgaacttccttctgtatagtccctttgaacttccttctgtatagtcctctttacacacttttacttgttctgatacttagaaagccattttttaacatgcaagaatttgtatcattacatttaaaaaaggacacaataaaagctctttcacttgtaaattaggtgaacacatcaaaccaaacaaaataggcagaaaagcagaaccaacgaggattattgttatataatcaaatcttaaatgactaaatagcctctagatcaatagccatcctgcaatgcaagtctgcaactgtgtctaacatgttacctaaagcccactggttacactcatggtggtcagacaagaaatcagacaagcttggaactcaagcttcagtcagatatgcctaaggtacctgggttcaacgatgttcttatctataccatggttttgtttctcattactaagctttcctatatactgcaattcccccaaaacttttttctctgggggtatagagaaactatggggtatcacattcacattttgtttttgggaaagaagaaactcatgtgttgattatcctctacagctggttcttttgatatttcaaatcaaagtcaattcaattgctattgtctgtatgaggtcgatggacagaggcccagagcacacaataaatagaggtttttatgtagctgaaggtgcaaaaatgtgtagtgtggagcaggtctgtctttttatactttctgtatttttttctgggactgggagcaatatatcatccaactattaaagttgcaaaaggtcgattggttgttgtcaatcattgggctttatctcatgctgataaaacacaatttcaacccagaaggtcaaaactagattagattaaaaaataaaacggagaaagtattatttgaaaagttattggatcgattatcaagtaacaataatcacagtatatgaggcctttttattaaaaaggcatctcactctaaattgtggtattgtgtctgtaacctttgtcttatgttatgtttgctcactgttaggtcagggttgcacaagctctttatgtatctggtagcctgttcaatcactcatgtcagcccaatgtgcacgcatattttctttcacgtgcgttcgtgctgagaactactgaatttataaagtccgggagcccagttgaactgtcatatggtccacaggtttcactgaaccccagctccctccaggcctccatttctctctgaatcagatatgaatgtcttctgctttgaacttttcatgcttctgatttctaggttggcgagatgcatatttcagagagacagaagtcacttcaagagaattactacttcagttgtcaatgttcaagttgttcagagctaaacctatcagaccttgttatgaattcattctgttgtccacaaagcaactgccttggtgccatatcggaatcaacttactacaggtccaaagagaatttcgtgaatgtttcccttggaggatcttatgtctgcaaactatcattgcccgatgtatcgaaggttgatatggatatggagaatgtcgccaaatctctcttgcaaaatagtggtgtcagtctgaacatagatcatggatgttgcatgagttgtagatcctgtattgatctgtcgtctgctctggctacatcacacagggaagaatctaccatcgataggttgaagaaacatacattcctagacaagactctcatcacagaggcattacaatctctaaaacaactcaagaagttgaggcacccatatagcaaggctctcgcgcaggccgaagacacaatcgcagaggcctttgcgaaggtcggagaccaagaactagcacgaaagcactgtgaagcatcaattcagatcctcgagaagctgtaccacccaaaacacatcatcattgctcacgagcttattaagcttgtttcgattctgctgtccctgggagatggggcaagcgccgcagccacattcgctcaagcagaggcaatattctctctttactacggatctcatgtggagaaggttttgacatacatgggtgccctgaagaaagctgtcattgacgtgtagcgtgctgacaatcctcacgcgggaatggccaacacggttctgcagaatcatctcaccttttgcgcttcttcgaggagttaatgtaggggaaaacccaaaaaatatttacaaagcagtgtggtattgcttgtagtttagtttgttctagaaaacacaaactagctcaaccaaacttcctggctaatgagtttggtggatgttctgagtgcctatgttaatgacttgtttcataaatttttttcgtatatactcgttgccttacaaactcggtcggtagaggaaagatcgc

SEQ ID NO: 4099 - DNA, 2621 bp, Zea Mays
cactttgtagaaattcgctcaatagcccggctgacgtcactaattcaccctctctttccggccgccgccacgggctctccatggaacggctcaaatcggcggtgccgcccgacctccggcgggccgtcggcgagggcacggccgccgatctagctaacaccacctctcgcctgttcgccttcttcgacagccttcctctcttccaccaggttatgcaagaactgaccgaccccgagcttgcgttgtgtcgcaaagacaaggtgaaggctgtagagttgaagggccacggcaacgcgtgcttctctaggagggagttcgggaaagctctcaggttctattcgcaggcattgcgccatgtcccaattaattcgggtggcatggatgtgaacttggtatcttcattatatgtcaatcgagcctccaccatgcataaattaggtctgttcgaagaatctctaagggactgtgacagggccataaccatttctcctaattattctaaggcttggtacaggaagggaatggtaaaaacagcgctcaagaattattcatctgcaatacatgatttagaggtggcattgagccaggaagtgacttcttcggggaagagtaacatagaacaagagctgaagttgattttagagaagcatgaaagtgtcaatgaagctgggacatcaaactgtgatagcaaggatagagatttgcctcttgcaggacaacctcataaaattgttatagagagtatttcaacaccaaacaaagttgaatgcagattatcatgaaatcttcccgtgaaacacactgccacttttgcttcagtgaaactccagccgatgttgtattctgtccttcatgtacaataccaatttattgttcaaaaaggtgccaggagcaatcagcaggtcatatttctcgtgatgaagatactaatcttggatattcaacgaatgttgcaaacctgagtataacttcgagttgcaagtctccaagatctaagctatttgctgaacataggcatgaatgtggaggtgcccactgggcagctgttttaccagctgatgtagttttagctggacgaataatagcacacagcatagtaaaaaggatgccgtctgggaagagctttgctttctctggcccaaatttggatctagttcaccattatgatcaacattctcctgccaacaagttggaatcacatatatatgcaattgtcctattgttatgcctccaaaatcattatagatcagaccttttgtggacagaagattctttatcacaggtcagggttgcacaagctctttatgtatctggtagcctgttcaatcactcatgtcagcccaatgtgcacgcatattttctttcacgtgcgttcgtgctgagaactactgaatttataaagtccgggagcccagttgaactgtcatatggtccacaggtttcactgaaccccagctccctccaggcctccatttctctctgaatcagatatgaatgtcttctgctttgaacttttcatgcttctgatttctaggttggcgagatgcatatttcagagagacagaagtcacttcaagagaattactacttcagttgtcaatgttcaagttgttcagagctaaacctatcagaccttgttatgaattcattctgttgtccacaaagcaactgccttggtgccatatcggaatcaacttactacaggtccaaagagaatttcgtgaatgtttcccttggaggatcttatgtctgcaaactatcattgcccgatgtatcgaaggttgatatggatatggagaatgtcgccaaatctctcttgcaaaatagtggtgtcagtctgaacatagatcatggatgttgcatgagttgtagatcctgtattgatctgtcgtctgctctggctacatcacacagggaagaatctaccatcgataggttgaagaaacatacattcctagacaagactctcatcacagaggcattacaatctctaaaacaactcaagaagttgaggcacccatatagcaaggctctcgcgcaggccgaagacacaatcgcagaggcctttgcgaaggtcggagaccaagaactagcacgaaagcactgtgaagcatcaattcagatcctcgagaagctgtaccacccaaaacacatcatcattgctcacgagcttattaagcttgtttcgattctgctgtccctgggagatggggcaagcgccgcagccacattcgctcaagcagaggcaatattctctctttactacggatctcatgtggagaaggttttgacatacatgggtgccctgaagaaagctgtcattgacgtgtagcgtgctgacaatcctcacgcgggaatggccaacacggttctgcagaatcatctcaccttttgcgcttcttcgaggagttaatgtaggggaaaacccaaaaaatatttacaaagcagtgtggtattgcttgtagtttagtttgttctagaaaacacaaactagctcaaccaaacttcctggctaatgagtttggtggatgttctgagtgcctatgttaatgacttgtttcataaatttttttcgtatatactcgttgccttacaaactcggtcggtagaggaaagatcgc

SEQ ID NO: 4100 - DNA, 3197 bp, Zea Mays
cactttgtagaaattcgctcaatagcccggctgacgtcactaattcaccctctctttccggccgccgccacgggctctccatggaacggctcaaatcggcggtgccgcccgacctccggcgggccgtcggcgagggcacggccgccgatctagctaacaccacctctcgcctgttcgccttcttcgacagccttcctctcttccaccaggttatgcaagaactgaccgaccccgagcttgcgttgtgtcgcaaagacaaggtgaaggctgtagagttgaagggccacggcaacgcgtgcttctctaggagggagttcgggaaagctctcaggttctattcgcaggcattgcgccatgtcccaattaattcgggtggcatggatgtgaacttggtatcttcattatatgtcaatcgagcctccaccatgcataaattaggtctgttcgaagaatctctaagggactgtgacagggccataaccatttctcctaattattctaaggcttggtacaggaagggaatggtaaaaacagcgctcaagaattattcatctgcaatacatgatttagaggtggcattgagccaggaagtgacttcttcggggaagagtaacatagaacaagagctgaagttgattttagagaagcatgaaagtgtcaatgaagctgggacatcaaactgtgatagcaaggatagagatttgcctcttgcaggacaacctcataaaattgttatagagagtatttcaacaccaaacaaaggtagaggaatgatttctacagatgatatccccccagcttcgttgattcatgttgaggaccctcttgctgcgttgaatgcagattatcatgaaatcttcccgtgaaacacactgccacttttgcttcagtgaaactccagccgatgttgtattctgtccttcatgtacaataccaatttattgttcaaaaaggtgccaggagcaatcagcaggtcatatttctcgtgatgaagatactaatcttggatattcaacgaatgttgcaaacctgagtataacttcgagttgcaagtctccaagatctaagctatttgctgaacataggcatgaatgtggaggtgcccactgggcagctgttttaccagctgatgtagttttagctggacgaataatagcacacagcatagtaaaaaggatgccgtctgggaagagctttgctttctctggcccaaatttggatctagttcaccattatgatcaacattctcctgccaacaagttggaatcacatatatatgcaattgtcctattgttatgcctccaaaatcattatagatcagaccttttgtggacagaagattctttatcacagctggttcttttgatatttcaaatcaaagtcaattcaattgctattgtctgtatgaggtcgatggacagaggcccagagcacacaataaatagaggtttttatgtagctgaaggtgcaaaaatgtgtagtgtggagcaggtcagggttgcacaagctctttatgtatctggtagcctgttcaatcactcatgtcagcccaatgtgcacgcatattttctttcacgtgcgttcgtgctgagaactactgaatttataaagtccgggagcccagttgaactgtcatatggtccacaggtttcactgaaccccagctccctccaggcctccatttctctctgaatcagatatgaatgtcttctgctttgaacttttcatgcttctgatttctaggttggcgagatgcatatttcagagagacagaagtcacttcaagagaattactacttcagttgtcaatgttcaagttgttcagagctaaacctatcagaccttgttatgaattcattctgttgtccacaaagcaactgccttggtgccatatcggaatcaacttactacaggtccaaagagaatttcgtgaatgtttcccttggaggatcttatgtctgcaaactatcattgcccgtacggttattttcattaccatggtttttaatatcttctcatttactctagtcacaaataattgaccttttaaacattgatatgatcttcaaaacacaactttgagtactgtttttgttacaaaatatttatgaatcaaagaaaattggttacttttatgaaactatatttaatgaaaactctgacaaatctgctcgtgctattttgaaatatccaaactcaacatataaaaactagtatacgatcaaaattttgaatggttaacttgagataacttcaaaacgacacttgtgactggagtgagtacttaatgctgatggatcacatatgacatgatgctgagtttcttttaggatgtatcgaaggttgatatggatatggagaatgtcgccaaatctctcttgcaaaatagtggtgtcagtctgaacatagatcatggatgttgcatgagttgtagatcctgtattgatctgtcgtctgctctggctacatcacacagggaagaatctaccatcgataggttgaagaaacatacattcctagacaagactctcatcacagaggcattacaatctctaaaacaactcaagaagttgaggcacccatatagcaaggctctcgcgcagtatgttgtatgtaggccgaagacacaatcgcagaggcctttgcgaaggtcggagaccaagaactagcacgaaagcactgtgaagcatcaattcagatcctcgagaagctgtaccacccaaaacacatcatcattgctcacgagcttattaagcttgtttcgattctgctgtccctgggagatggggcaagcgccgcagccacattcgctcaagcagaggcaatattctctctttactacggatctcatgtggagaaggttttgacatacatgggtgccctgaagaaagctgtcattgacgtgtagcgtgctgacaatcctcacgcgggaatggccaacacggttctgcagaatcatctcaccttttgcgcttcttcgaggagttaatgtaggggaaaacccaaaaaatatttacaaagcagtgtggtattgcttgtagtttagtttgttctagaaaacacaaactagctcaaccaaacttcctggctaatgagtttggtggatgttctgagtgcctatgttaatgacttgtttcataaatttttttcgtatatactcgttgccttacaaactcggtcggtagaggaaagatcgc

SEQ ID NO: 4101 - DNA, 2781 bp, Zea Mays
cactttgtagaaattcgctcaatagcccggctgacgtcactaattcaccctctctttccggccgccgccacgggctctccatggaacggctcaaatcggcggtgccgcccgacctccggcgggccgtcggcgagggcacggccgccgatctagctaacaccacctctcgcctgttcgccttcttcgacagccttcctctcttccaccaggttatgcaagaactgaccgaccccgagcttgcgttgtgtcgcaaagacaaggtgaaggctgtagagttgaagggccacggcaacgcgtgcttctctaggagggagttcgggaaagctctcaggttctattcgcaggcattgcgccatgtcccaattaattcgggtggcatggatgtgaacttgaaattaggtctgttcgaagaatctctaagggactgtgacagggccataaccatttctcctaattattctaaggcttggtacaggaagggaatggtaaaaacagcgctcaagaattattcatctgcaatacatgatttagaggtggcattgagccaggaagtgacttcttcggggaagagtaacatagaacaagagctgaagttgattttagagaagcatgaaagtgtcaatgaagctgggacatcaaactgtgatagcaaggatagagatttgcctcttgcaggacaacctcataaaattgttatagagagtatttcaacaccaaacaaaggtagaggaatgatttctacagatgatatccccccagcttcgttgattcatgttgaggaccctcttgctgcgattatcatgaaatcttcccgtgaaacacactgccacttttgcttcagtgaaactccagccgatgttgtattctgtccttcatgtacaataccaatttattgttcaaaaaggtgccaggagcaatcagcaggtcatatttctcgtgatgaagatactaatcttggatattcaacgaatgttgcaaacctgagtataacttcgagttgcaagtctccaagatctaagctatttgctgaacataggcatgaatgtggaggtgcccactgggcagctgttttaccagctgatgtagttttagctggacgaataatagcacacagcatagtaaaaaggatgccgtctgggaagagctttgctttctctggcccaaatttggatctagttcaccattatgatcaacattctcctgccaacaagttggaatcacatatatatgcaattgtcctattgttatgcctccaaaatcattatagatcagaccttttgtggacagaagattctttatcacagctggttcttttgatatttcaaatcaaagtcaattcaattgctattgtctgtatgaggtcgatggacagaggcccagagcacacaataaatagaggtttttatgtagctgaaggtgcaaaaatgtgtagtgtggagcaggtcagggttgcacaagctctttatgtatctggtagcctgttcaatcactcatgtcagcccaatgtgcacgcatattttctttcacgtgcgttcgtgctgagaactactgaatttataaagtccgggagcccagttgaactgtcatatggtccacaggtttcactgaaccccagctccctccaggcctccatttctctctgaatcagatatgaatgtcttctgctttgaacttttcatgcttctgatttctaggttggcgagatgcatatttcagagagacagaagtcacttcaagagaattactacttcagttgtcaatgttcaagttgttcagagctaaacctatcagaccttgttatgaattcattctgttgtccacaaagcaactgccttggtgccatatcggaatcaacttactacaggtccaaagagaatttcgtgaatgtttcccttggaggatcttatgtctgcaaactatcattgcccgatgtatcgaaggttgatatggatatggagaatgtcgccaaatctctcttgcaaaatagtggtgtcagtctgaacatagatcatggatgttgcatgagttgtagatcctgtattgatctgtcgtctgctctggctacatcacacagggaagaatctaccatcgataggttgaagaaacatacattcctagacaagactctcatcacagaggcattacaatctctaaaacaactcaagaagttgaggcacccatatagcaaggctctcgcgcaggccgaagacacaatcgcagaggcctttgcgaaggtcggagaccaagaactagcacgaaagcactgtgaagcatcaattcagatcctcgagaagctgtaccacccaaaacacatcatcattgctcacgagcttattaagcttgtttcgattctgctgtccctgggagatggggcaagcgccgcagccacattcgctcaagcagaggcaatattctctctttactacggatctcatgtggagaaggttttgacatacatgggtgccctgaagaaagctgtcattgacgtgtagcgtgctgacaatcctcacgcgggaatggccaacacggttctgcagaatcatctcaccttttgcgcttcttcgaggagttaatgtaggggaaaacccaaaaaatatttacaaagcagtgtggtattgcttgtagtttagtttgttctagaaaacacaaactagctcaaccaaacttcctggctaatgagtttggtggatgttctgagtgcctatgttaatgacttgtttcataaatttttttcgtatatactcgttgccttacaaactcggtcggtagaggaaagatcgc

SEQ ID NO: 4102 - DNA, 2655 bp, Zea Mays
cactttgtagaaattcgctcaatagcccggctgacgtcactaattcaccctctctttccggccgccgccacgggctctccatggaacggctcaaatcggcggtgccgcccgacctccggcgggccgtcggcgagggcacggccgccgatctagctaacaccacctctcgcctgttcgccttcttcgacagccttcctctcttccaccaggttatgcaagaactgaccgaccccgagcttgcgttgtgtcgcaaagacaaggtgaaggctgtagagttgaagggccacggcaacgcgtgcttctctaggagggagttcgggaaagctctcaggttctattcgcaggcattgcgccatgtcccaattaattcgggtggcatggatgtgaacttggtatcttcattatatgtcaatcgagcctccaccatgcataaattaggtctgttcgaagaatctctaagggactgtgacagggccataaccatttctcctaattattctaaggcttggtacaggaagggaatggtaaaaacagcgctcaagaattattcatctgcaatacatgatttagaggtggcattgagccaggaagtgacttcttcggggaagagtaacatagaacaagagctgaagttgattttagagaagcatgaaagtgtcaatgaagctgggacatcaaactgtgatagcaaggatagagatttgcctcttgcagttgaatgcagattatcatgaaatcttcccgtgaaacacactgccacttttgcttcagtgaaactccagccgatgttgtattctgtccttcatgtacaataccaatttattgttcaaaaaggtgccaggagcaatcagcaggtcatatttctcgtgatgaagatactaatcttggatattcaacgaatgttgcaaacctgagtataacttcgagttgcaagtctccaagatctaagctatttgctgaacataggcatgaatgtggaggtgcccactgggcagctgttttaccagctgatgtagttttagctggacgaataatagcacacagcatagtaaaaaggatgccgtctgggaagagctttgctttctctggcccaaatttggatctagttcaccattatgatcaacattctcctgccaacaagttggaatcacatatatatgcaattgtcctattgttatgcctccaaaatcattatagatcagaccttttgtggacagaagattctttatcacaggtcgatggacagaggcccagagcacacaataaatagaggtttttatgtagctgaaggtgcaaaaatgtgtagtgtggagcaggtcagggttgcacaagctctttatgtatctggtagcctgttcaatcactcatgtcagcccaatgtgcacgcatattttctttcacgtgcgttcgtgctgagaactactgaatttataaagtccgggagcccagttgaactgtcatatggtccacaggtttcactgaaccccagctccctccaggcctccatttctctctgaatcagatatgaatgtcttctgctttgaacttttcatgcttctgatttctaggttggcgagatgcatatttcagagagacagaagtcacttcaagagaattactacttcagttgtcaatgttcaagttgttcagagctaaacctatcagaccttgttatgaattcattctgttgtccacaaagcaactgccttggtgccatatcggaatcaacttactacaggtccaaagagaatttcgtgaatgtttcccttggaggatcttatgtctgcaaactatcattgcccgatgtatcgaaggttgatatggatatggagaatgtcgccaaatctctcttgcaaaatagtggtgtcagtctgaacatagatcatggatgttgcatgagttgtagatcctgtattgatctgtcgtctgctctggctacatcacacagggaagaatctaccatcgataggttgaagaaacatacattcctagacaagactctcatcacagaggcattacaatctctaaaacaactcaagaagttgaggcacccatatagcaaggctctcgcgcaggccgaagacacaatcgcagaggcctttgcgaaggtcggagaccaagaactagcacgaaagcactgtgaagcatcaattcagatcctcgagaagctgtaccacccaaaacacatcatcattgctcacgagcttattaagcttgtttcgattctgctgtccctgggagatggggcaagcgccgcagccacattcgctcaagcagaggcaatattctctctttactacggatctcatgtggagaaggttttgacatacatgggtgccctgaagaaagctgtcattgacgtgtagcgtgctgacaatcctcacgcgggaatggccaacacggttctgcagaatcatctcaccttttgcgcttcttcgaggagttaatgtaggggaaaacccaaaaaatatttacaaagcagtgtggtattgcttgtagtttagtttgttctagaaaacacaaactagctcaaccaaacttcctggctaatgagtttggtggatgttctgagtgcctatgttaatgacttgtttcataaatttttttcgtatatactcgttgccttacaaactcggtcggtagaggaaagatcgc

SEQ ID NO: 4103 - DNA, 3882 bp, Zea Mays
cactttgtagaaattcgctcaatagcccggctgacgtcactaattcaccctctctttccggccgccgccacgggctctccatggaacggctcaaatcggcggtgccgcccgacctccggcgggccgtcggcgagggcacggccgccgatctagctaacaccacctctcgcctgttcgccttcttcgacagccttcctctcttccaccaggttatgcaagaactgaccgaccccgagcttgcgttgtgtcgcaaagacaaggtgaaggctgtagagttgaagggccacggcaacgcgtgcttctctaggagggagttcgggaaagctctcaggttctattcgcaggcattgcgccatgtcccaattaattcgggtggcatggatgtgaacttggtatcttcattatatgtcaatcgagcctccaccatgcataaattaggtctgttcgaagaatctctaagggactgtgacagggccataaccatttctcctaattattctaaggcttggtacaggaagggaatggtaaaaacagcgctcaagaattattcatctgcaatacatgatttagaggtggcattgagccaggaagtgacttcttcggggaagagtaacatagaacaagagctgaagttgattttagagaagcatgaaagtgtcaatgaagctgggacatcaaactgtgatagcaaggatagagatttgcctcttgcaggacaacctcataaaattgttatagagagtatttcaacaccaaacaaaggtagaggaatgatttctacagatgatatccccccagcttcgttgattcatgttgaggaccctcttgctgcgattatcatgaaatcttcccgtgaaacacactgccacttttgcttcagtgaaactccagccgatgttgtattctgtccttcatgtacaataccaatttattgttcaaaaaggtgccaggagcaatcagcaggtcatatttctcgtgatgaagatactaatcttggatattcaacgaatgttgcaaacctgagtataacttcgagttgcaagtctccaagatctaagctatttgctgaacataggcatgaatgtggaggtgcccactgggcagctgttttaccagctgatgtagttttagctggacgaataatagcacacagcatagtaaaaaggatgccgtctgggaagagctttgctttctctggcccaaatttggatctagttcaccattatgatcaacattctcctgccaacaagttggaatcacatatatatgcaattgtcctattgttatgcctccaaaatcattatagatcagaccttttgtggacagaagattctttatcacaggtatatatggcgtttatcttcagacattattgttctgatatacctggttaatgagtatgatctgaaattgatggcgatttcagctcaagattttttataaattttcacaatgctaattgttatcaaatgtcttggtccatactgttttggtggagataaccagtctccttggggattgccagtttcatgttccttagtaatcttaatctcatctctacaataccagtgtttgtcgaacttccttctgtatagtccctttgaacttccttctgtatagtcctctttacacacttttacttgttctgatacttagaaagccattttttaacatgcaagaatttgtatcattacatttaaaaaaggacacaataaaagctctttcacttgtaaattaggtgaacacatcaaaccaaacaaaataggcagaaaagcagaaccaacgaggattattgttatataatcaaatcttaaatgactaaatagcctctagatcaatagccatcctgcaatgcaagtctgcaactgtgtctaacatgttacctaaagcccactggttacactcatggtggtcagacaagaaatcagacaagcttggaactcaagcttcagtcagatatgcctaaggtacctgggttcaacgatgttcttatctataccatggttttgtttctcattactaagctttcctatatactgcaattcccccaaaacttttttctctgggggtatagagaaactatggggtatcacattcacattttgtttttgggaaagaagaaactcatgtgttgattatcctctacagctggttcttttgatatttcaaatcaaagtcaattcaattgctattgtctgtatgaggtcgatggacagaggcccagagcacacaataaatagaggtttttatgtagctgaaggtgcaaaaatgtgtagtgtggagcaggtcagggttgcacaagctctttatgtatctggtagcctgttcaatcactcatgtcagcccaatgtgcacgcatattttctttcacgtgcgttcgtgctgagaactactgaatttataaagtccgggagcccagttgaactgtcatatggtccacaggttggcgagatgcatatttcagagagacagaagtcacttcaagagaattactacttcagttgtcaatgttcaagttgttcagagctaaacctatcagaccttgttatgaattcattctgttgtccacaaagcaactgccttggtgccatatcggaatcaacttactacaggtccaaagagaatttcgtgaatgtttcccttggaggatcttatgtctgcaaactatcattgcccgtacggttattttcattaccatggtttttaatatcttctcatttactctagtcacaaataattgaccttttaaacattgatatgatcttcaaaacacaactttgagtactgtttttgttacaaaatatttatgaatcaaagaaaattggttacttttatgaaactatatttaatgaaaactctgacaaatctgctcgtgctattttgaaatatccaaactcaacatataaaaactagtatacgatcaaaattttgaatggttaacttgagataacttcaaaacgacacttgtgactggagtgagtacttaatgctgatggatcacatatgacatgatgctgagtttcttttaggatgtatcgaaggttgatatggatatggagaatgtcgccaaatctctcttgcaaaatagtggtgtcagtctgaacatagatcatggatgttgcatgagttgtagatcctgtattgatctgtcgtctgctctggctacatcacacagggaagaatctaccatcgataggttgaagaaacatacattcctagacaagactctcatcacagaggcattacaatctctaaaacaactcaagaagttgaggcacccatatagcaaggctctcgcgcaggccgaagacacaatcgcagaggcctttgcgaaggtcggagaccaagaactagcacgaaagcactgtgaagcatcaattcagatcctcgagaagctgtaccacccaaaacacatcatcattgctcacgagcttattaagcttgtttcgattctgctgtccctgggagatggggcaagcgccgcagccacattcgctcaagcagaggcaatattctctctttactacggatctcatgtggagaaggttttgacatacatgggtgccctgaagaaagctgtcattgacgtgtagcgtgctgacaatcctcacgcgggaatggccaacacggttctgcagaatcatctcaccttttgcgcttcttcgaggagttaatgtaggggaaaacccaaaaaatatttacaaagcagtgtggtattgcttgtagtttagtttgttctagaaaacacaaactagctcaaccaaacttcctggctaatgagtttggtggatgttctgagtgcctatgttaatgacttgtttcataaatttttttcgtatatactcgttgccttacaaactcggtcggtagaggaaagatcgc

SEQ ID NO: 4104 - DNA, 3854 bp, Zea Mays
cactttgtagaaattcgctcaatagcccggctgacgtcactaattcaccctctctttccggccgccgccacgggctctccatggaacggctcaaatcggcggtgccgcccgacctccggcgggccgtcggcgagggcacggccgccgatctagctaacaccacctctcgcctgttcgccttcttcgacagccttcctctcttccaccaggttatgcaagaactgaccgaccccgagcttgcgttgtgtcgcaaagacaaggtgaaggctgtagagttgaagggccacggcaacgcgtgcttctctaggagggagttcgggaaagctctcaggttctattcgcaggcattgcgccatgtcccaattaattcgggtggcatggatgtgaacttggtatcttcattatatgtcaatcgagcctccaccatgcataaattaggtctgttcgaagaatctctaagggactgtgacagggccataaccatttctcctaattattctaaggcttggtacaggaagggaatggtaaaaacagcgctcaagaattattcatctgcaatacatgatttagaggtggcattgagccaggaagtgacttcttcggggaagagtaacatagaacaagagctgaagttgattttagagaagcatgaaagtgtcaatgaagctgggacatcaaactgtgatagcaaggatagagatttgcctcttgcaggacaacctcataaaattgttatagagagtatttcaacaccaaacaaaggtagaggaatgatttctacagatgatatccccccagcttcgttgattcatgttgaggaccctcttgctgcgattatcatgaaatcttcccgtgaaacacactgccacttttgcttcagtgaaactccagccgatgttgtattctgtccttcatgtacaataccaatttattgttcaaaaaggtgccaggagcaatcagcaggtcatatttctcgtgatgaagatactaatcttggatattcaacgaatgttgcaaacctgagtataacttcgagttgcaagtctccaagatctaagctatttgctgaacataggcatgaatgtggaggtgcccactgggcagctgttttaccagctgatgtagttttagctggacgaataatagcacacagcatagtaaaaaggatgccgtctgggaagagctttgctttctctggcccaaatttggatctagttcaccattatgatcaacattctcctgccaacaagttggaatcacatatatatgcaattgtcctattgttatgcctccaaaatcattatagatcagaccttttgtggacagaagattctttatcacaggtatatatggcgtttatcttcagacattattgttctgatatacctggttaatgagtatgatctgaaattgatggcgatttcagctcaagattttttataaattttcacaatgctaattgttatcaaatgtcttggtccatactgttttggtggagataaccagtctccttggggattgccagtttcatgttccttagtaatcttaatctcatctctacaataccagtgtttgtcgaacttccttctgtatagtccctttgaacttccttctgtatagtcctctttacacacttttacttgttctgatacttagaaagccattttttaacatgcaagaatttgtatcattacatttaaaaaaggacacaataaaagctctttcacttgtaaattaggtgaacacatcaaaccaaacaaaataggcagaaaagcagaaccaacgaggattattgttatataatcaaatcttaaatgactaaatagcctctagatcaatagccatcctgcaatgcaagtctgcaactgtgtctaacatgttacctaaagcccactggttacactcatggtggtcagacaagaaatcagacaagcttggaactcaagcttcagtcagatatgcctaaggtacctgggttcaacgatgttcttatctataccatggttttgtttctcattactaagctttcctatatactgcaattcccccaaaacttttttctctgggggtatagagaaactatggggtatcacattcacattttgtttttgggaaagaagaaactcatgtgttgattatcctctacagctggttcttttgatatttcaaatcaaagtcaattcaattgctattgtctgtatgaggtcgatggacagaggcccagagcacacaataaatagaggtttttatgtagctgaaggtgcaaaaatgtgtagtgtggagcaggtctgtctttttatactttctgtatttttttctgggactgggagcaatatatcatccaactattaaagttgcaaaaggtcgattggttgttgtcaatcattgggctttatctcatgctgataaaacacaatttcaacccagaaggtcaaaactagattagattaaaaaataaaacggagaaagtattatttgaaaagttattggatcgattatcaagtaacaataatcacagtatatgaggcctttttattaaaaaggcatctcactctaaattgtggtattgtgtctgtaacctttgtcttatgttatgtttgctcactgttaggtcagggttgcacaagctctttatgtatctggtagcctgttcaatcactcatgtcagcccaatgtgcacgcatattttctttcacgtgcgttcgtgctgagaactactgaatttataaagtccgggagcccagttgaactgtcatatggtccacaggttggcgagatgcatatttcagagagacagaagtcacttcaagagaattactacttcagttgtcaatgttcaagttgttcagagctaaacctatcagaccttgttatgaattcattctgttgtccacaaagcaactgccttggtgccatatcggaatcaacttactacaggtccaaagagaatttcgtgaatgtttcccttggaggatcttatgtctgcaaactatcattgcccgatgtatcgaaggttgatatggatatggagaatgtcgccaaatctctcttgcaaaatagtggtgtcagtctgaacatagatcatggatgttgcatgagttgtagatcctgtattgatctgtcgtctgctctggctacatcacacagggaagaatctaccatcgataggttgaagaaacatacattcctagacaagactctcatcacagaggcattacaatctctaaaacaactcaagaagttgaggcacccatatagcaaggctctcgcgcaggccgaagacacaatcgcagaggcctttgcgaaggtcggagaccaagaactagcacgaaagcactgtgaagcatcaattcagatcctcgagaagctgtaccacccaaaacacatcatcattgctcacgagcttattaagcttgtttcgattctgctgtccctgggagatggggcaagcgccgcagccacattcgctcaagcagaggcaatattctctctttactacggatctcatgtggagaaggttttgacatacatgggtgccctgaagaaagctgtcattgacgtgtagcgtgctgacaatcctcacgcgggaatggccaacacggttctgcagaatcatctcaccttttgcgcttcttcgaggagttaatgtaggggaaaacccaaaaaatatttacaaagcagtgtggtattgcttgtagtttagtttgttctagaaaacacaaactagctcaaccaaacttcctggctaatgagtttggtggatgttctgagtgcctatgttaatgacttgtttcataaatttttttcgtatatactcgttgccttacaaactcggtcggtagaggaaagatcgc

SEQ ID NO: 4105 - DNA, 2719 bp, Zea Mays
cactttgtagaaattcgctcaatagcccggctgacgtcactaattcaccctctctttccggccgccgccacgggctctccatggaacggctcaaatcggcggtgccgcccgacctccggcgggccgtcggcgagggcacggccgccgatctagctaacaccacctctcgcctgttcgccttcttcgacagccttcctctcttccaccaggttatgcaagaactgaccgaccccgagcttgcgttgtgtcgcaaagacaaggtgaaggctgtagagttgaagggccacggcaacgcgtgcttctctaggagggagttcgggaaagctctcaggttctattcgcaggcattgcgccatgtcccaattaattcgggtggcatggatgtgaacttggtatcttcattatatgtcaatcgagcctccaccatgcataaattaggtctgttcgaagaatctctaagggactgtgacagggccataaccatttctcctaattattctaaggcttggtacaggaagggaatggtaaaaacagcgctcaagaattattcatctgcaatacatgatttagaggtggcattgagccaggaagtgacttcttcggggaagagtaacatagaacaagagctgaagttgattttagagaagcatgaaagtgtcaatgaagctgggacatcaaactgtgatagcaaggatagagatttgcctcttgcaggacaacctcataaaattgttatagagagtatttcaacaccaaacaaaggtagaggaatgatttctacagatgatatccccccagcttcgttgattcatgttgaggaccctcttgctgcgattatcatgaaatcttcccgtgaaacacactgccacttttgcttcagtgaaactccagccgatgttgtattctgtccttcatgtacaataccaatttattgttcaaaaaggtgccaggagcaatcagcaggtcatatttctcgtgatgaagatactaatcttggatattcaacgaatgttgcaaacctgagtataacttcgagttgcaagtctccaagatctaagctatttgctgaacataggcatgaatgtggaggtgcccactgggcagctgttttaccagctgatgtagttttagctggacgaataatagcacacagcatagtaaaaaggatgccgtctgggaagagctttgctttctctggcccaaatttggatctagttcaccattatgatcaacattctcctgccaacaagttggaatcacatatatatgcaattgtcctattgttatgcctccaaaatcattatagatcagaccttttgtggacagaagattctttatcacagctggttcttttgatatttcaaatcaaagtcaattcaattgctattgtctgtatgaggtcgatggacagaggcccagagcacacaataaatagaggtttttatgtagctgaaggtgcaaaaatgtgtagtgtggagcagggttgcacaagctctttatgtatctggtagcctgttcaatcactcatgtcagcccaatgtgcacgcatattttctttcacgtgcgttcgtgctgagaactactgaatttataaagtccgggagcccagttgaactgtcatatggtccacaggttggcgagatgcatatttcagagagacagaagtcacttcaagagaattactacttcagttgtcaatgttcaagttgttcagagctaaacctatcagaccttgttatgaattcattctgttgtccacaaagcaactgccttggtgccatatcggaatcaacttactacaggtccaaagagaatttcgtgaatgtttcccttggaggatcttatgtctgcaaactatcattgcccgatgtatcgaaggttgatatggatatggagaatgtcgccaaatctctcttgcaaaatagtggtgtcagtctgaacatagatcatggatgttgcatgagttgtagatcctgtattgatctgtcgtctgctctggctacatcacacagggaagaatctaccatcgataggttgaagaaacatacattcctagacaagactctcatcacagaggcattacaatctctaaaacaactcaagaagttgaggcacccatatagcaaggctctcgcgcaggccgaagacacaatcgcagaggcctttgcgaaggtcggagaccaagaactagcacgaaagcactgtgaagcatcaattcagatcctcgagaagctgtaccacccaaaacacatcatcattgctcacgagcttattaagcttgtttcgattctgctgtccctgggagatggggcaagcgccgcagccacattcgctcaagcagaggcaatattctctctttactacggatctcatgtggagaaggttttgacatacatgggtgccctgaagaaagctgtcattgacgtgtagcgtgctgacaatcctcacgcgggaatggccaacacggttctgcagaatcatctcaccttttgcgcttcttcgaggagttaatgtaggggaaaacccaaaaaatatttacaaagcagtgtggtattgcttgtagtttagtttgttctagaaaacacaaactagctcaaccaaacttcctggctaatgagtttggtggatgttctgagtgcctatgttaatgacttgtttcataaatttttttcgtatatactcgttgccttacaaactcggtcggtagaggaaagatcgc

SEQ ID NO: 4106 - DNA, 3374 bp, Zea Mays
cactttgtagaaattcgctcaatagcccggctgacgtcactaattcaccctctctttccggccgccgccacgggctctccatggaacggctcaaatcggcggtgccgcccgacctccggcgggccgtcggcgagggcacggccgccgatctagctaacaccacctctcgcctgttcgccttcttcgacagccttcctctcttccaccaggttatgcaagaactgaccgaccccgagcttgcgttgtgtcgcaaagacaaggtgaaggctgtagagttgaagggccacggcaacgcgtgcttctctaggagggagttcgggaaagctctcaggttctattcgcagaaattaggtctgttcgaagaatctctaagggactgtgacagggccataaccatttctcctaattattctaaggcttggtacaggaagggaatggtaaaaacagcgctcaagaattattcatctgcaatacatgatttagaggtggcattgagccaggaagtgacttcttcggggaagagtaacatagaacaagagctgaagttgattttagagaagcatgaaagtgtcaatgaagctgggacatcaaactgtgatagcaaggatagagatttgcctcttgcaggacaacctcataaaattgttatagagagtatttcaacaccaaacaaaggtagaggaatgatttctacagatgatatccccccagcttcgttgattcatgttgaggaccctcttgctgcgattatcatgaaatcttcccgtgaaacacactgccacttttgcttcagtgaaactccagccgatgttgtattctgtccttcatgtacaataccaatttattgttcaaaaaggtgccaggagcaatcagcaggtcatatttctcgtgatgaagatactaatcttggatattcaacgaatgttgcaaacctgagtataacttcgagttgcaagtctccaagatctaagctatttgctgaacataggcatgaatgtggaggtgcccactgggcagctgttttaccagctgatgtagttttagctggacgaataatagcacacagcatagtaaaaaggatgccgtctgggaagagctttgctttctctggcccaaatttggtaaatacctcatttattcattagcttgacattctcttatgctgttagcactcaaatgttgtgccatagatgatatcatttcaggaattaatgagcgaagttgaccatcgcaggatctagttcaccattatgatcaacattctcctgccaacaagttggaatcacatatatatgcaattgtcctattgttatgcctccaaaatcattatagatcagaccttttgtggacagaagattctttatcacaggtatatatggcgtttatcttcagacattattgttctgatatacctggttaatgagtatgatctgaaattgatggcgatttcagctcaagattttttataaattttcacaatgctaattgttatcaaatgtcttggtccatactgttttggtggagataaccagtctccttggggattgccagtttcatgttccttagtaatcttaatctcatctctacaataccagtgtttgtcgaacttccttctgtatagtccctttgaacttccttctgtatagtcctctttacacacttttacttgttctgatacttagaaagccattttttaacatgcaagaatttgtatcattacatttaaaaaaggacacaataaaagctctttcacttgtaaattaggtgaacacatcaaaccaaacaaaataggcagaaaagcagaaccaacgaggattattgttatataatcaaatcttaaatgactaaatagcctctagatcaatagccatcctgcaatgcaagtctgcaactgtgtctaacatgttacctaaagcccactggttacactcatggtggtcagacaagaaatcagacaagcttggaactcaagcttcagtcagatatgcctaagctggttcttttgatatttcaaatcaaagtcaattcaattgctattgtctgtatgaggtcgatggacagaggcccagagcacacaataaatagaggtttttatgtagctgaaggtgcaaaaatgtgtagtgtggagcaggtcagggttgcacaagctctttatgtatctggtagcctgttcaatcactcatgtcagcccaatgtgcacgcatattttctttcacgtgcgttcgtgctgagaactactgaatttataaagtccgggagcccagttgaactgtcatatggtccacaggttggcgagatgcatatttcagagagacagaagtcacttcaagagaattactacttcagttgtcaatgttcaagttgttcagagctaaacctatcagaccttgttatgaattcattctgttgtccacaaagcaactgccttggtgccatatcggaatcaacttactacaggtccaaagagaatttcgtgaatgtttcccttggaggatcttatgtctgcaaactatcattgcccgatgtatcgaaggttgatatggatatggagaatgtcgccaaatctctcttgcaaaatagtggtgtcagtctgaacatagatcatggatgttgcatgagttgtagatcctgtattgatctgtcgtctgctctggctacatcacacagggaagaatctaccatcgataggttgaagaaacatacattcctagacaagactctcatcacagaggcattacaatctctaaaacaactcaagaagttgaggcacccatatagcaaggctctcgcgcaggccgaagacacaatcgcagaggcctttgcgaaggtcggagaccaagaactagcacgaaagcactgtgaagcatcaattcagatcctcgagaagctgtaccacccaaaacacatcatcattgctcacgagcttattaagcttgtttcgattctgctgtccctgggagatggggcaagcgccgcagccacattcgctcaagcagaggcaatattctctctttactacggatctcatgtggagaaggttttgacatacatgggtgccctgaagaaagctgtcattgacgtgtagcgtgctgacaatcctcacgcgggaatggccaacacggttctgcagaatcatctcaccttttgcgcttcttcgaggagttaatgtaggggaaaacccaaaaaatatttacaaagcagtgtggtattgcttgtagtttagtttgttctagaaaacacaaactagctcaaccaaacttcctggctaatgagtttggtggatgttctgagtgcctatgttaatgacttgtttcataaatttttttcgtatatactcgttgccttacaaactcggtcggtagaggaaagatcgc

SEQ ID NO: 4107 - DNA, 2778 bp, Zea Mays
cactttgtagaaattcgctcaatagcccggctgacgtcactaattcaccctctctttccggccgccgccacgggctctccatggaacggctcaaatcggcggtgccgcccgacctccggcgggccgtcggcgagggcacggccgccgatctagctaacaccacctctcgcctgttcgccttcttcgacagccttcctctcttccaccaggttatgcaagaactgaccgaccccgagcttgcgttgtgtcgcaaagacaaggtgaaggctgtagagttgaagggccacggcaacgcgtgcttctctaggagggagttcgggaaagctctcaggttctattcgcaggcattgcgccatgtcccaattaattcgggtggcatggatgtgaacttggtatcttcattatatgtcaatcgagcctccaccatgcataaattaggtctgttcgaagaatctctaagggactgtgacagggccataaccatttctcctaattattctaaggcttggtacaggaagggaatggtaaaaacagcgctcaagaattattcatctgcaatacatgatttagaggtggcattgagccaggaagtgacttcttcggggaagagtaacatagaacaagagctgaagttgattttagagaagcatgaaagtgtcaatgaagctgggacatcaaactgtgatagcaaggatagagatttgcctcttgcaggacaacctcataaaattgttatagagagtatttcaacaccaaacaaaggtagaggaatgatttctacagatgatatccccccagcttcgttgattcatgttgaggaccctcttgctgcgttgaatgcagattatcatgaaatcttcccgtgaaacacactgccacttttgcttcagtgaaactccagccgatgttgtattctgtccttcatgtacaataccaatttattgttcaaaaaggtgccaggagcaatcagcaggtcatatttctcgtgatgaagatactaatcttggatattcaacgaatgttgcaaacctgagtataacttcgagttgcaagtctccaagatctaagctatttgctgaacataggcatgaatgtggaggtgcccactgggcagctgttttaccagctgatgtagttttagctggacgaataatagcacacagcatagtaaaaaggatgccgtctgggaagagctttgctttctctggcccaaatttgatgatatcatttcaggaattaatgagcgaagttgaccatcgcaggatctagttcaccattatgatcaacattctcctgccaacaagttggaatcacatatatatgcaattgtcctattgttatgcctccaaaatcattatagatcagaccttttgtggacagaagattctttatcacagctggttcttttgatatttcaaatcaaagtcaattcaattgctattgtctgtatgaggtcgatggacagaggcccagagcacacaataaatagaggtttttatgtagctgaaggtgcaaaaatgtgtagtgtggagcaggtcagggttgcacaagctctttatgtatctggtagcctgttcaatcactcatgtcagcccaatgtgcacgcatattttctttcacgtgcgttcgtgctgagaactactgaatttataaagtccgggagcccagttgaactgtcatatggtccacaggttggcgagatgcatatttcagagagacagaagtcacttcaagagaattactacttcagttgtcaatgttcaagttgttcagagctaaacctatcagaccttgttatgaattcattctgttgtccacaaagcaactgccttggtgccatatcggaatcaacttactacaggtccaaagagaatttcgtgaatgtttcccttggaggatcttatgtctgcaaactatcattgcccgatgtatcgaaggttgatatggatatggagaatgtcgccaaatctctcttgcaaaatagtggtgtcagtctgaacatagatcatggatgttgcatgagttgtagatcctgtattgatctgtcgtctgctctggctacatcacacagggaagaatctaccatcgataggttgaagaaacatacattcctagacaagactctcatcacagaggcattacaatctctaaaacaactcaagaagttgaggcacccatatagcaaggctctcgcgcaggccgaagacacaatcgcagaggcctttgcgaaggtcggagaccaagaactagcacgaaagcactgtgaagcatcaattcagatcctcgagaagctgtaccacccaaaacacatcatcattgctcacgagcttattaagcttgtttcgattctgctgtccctgggagatggggcaagcgccgcagccacattcgctcaagcagaggcaatattctctctttactacggatctcatgtggagaaggttttgacatacatgggtgccctgaagaaagctgtcattgacgtgtagcgtgctgacaatcctcacgcgggaatggccaacacggttctgcagaatcatctcaccttttgcgcttcttcgaggagttaatgtaggggaaaacccaaaaaatatttacaaagcagtgtggtattgcttgtagtttagtttgttctagaaaacacaaactagctcaaccaaacttcctggctaatgagtttggtggatgttctgagtgcctatgttaatgacttgtttcataaatttttttcgtatatactcgttgccttacaaactcggtcggtagaggaaagatcgc

SEQ ID NO: 4108 - DNA, 3534 bp, Zea Mays
cactttgtagaaattcgctcaatagcccggctgacgtcactaattcaccctctctttccggccgccgccacgggctctccatggaacggctcaaatcggcggtgccgcccgacctccggcgggccgtcggcgagggcacggccgccgatctagctaacaccacctctcgcctgttcgccttcttcgacagccttcctctcttccaccaggttatgcaagaactgaccgaccccgagcttgcgttgtgtcgcaaagacaaggtgaaggctgtagagttgaagggccacggcaacgcgtgcttctctaggagggagttcgggaaagctctcaggttctattcgcaggcattgcgccatgtcccaattaattcgggtggcatggatgtgaacttggtatcttcattatatgtcaatcgagcctccaccatgcataaattaggtctgttcgaagaatctctaagggactgtgacagggccataaccatttctcctaattattctaaggcttggtacaggaagggaatggtaaaaacagcgctcaagaattattcatctgcaatacatgatttagaggtggcattgagccaggaagtgacttcttcggggaagagtaacatagaacaagagctgaagttgattttagagaagcatgaaagtgtcaatgaagctgggacatcaaactgtgatagcaaggatagagatttgcctcttgcaggacaacctcataaaattgttatagagagtatttcaacaccaaacaaaggtagaggaatgatttctacagatgatatccccccagcttcgttgattcatgttgaggaccctcttgctgcgttgaatgcagattatcatgaaatcttcccgtgaaacacactgccacttttgcttcagtgaaactccagccgatgttgtattctgtccttcatgtacaataccaatttattgttcaaaaaggtgccaggagcaatcagcaggtcatatttctcgtgatgaagatactaatcttggatattcaacgaatgttgcaaacctgagtataacttcgagttgcaagtctccaagatctaagctatttgctgaacataggcatgaatgtggaggtgcccactgggcagctgttttaccagctgatgtagttttagctggacgaataatagcacacagcatagtaaaaaggatgccgtctgggaagagctttgctttctctggcccaaatttggatctagttcaccattatgatcaacattctcctgccaacaagttggaatcacatatatatgcaattgtcctattgttatgcctccaaaatcattatagatcagaccttttgtggacagaagattctttatcacaggtatatatggcgtttatcttcagacattattgttctgatatacctggttaatgagtatgatctgaaattgatggcgatttcagctcaagattttttataaattttcacaatgctaattgttatcaaatgtcttggtccatactgttttggtggagataaccagtctccttggggattgccagtttcatgttccttagtaatcttaatctcatctctacaataccagtgtttgtcgaacttccttctgtatagtccctttgaacttccttctgtatagtcctctttacacacttttacttgttctgatacttagaaagccattttttaacatgcaagaatttgtatcattacatttaaaaaaggacacaataaaagctctttcacttgtaaattaggtgaacacatcaaaccaaacaaaataggcagaaaagcagaaccaacgaggattattgttatataatcaaatcttaaatgactaaatagcctctagatcaatagccatcctgcaatgcaagtctgcaactgtgtctaacatgttacctaaagcccactggttacactcatggtggtcagacaagaaatcagacaagcttggaactcaagcttcagtcagatatgcctaaggtacctgggttcaacgatgttcttatctataccatggttttgtttctcattactaagctttcctatatactgcaattcccccaaaacttttttctctgggggtatagagaaactatggggtatcacattcacattttgtttttgggaaagaagaaactcatgtgttgattatcctctacagctggttcttttgatatttcaaatcaaagtcaattcaattgctattgtctgtatgaggtcgatggacagaggcccagagcacacaataaatagaggtttttatgtagctgaaggtgcaaaaatgtgtagtgtggagcagggttgcacaagctctttatgtatctggtagcctgttcaatcactcatgtcagcccaatgtgcacgcatattttctttcacgtgcgttcgtgctgagaactactgaatttataaagtccgggagcccagttgaactgtcatatggtccacaggttggcgagatgcatatttcagagagacagaagtcacttcaagagaattactacttcagttgtcaatgttcaagttgttcagagctaaacctatcagaccttgttatgaattcattctgttgtccacaaagcaactgccttggtgccatatcggaatcaacttactacaggtccaaagagaatttcgtgaatgtttcccttggaggatcttatgtctgcaaactatcattgcccgatgtatcgaaggttgatatggatatggagaatgtcgccaaatctctcttgcaaaatagtggtgtcagtctgaacatagatcatggatgttgcatgagttgtagatcctgtattgatctgtcgtctgctctggctacatcacacagggaagaatctaccatcgataggttgaagaaacatacattcctagacaagactctcatcacagaggcattacaatctctaaaacaactcaagaagttgaggcacccatatagcaaggctctcgcgcaggccgaagacacaatcgcagaggcctttgcgaaggtcggagaccaagaactagcacgaaagcactgtgaagcatcaattcagatcctcgagaagctgtaccacccaaaacacatcatcattgctcacgagcttattaagcttgtttcgattctgctgtccctgggagatggggcaagcgccgcagccacattcgctcaagcagaggcaatattctctctttactacggatctcatgtggagaaggttttgacatacatgggtgccctgaagaaagctgtcattgacgtgtagcgtgctgacaatcctcacgcgggaatggccaacacggttctgcagaatcatctcaccttttgcgcttcttcgaggagttaatgtaggggaaaacccaaaaaatatttacaaagcagtgtggtattgcttgtagtttagtttgttctagaaaacacaaactagctcaaccaaacttcctggctaatgagtttggtggatgttctgagtgcctatgttaatgacttgtttcataaatttttttcgtatatactcgttgccttacaaactcggtcggtagaggaaagatcgc

SEQ ID NO: 4109 - DNA, 1515 bp, Zea Mays
gtttttaggccgaggcccatatacctcgtcgtcctctccgcgggtcccagacaaggacacggtgttgactatctcgagtccgttgacattgacaagggggccaggtcgaggctttccgagctccgatccctctccaacgcctgagggatggccgtgccggcgcccgcgaaggcggcgcgcttgcttgcggcctccgcggcggtgctcgtgctgctgtggtgtgtccatttccgcggtgggctctccttcggctcccccaccaacaagggcctcatcttcaacatctgtgcaggtgcatcctgtgcttatgctaataggattcatcatcctagggagcgaagccataatgagctacaaaatatggccatggagtcatgatacaaacaagatggttcacatgcttcttcatgctgttgcactcttcctgggttctgttgggatatatgctgccttcaagttccacaatgaaagtggaattgataatctgtacagcttgcattcgtgggttggacttggaactatctgcctgtacggtatacagtggctatttggcgttgctaccttcttcttccctggtgcttcgccaacagtccggcgcagaatgctcccatggcacactcgcgctggacttgttgtctacatactggcactgcttgcttcagagctggggttcctggagaagctcaccttccttcaggctgccggcctcggcaggtacagctcggaagctctgctggtgaacttcacagctcttgtgatcctactgcttggcgcttctgttgttctgtatgtcaccgctccaatgcacaatgagcacgcgcatgggtattcagcagtgcacaagccctgaaccacagatgcagcttcatcggttccagttggcgtatccttgtacgagtaggaatcaaatccaatcaaattttgtccgccggaattatgagactttagagtgtctccggcagtcagtgtaaaatagaggacacaaaactgtagatgacactttttgacactgtttgtagagtgtaattttaaataagggatgagatagaggatctattggagatagccttagggctagtttagaaaacccattttcccatttttctaagagatttttatttttaaagggaaattatttcattttatcttgagaaaataggaatctcttgggaaaaaaagagtcccaaactagcccttagagggtgtttgtttaaaattataatctgtcagattatatgatccagcaaattttgactcaaacacccccttaataaccagttcagttcagtggcgtgttgtgtgtaaatgtgtaatggtgctgcaaaatgcattttcctcttaacaatagcaggaattcaaagatctacgtgaaagagtatgaacatgcttcggtgtatttgattgataaggctgcgtttggtactttggtttttggtttcctcccgataaggctgtctccagcaacgtcctctatatctatcctctatatctgtactttacagtctcctctaaaag

SEQ ID NO: 4110 - DNA, 1565 bp, Zea Mays
gtttttaggccgaggcccatatacctcgtcgtcctctccgcgggtcccagacaaggacacggtgttgactatctcgagtccgttgacattgacaagggggccaggtcgaggctttccgagctccgatccctctccaacgcctgagggatggccgtgccggcgcccgcgaaggcggcgcgcttgcttgcggcctccgcggcggtgctcgtgctgctgtggtgtgtccatttccgcggtgggctctccttcggctcccccaccaacaagggcctcatcttcaacgtgcatcctgtgcttatgctaataggattcatcatcctagggagcgaagccataatgagctacaaaatatggccatggagtcatgatacaaacaagatggttcacatgcttcttcatgctgttgcactcttcctgggttctgttgggatatatgctgccttcaagttccacaatgaaagtggaattgataatctgtacagcttgcattcgtgggttggacttggaactatctgcctgtacggtatacagctgagctttgtaagcatgcagtgtcctgacctcgctcgcgacggtggtgttttttgtttgtggctatttggcgttgctaccttcttcttccctggtgcttcgccaacagtccggcgcagaatgctcccatggcacactcgcgctggacttgttgtctacatactggcactgcttgcttcagagctggggttcctggagaagctcaccttccttcaggctgccggcctcggcaggtacagctcggaagctctgctggtgaacttcacagctcttgtgatcctactgcttggcgcttctgttgttctgtatgtcaccgctccaatgcacaatgagcacgcgcatgggtattcagcagtgcacaagccctgaaccacagatgcagcttcatcggttccagttggcgtatccttgtacgagtaggaatcaaatccaatcaaattttgtccgccggaattatgagactttagagtgtctccggcagtcagtgtaaaatagaggacacaaaactgtagatgacactttttgacactgtttgtagagtgtaattttaaataagggatgagatagaggatctattggagatagccttagggctagtttagaaaacccattttcccatttttctaagagatttttatttttaaagggaaattatttcattttatcttgagaaaataggaatctcttgggaaaaaaagagtcccaaactagcccttagagggtgtttgtttaaaattataatctgtcagattatatgatccagcaaattttgactcaaacacccccttaataaccagttcagttcagtggcgtgttgtgtgtaaatgtgtaatggtgctgcaaaatgcattttcctcttaacaatagcaggaattcaaagatctacgtgaaagagtatgaacatgcttcggtgtatttgattgataaggctgcgtttggtactttggtttttggtttcctcccgataaggctgtctccagcaacgtcctctatatctatcctctatatctgtactttacagtctcctctaaaag

SEQ ID NO: 4111 - DNA, 1575 bp, Zea Mays
gtttttaggccgaggcccatatacctcgtcgtcctctccgcgggtcccagacaaggacacggtgttgactatctcgagtccgttgacattgacaagggggccaggtcgaggctttccgagctccgatccctctccaacgcctgagggatggccgtgccggcgcccgcgaaggcggcgcgcttgcttgcggcctccgcggcggtgctcgtgctgctgtggtgtgtccatttccgcggtgggctctccttcggctcccccaccaacaagggcctcatcttcaacgtgcatcctgtgcttatgctaataggattcatcatcctagggagcgaagccataatgagctacaaaatatggccatggagtcatgatacaaacaagatggttcacatgcttcttcatgctgttgcactcttcctgggttctgttgggatatatgctgccttcaagttccacaatgaaagtggaattgataatctgtacagcttgcattcgtgggttggacttggaactatctgcctgtacggtatacagctgagctttgtaagcatgcagtgtcctgacctcgctcgcgacggtggtgttttttgtttggtatagggggtggctatttggcgttgctaccttcttcttccctggtgcttcgccaacagtccggcgcagaatgctcccatggcacactcgcgctggacttgttgtctacatactggcactgcttgcttcagagctggggttcctggagaagctcaccttccttcaggctgccggcctcggcaggtacagctcggaagctctgctggtgaacttcacagctcttgtgatcctactgcttggcgcttctgttgttctgtatgtcaccgctccaatgcacaatgagcacgcgcatgggtattcagcagtgcacaagccctgaaccacagatgcagcttcatcggttccagttggcgtatccttgtacgagtaggaatcaaatccaatcaaattttgtccgccggaattatgagactttagagtgtctccggcagtcagtgtaaaatagaggacacaaaactgtagatgacactttttgacactgtttgtagagtgtaattttaaataagggatgagatagaggatctattggagatagccttagggctagtttagaaaacccattttcccatttttctaagagatttttatttttaaagggaaattatttcattttatcttgagaaaataggaatctcttgggaaaaaaagagtcccaaactagcccttagagggtgtttgtttaaaattataatctgtcagattatatgatccagcaaattttgactcaaacacccccttaataaccagttcagttcagtggcgtgttgtgtgtaaatgtgtaatggtgctgcaaaatgcattttcctcttaacaatagcaggaattcaaagatctacgtgaaagagtatgaacatgcttcggtgtatttgattgataaggctgcgtttggtactttggtttttggtttcctcccgataaggctgtctccagcaacgtcctctatatctatcctctatatctgtactttacagtctcctctaaaag

SEQ ID NO: 4112 - DNA, 1841 bp, Zea Mays
ttttttattgttctacgttataaactgtaatgttagtagagttagagtttaaataagacgagctggagatagttttacacattggaacgcgaacgctctcggatccatccacctccaaagtccaaaagcgaagcctacgcccgccccaacggtgaaaacgtcggaaccctagatccctctcacggtcgcgcctgtgctccaaaaccttagatccgacatgcatcagcccagagcccgctacccacccgggtatggctccagcgggggaggcggtggcgggggaggcggtagtggaggaggaagaggaggcagcggcggcggaggaaaccacaactactacggccggaacacacatccacagcatcaacaccactaccagcagcagcagcagcactcgcataggaactcctcgcaccagcagcagtggctgcggcgagaccagggccccgccgttgcggggccagtgtctggaaacgctgtgcctaagacggcgcctcagcttgacgctgttgactcgagttctcaagattggaaggctcaactaaatataccagctccagacacacgctacaggacagaggatgtcactgcaacaaaaggcaatgagtttgaggattatttcttgaaacgtgagttgcttatgggaatatatgagaagggatttgaaaggccatctcctattcaagaagaaagcattcctattgcgttgactggaagtgatattcttgcaagggcgaaaaatggcactggaaagactgctgccttttgcattccggcacttgaaaaaattgatcctgaaaataatgcaattcaagttgttatactagtaccaacaagggaactggctctgcaaacttcacaagtgtgtaaagagcttgggaaatacctaaacattgaagttatggttagcactggaggaaccagcttgaaggatgacatcatgcgtttataccaacctgttcatctactcgttgggactcctggccgaatacttgatcttaccaggaagggcatttgtgtgctgaaagattgttcaatgcttgtcatggatgaggcagacaagctattagctccagagtttcagccttctgtggaggcacttattcatttccttccacctagtcgacaactgttgatgttttcagcaacctttcctgtaactgtcaaggaattcaaagagaaatatctgcctagaccttatgtgattaatctaatggacgaactgaccctgaaaggaatcacacaatattatgcttttgttgaagaaaggcagaaagttcattgcctgaatacacttttctcaaagcttcaaattaatcaatccattatattctgcaactctgttaatagagttgagctgctggctaaaaaaataactgaactcggttattcatgcttctacattcatgctaagatgttgcaagaccacagaaatcgagtatttcatgattttcgtaatggtgcttgcagaaaccttgtgtgcacagatctgtttaccagaggaattgatattcaggctgttaatgtggttattaattttgacttccctaagacatctgagacatatttacacagggttggccgttctgggagatatggacaccttggtttagcagtgaacttgatcacttatgaggaccgtttcaacttgtataggattgagcaagagcttggaacagaaattaagacaatacccccgcagatcgacctggccgtatactgccaatgatgaatgcgacattcaggagcatcaaacacttctctttctatttgagaaacttatcaggcaaatacgtttgtacatagcaacccatcagatatcaaattctctcccattcttg

SEQ ID NO: 4113 - DNA, 1598 bp, Zea Mays
gtagaccttttttaaagggatagttgtttaaacacattttgaacatttacaacgatttgtgttctattcgaacggattgttctgccagatctcaacgtgcctactgcctactatgtaaccggcataagtgcattttatatgttcagtgggaaaacataattctaatattcgcgtcatttcgtgtgagatggcttggaggacaccaaaccttagtcgtcacctctaccttttcctcctctccgatttgatggcactagactgaacaaacaaaggtctggcttgtgaggatagtgtcagtagggtcttcgtgacttcaggcttgtgcggacggcaacaccatgatgggttcttgcgtcggtttatcataacaaactccggaagtggccatactgttcctggggctaggtataaagagtaccgtctccaggactacagctcctggtttgtcaaacagctcgatgacacggagaaatgggctcgcctgaaaagctgcctggtgaagacagatgactgcaatagcctgtcgagaagatacaagccgttgctttcgttgagatcttaattaccagcccccaacttcgcgtgcagaccgcgagagaatacaagctcgcggacctcactcccatggagtcgggttgctgccgcccgccagcagagtgcgggttcccagctctgaacgcgtcctatttcgatctgagctatcacccggcgagcgccaacgccgactgcaaactgtacaggaacgcgcgctctgtccggtgctacgactgcagctcttgcaaagctggtgtcgcgcagtacatgaagacggagtggcgagtggtggctatcttcaacgtgatattgttcgtcatcctgtcgttcgtgtacttcgttggctgctgcgcgcggcgaaacgctggaggaggcgacgcgaaaggccgtggcaggtgacgggatcacttcttcgaggtgaagtgaagcgcttggccatcctatgtggagttagttaagcttagtatcaacaccccccctgtaaaattgttccatcaaatattcaaagttcctttgatgaagtaccaggacctgtcgctgcctagtaatactctgttgcaaatgtgggctgtgtttcttggtggtaaaagggaatgtcatttcgctcagcaaatcgcgcatgcttttgcacggcagattatacttagacgtggcaggctgtggaataggaagtttgctagagatacgtgcagtgtgatgtgccaaatactgcaggtcttcactcttcagcaacgcccgtcagccaggtgttcagcaacagcagcgcggacgactgctgcgccgacacgtgcagtgatgtgcctaatactgcagggtttagtgcttgtaattggacgaccatcagtgtgatgtagtgaagtggtgacagcagtcggtggatgttaaatccagaccggagcagagctcacctggagactgaagggtccttttcgaatttcttcatctgtaaaacttgtgatcccctccgcaagaacagcaaacagaatcaatcgagtgaaacaattttaggcagtgtttggttgaagagccaagtagaatggagccgttctgtttcagttttgttg

SEQ ID NO: 4114 - DNA, 2619 bp, Zea Mays
agatgttggggttttagagcaactccagtcaaactctcccaaattttgactcatctatgtttaagttaattaggagggttgttcgtttcgaattaaagtatgctgtttggattgcttcagctgcaataatagagacaaaaatgctgtagaatgagtagaagttgatacagattaaatccaatcgaacatgttggaagagaggatgaggtgcttcttgttcctaaattttgccttattcatagggcatgtttggaaccttttcttttgatgagattttgtgagaatctgactatggggataattctagtattgtgtgattacgtgcgaagaaaaatgaaggagtctaggatccataatatagaaagtgaagattcctactatcgccatgaattgatcgattatgtgatcactgtccgtgcgcccctgatggagccacgcagggcgcagctctgttggtgacagatgaagatgttcgtaccccgcccccacggtaccttatttacacgtccccccagccctctgcgaaacggcaacaaacgcgctcgtgaacggtggtggttcgagcagagcggcacgacgcgaccgcgcctaccacgttcaaaccgacccaaacgggacgcccctttgccctcttttccctcggtctccacccggcccgccgctcaccgctgccagcttctgcagctcgcaccgctcccgagtccgagtccaacaaggcttgagcagccgacgccaccccggtcggtcgacctccctctccccaccgacaccgcgggcccgcacgcagagaccccgcatgtcaccgtctacactcggtgacggcgcgagcaggtttccagccgcgagccccgcgactgatctgagctcgtgcctggctagctagtagatgtctccgaccgttgcctttaagctcgcacgcgaaccgtcccacactctgcgcaagccactgccgctgccgctgccgccgccgccgccgccttcagtctccgtctccaccggtgccctcgtctcccagccgctgccgccgccgccgccgccccgtgagagccggcgcagcaatccggttgcttggggacgcagcgaggatgggcagcaccagcgcgttcgtcatcaggtggatcaacttcttcaccatgatactggcgctactggtggtgggcttcgggttctggatgagcacccacgacgacgagtgcaggcggaccttgaccgtccccgtcatcgccctcggtggagtgatcttcctcatatcgctcgtcggattccttggtgcctggaagaacatctcctgcttgctctggacatatctgatcatgctgttcgtggtcttggtggcaatcatggtgttcacggtgctcgcgtttatcataacaaactccggaagtggccatactgttcctggggctagctctacagtacggaaacttacggataggggatagtagcctaaaccgatctacccaccgctacatacaggtataaagagtaccgtctccaggactacagctcctggtttgtcaaacagctcgatgacacggagaaatgggctcgcctgaaaagctgcctggtgaagacagatgactgcaatagcctgtcgagaagatacaagaccgcgagagaatacaagctcgcggacctcactcccatggagtcgggttgctgccgcccgccagcagagtgcgggttcccagctctgaacgcgtcctatttcgatctgagctatcacccggcgagcgccaacgccgactgcaaactgtacaggaacgcgcgctctgtccggtgctacgactgcagctcttgcaaagctggtgtcgcgcagtacatgaagacggagtggcgagtggtggctatcttcaacgtgatattgttcgtcatcctgtcgttcgtgtacttcgttggctgctgcgcgcggcgaaacgctggaggaggcgacgcgaaaggccgtggcaggtgacgggatcacttcttcgaggtgaagtgaagcgcttggccatcctatgtggagttagttaagcttagtatcaacaccccccctgtaaaattgttccatcaaatattcaaagttcctttgatgaagtaccaggacctgtcgctgcctagtaatactctgttgcaaatgtgggctgtgtttcttggtggtaaaagggaatgtcatttcgctcagcaaatcgcgcatgcttttgcacggcagattatacttagacgtggcaggctgtggaataggaagtttgctagagatacgtgcagtgtgatgtgccaaatactgcaggtcttcactcttcagcaacgcccgtcagccaggtgttcagcaacagcagcgcggacgactgctgcgccgacacgtgcagtgatgtgcctaatactgcagggtttagtgcttgtaattggacgaccatcagtgtgatgtagtgaagtggtgacagcagtcggtggatgttaaatccagaccggagcagagctcacctggagactgaagggtccttttcgaatttcttcatctgtaaaacttgtgatcccctccgcaagaacagcaaacagaatcaatcgagtgaaacaattttaggcagtgtttggttgaagagccaagtagaatggagccgttctgtttcagttttgttg

SEQ ID NO: 4115 - DNA, 2601 bp, Zea Mays
agatgttggggttttagagcaactccagtcaaactctcccaaattttgactcatctatgtttaagttaattaggagggttgttcgtttcgaattaaagtatgctgtttggattgcttcagctgcaataatagagacaaaaatgctgtagaatgagtagaagttgatacagattaaatccaatcgaacatgttggaagagaggatgaggtgcttcttgttcctaaattttgccttattcatagggcatgtttggaaccttttcttttgatgagattttgtgagaatctgactatggggataattctagtattgtgtgattacgtgcgaagaaaaatgaaggagtctaggatccataatatagaaagtgaagattcctactatcgccatgaattgatcgattatgtgatcactgtccgtgcgcccctgatggagccacgcagggcgcagctctgttggtgacagatgaagatgttcgtaccccgcccccacggtaccttatttacacgtccccccagccctctgcgaaacggcaacaaacgcgctcgtgaacggtggtggttcgagcagagcggcacgacgcgaccgcgcctaccacgttcaaaccgacccaaacgggacgcccctttgccctcttttccctcggtctccacccggcccgccgctcaccgctgccagcttctgcagctcgcaccgctcccgagtccgagtccaacaaggcttgagcagccgacgccaccccggtcggtcgacctccctctccccaccgacaccgcgggcccgcacgcagagaccccgcatgtcaccgtctacactcggtgacggcgcgagcaggtttccagccgcgagccccgcgactgatctgagctcgtgcctggctagctagtagatgtctccgaccgttgcctttaagctcgcacgcgaaccgtcccacactctgcgcaagccactgccgctgccgctgccgccgccgccgccgccttcagtctccgtctccaccggtgccctcgtctcccagccgctgccgccgccgccgccgccccgtgagagccggcgcagcaatccggttgcttggggacgcagcgaggatgggcagcaccagcgcgttcgtcatcaggtggatcaacttcttcaccatgatactggcgctactggtggtgggcttcgggttctggatgagcacccacgacgacgagtgcaggcggaccttgaccgtccccgtcatcgccctcggtggagtgatcttcctcatatcgctcgtcggattccttggtgcctggaagaacatctcctgcttgctctggacatatctgatcatgctgttcgtggtcttggtggcaatcatggtgttcacggtgctcgcgtttatcataacaaactccggaagtggccatactgttcctggggctaggtataaagagtaccgtctccaggactacagctcctggtttgtcaaacagctcgatgacacggagaaatgggctcgcctgaaaagctgcctggtgaagacagatgactgcaatagcctgtcgagaagatacaagccgttgctttcgttgagatcttaattaccagcccccaacttcgcgtgcagaccgcgagagaatacaagctcgcggacctcactcccatggagtcgggttgctgccgcccgccagcagagtgcgggttcccagctctgaacgcgtcctatttcgatctgagctatcacccggcgagcgccaacgccgactgcaaactgtacaggaacgcgcgctctgtccggtgctacgactgcagctcttgcaaagctggtgtcgcgcagtacatgaagacggagtggcgagtggtggctatcttcaacgtgatattgttcgtcatcctgtcgttcgtgtacttcgttggctgctgcgcgcggcgaaacgctggaggaggcgacgcgaaaggccgtggcaggtgacgggatcacttcttcgaggtgaagtgaagcgcttggccatcctatgtggagttagttaagcttagtatcaacaccccccctgtaaaattgttccatcaaatattcaaagttcctttgatgaagtaccaggacctgtcgctgcctagtaatactctgttgcaaatgtgggctgtgtttcttggtggtaaaagggaatgtcatttcgctcagcaaatcgcgcatgcttttgcacggcagattatacttagacgtggcaggctgtggaataggaagtttgctagagatacgtgcagtgtgatgtgccaaatactgcaggtcttcactcttcagcaacgcccgtcagccaggtgttcagcaacagcagcgcggacgactgctgcgccgacacgtgcagtgatgtgcctaatactgcagggtttagtgcttgtaattggacgaccatcagtgtgatgtagtgaagtggtgacagcagtcggtggatgttaaatccagaccggagcagagctcacctggagactgaagggtccttttcgaatttcttcatctgtaaaacttgtgatcccctccgcaagaacagcaaacagaatcaatcgagtgaaacaattttaggcagtgtttggttgaagagccaagtagaatggagccgttctgtttcagttttgttg

SEQ ID NO: 4116 - DNA, 2497 bp, Zea Mays
accgctgccagcttctgcagctcgcaccgctcccgagtccgagtccaacaaggcttgagcagccgacgccaccccggtcggtcgacctccctctccccaccgacaccgcgggcccgcacgcagagaccccgcatgtcaccgtctacactcggtgacggcgcgagcaggtttccagccgcgagccccgcgactgatctgagctcgtgcctggctagctagtagatgtctccgaccgttgcctttaagctcgcacgcgaaccgtcccacactctgcgcaagccactgccgctgccgctgccgccgccgccgccgccttcagtctccgtctccaccggtgccctcgtctcccagccgctgccgccgccgccgccgccccgtgagagccggcgcagcaatccggttgcttggggacgcagcgaggatgggcagcaccagcgcgttcgtcatcaggtggatcaacttcttcaccatgatactggcgctactggtggtgggcttcgggttctggatgagcacccacgacgacgagtgcaggcggaccttgaccgtccccgtcatcgccctcggtggagtgatcttcctcatatcgctcgtcggattccttggtgcctggaagaacatctcctgcttgctctggacagtatccttcctcctccaattaaccggttgagtgaagctttaatcgctttggttccttggtactttttggagtgccatctgttgccttgacgtgtgggtgcctagtatctgatcatgctgttcgtggtcttggtggcaatcatggtgttcacggtgctcgcgtttatcataacaaactccggaagtggccatactgttcctggggctaggtatgtggatgactggatgttagtattttcatagaaagatcatgaccctgcgagttccagctctacagtacggaaacttacggataggggatagtagcctaaaccgatctacccaccgctacatacaggttttgagctttttttccatgacctcacagtttaaaaatgtcatcgaagctctgatcctaggagagagtttaactctggtttcttgtcttaaagtgcccctgcctgcgcatcagaaatacactgaagcatttcaaatgttctatgtaggtataaagagtaccgtctccaggactacagctcctggtttgtcaaacagtacagctcgatgacacggagaaatgggctcgcctgaaaagctgcctggtgaagacagatgactgcaatagcctgtcgagaagatacaaggtgactcctgtcctgtcctgtccttcacatgattcacttggttcaactctgctggagctgctccctttttgcagccgttgctttcgttgagatcttaattaccagcccccaacttcgcgtgcagaccgcgagagaatacaagctcgcggacctcactcccatggagtcgggttgctgccgcccgccagcagagtactgcgcctggatgcccatctcaaccttttcttttcattagtggtcagcgtagtctctcaggcacgggcatcatcacaagattgctctggttttttcaggtgcgggttcccagctctgaacgcgtcctatttcgatctgagctatcacccggcgagcgccaacgccgactgcaaactgtacaggaacgcgcgctctgtccggtgctacgactgcagctcttgcaaagctggtgtcgcgcagtacatgaagacggagtggcgagtggtggctatcttcaacgtgatattgttcgtcatcctgtcgttcgtgtacttcgttggctgctgcgcgcggcgaaacgctggaggaggcgacgcgaaaggccgtggcaggtgacgggatcacttcttcgaggtgaagtgaagcgcttggccatcctatgtggagttagttaagcttagtatcaacaccccccctgtaaaattgttccatcaaatattcaaagttcctttgatgaagtaccaggacctgtcgctgcctagtaatactctgttgcaaatgtgggctgtgtttcttggtggtaaaagggaatgtcatttcgctcagcaaatcgcgcatgcttttgcacggcagattatacttagacgtggcaggctgtggaataggaagtttgctagagatacgtgcagtgtgatgtgccaaatactgcaggtcttcactcttcagcaacgcccgtcagccaggtgttcagcaacagcagcgcggacgactgctgcgccgacacgtgcagtgatgtgcctaatactgcagggtttagtgcttgtaattggacgaccatcagtgtgatgtagtgaagtggtgacagcagtcggtggatgttaaatccagaccggagcagagctcacctggagactgaagggtccttttcgaatttcttcatctgtaaaacttgtgatcccctccgcaagaacagcaaacagaatcaatcgagtgaaacaattttaggcagtgtttggttgaagagccaagtagaatggagccgttctgtttcagttttgttg

SEQ ID NO: 4117 - DNA, 2359 bp, Zea Mays
accgctgccagcttctgcagctcgcaccgctcccgagtccgagtccaacaaggcttgagcagccgacgccaccccggtcggtcgacctccctctccccaccgacaccgcgggcccgcacgcagagaccccgcatgtcaccgtctacactcggtgacggcgcgagcaggtttccagccgcgagccccgcgactgatctgagctcgtgcctggctagctagtagatgtctccgaccgttgcctttaagctcgcacgcgaaccgtcccacactctgcgcaagccactgccgctgccgctgccgccgccgccgccgccttcagtctccgtctccaccggtgccctcgtctcccagccgctgccgccgccgccgccgccccgtgagagccggcgcagcaatccggttgcttggggacgcagcgaggatgggcagcaccagcgcgttcgtcatcaggtggatcaacttcttcaccatggtcagtctcagcccggcccacctccatccttccttgctctcccttctcccttctccaatcggaggagccgtcctgctttcgttcggcctcgctcgaggctgattctcgattcctgctgtcccggcggctgattgctgtttgctgaaatactggcgctactggtggtgggcttcgggttctggatgagcacccacgacgacgagtgcaggcggaccttgaccgtccccgtcatcgccctcggtggagtgatcttcctcatatcgctcgtcggattccttggtgcctggaagaacatctcctgcttgctctggacatatctgatcatgctgttcgtggtcttggtggcaatcatggtgttcacggtgctcgcgtttatcataacaaactccggaagtggccatactgttcctggggctaggtatgtggatgactggatgttagtattttcatagaaagatcatgaccctgcgagttccagctctacagtacggaaacttacggataggggatagtagcctaaaccgatctacccaccgctacatacaggttttgagctttttttccatgacctcacagtttaaaaatgtcatcgaagctctgatcctaggagagagtttaactctggtttcttgtcttaaagtgcccctgcctgcgcatcagaaatacactgaagcatttcaaatgttctatgtaggtataaagagtaccgtctccaggactacagctcctggtttgtcaaacagctcgatgacacggagaaatgggctcgcctgaaaagctgcctggtgaagacagatgactgcaatagcctgtcgagaagatacaagccgttgctttcgttgagatcttaattaccagcccccaacttcgcgtgcagaccgcgagagaatacaagctcgcggacctcactcccatggagtcgggttgctgccgcccgccagcagagtgcgggttcccagctctgaacgcgtcctatttcgatctgagctatcacccggcgagcgccaacgccgactgcaaactgtacaggaacgcgcgctctgtccggtgctacgactgcagctcttgcaaagctggtgtcgcgcagtacatgaagacggagtggcgagtggtggctatcttcaacgtgatattgttcgtcatcctgtcgttcgtgtacttcgttggctgctgcgcgcggcgaaacgctggaggaggcgacgcgaaaggccgtggcaggtgacgggatcacttcttcgaggtgaagtgaagcgcttggccatcctatgtggagttagttaagcttagtatcaacaccccccctgtaaaattgttccatcaaatattcaaagttcctttgatgaagtaccaggacctgtcgctgcctagtaatactctgttgcaaatgtgggctgtgtttcttggtggtaaaagggaatgtcatttcgctcagcaaatcgcgcatgcttttgcacggcagattatacttagacgtggcaggctgtggaataggaagtttgctagagatacgtgcagtgtgatgtgccaaatactgcaggtcttcactcttcagcaacgcccgtcagccaggtgttcagcaacagcagcgcggacgactgctgcgccgacacgtgcagtgatgtgcctaatactgcagggtttagtgcttgtaattggacgaccatcagtgtgatgtagtgaagtggtgacagcagtcggtggatgttaaatccagaccggagcagagctcacctggagactgaagggtccttttcgaatttcttcatctgtaaaacttgtgatcccctccgcaagaacagcaaacagaatcaatcgagtgaaacaattttaggcagtgtttggttgaagagccaagtagaatggagccgttctgtttcagttttgttg

SEQ ID NO: 4118 - DNA, 2420 bp, Zea Mays
accgctgccagcttctgcagctcgcaccgctcccgagtccgagtccaacaaggcttgagcagccgacgccaccccggtcggtcgacctccctctccccaccgacaccgcgggcccgcacgcagagaccccgcatgtcaccgtctacactcggtgacggcgcgagcaggtttccagccgcgagccccgcgactgatctgagctcgtgcctggctagctagtagatgtctccgaccgttgcctttaagctcgcacgcgaaccgtcccacactctgcgcaagccactgccgctgccgctgccgccgccgccgccgccttcagtctccgtctccaccggtgccctcgtctcccagccgctgccgccgccgccgccgccccgtgagagccggcgcagcaatccggttgcttggggacgcagcgaggatgggcagcaccagcgcgttcgtcatcaggtggatcaacttcttcaccatggtcagtctcagcccggcccacctccatccttccttgctctcccttctcccttctccaatcggaggagccgtcctgctttcgttcggcctcgctcgaggctgattctcgattcctgctgtcccggcggctgattgctgtttgctgaagtacacttccccccaccattttactacaccctatctctgctctgcttactagtagtttcgtggcaaataacttgtcggtgttactttctcgcgccgctgttcctgggacagatactggcgctactggtggtgggcttcgggttctggatgagcacccacgacgacgagtgcaggcggaccttgaccgtccccgtcatcgccctcggtggagtgatcttcctcatatcgctcgtcggattccttggtgcctggaagaacatctcctgcttgctctggacatatctgatcatgctgttcgtggtcttggtggcaatcatggtgttcacggtgctcgcgtttatcataacaaactccggaagtggccatactgttcctggggctaggtatgtggatgactggatgttagtattttcatagaaagatcatgaccctgcgagttccagctctacagtacggaaacttacggataggggatagtagcctaaaccgatctacccaccgctacatacaggttttgagctttttttccatgacctcacagtttaaaaatgtcatcgaagctctgatcctaggagagagtttaactctggtttcttgtcttaaagtgcccctgcctgcgcatcagaaatacactgaagcatttcaaatgttctatgtaggtataaagagtaccgtctccaggactacagctcctggtttgtcaaacagctcgatgacacggagaaatgggctcgcctgaaaagctgcctggtgaagacagatgactgcaatagcctgtcgagaagatacaagaccgcgagagaatacaagctcgcggacctcactcccatggagtcgggttgctgccgcccgccagcagagtgcgggttcccagctctgaacgcgtcctatttcgatctgagctatcacccggcgagcgccaacgccgactgcaaactgtacaggaacgcgcgctctgtccggtgctacgactgcagctcttgcaaagctggtgtcgcgcagtacatgaagacggagtggcgagtggtggctatcttcaacgtgatattgttcgtcatcctgtcgttcgtgtacttcgttggctgctgcgcgcggcgaaacgctggaggaggcgacgcgaaaggccgtggcaggtgacgggatcacttcttcgaggtgaagtgaagcgcttggccatcctatgtggagttagttaagcttagtatcaacaccccccctgtaaaattgttccatcaaatattcaaagttcctttgatgaagtaccaggacctgtcgctgcctagtaatactctgttgcaaatgtgggctgtgtttcttggtggtaaaagggaatgtcatttcgctcagcaaatcgcgcatgcttttgcacggcagattatacttagacgtggcaggctgtggaataggaagtttgctagagatacgtgcagtgtgatgtgccaaatactgcaggtcttcactcttcagcaacgcccgtcagccaggtgttcagcaacagcagcgcggacgactgctgcgccgacacgtgcagtgatgtgcctaatactgcagggtttagtgcttgtaattggacgaccatcagtgtgatgtagtgaagtggtgacagcagtcggtggatgttaaatccagaccggagcagagctcacctggagactgaagggtccttttcgaatttcttcatctgtaaaacttgtgatcccctccgcaagaacagcaaacagaatcaatcgagtgaaacaattttaggcagtgtttggttgaagagccaagtagaatggagccgttctgtttcagttttgttg

SEQ ID NO: 4119 - DNA, 2033 bp, Zea Mays
accgctgccagcttctgcagctcgcaccgctcccgagtccgagtccaacaaggcttgagcagccgacgccaccccggtcggtcgacctccctctccccaccgacaccgcgggcccgcacgcagagaccccgcatgtcaccgtctacactcggtgacggcgcgagcaggtttccagccgcgagccccgcgactgatctgagctcgtgcctggctagctagtagatgtctccgaccgttgcctttaagctcgcacgcgaaccgtcccacactctgcgcaagccactgccgctgccgctgccgccgccgccgccgccttcagtctccgtctccaccggtgccctcgtctcccagccgctgccgccgccgccgccgccccgtgagagccggcgcagcaatccggttgcttggggacgcagcgaggatgggcagcaccagcgcgttcgtcatcaggtggatcaacttcttcaccatggtcagtctcagcccggcccacctccatccttccttgctctcccttctcccttctccaatcggaggagccgtcctgctttcgttcggcctcgctcgaggctgattctcgattcctgctgtcccggcggctgattgctgtttgctgaaatactggcgctactggtggtgggcttcgggttctggatgagcacccacgacgacgagtgcaggcggaccttgaccgtccccgtcatcgccctcggtggagtgatcttcctcatatcgctcgtcggattccttggtgcctggaagaacatctcctgcttgctctggacatatctgatcatgctgttcgtggtcttggtggcaatcatggtgttcacggtgctcgcgtttatcataacaaactccggaagtggccatactgttcctggggctaggtataaagagtaccgtctccaggactacagctcctggtttgtcaaacagctcgatgacacggagaaatgggctcgcctgaaaagctgcctggtgaagacagatgactgcaatagcctgtcgagaagatacaagaccgcgagagaatacaagctcgcggacctcactcccatggagtcgggttgctgccgcccgccagcagagtgcgggttcccagctctgaacgcgtcctatttcgatctgagctatcacccggcgagcgccaacgccgactgcaaactgtacaggaacgcgcgctctgtccggtgctacgactgcagctcttgcaaagctggtgtcgcgcagtacatgaagacggagtggcgagtggtggctatcttcaacgtgatattgttcgtcatcctgtcgttcgtgtacttcgttggctgctgcgcgcggcgaaacgctggaggaggcgacgcgaaaggccgtggcaggtgacgggatcacttcttcgaggtgaagtgaagcgcttggccatcctatgtggagttagttaagcttagtatcaacaccccccctgtaaaattgttccatcaaatattcaaagttcctttgatgaagtaccaggacctgtcgctgcctagtaatactctgttgcaaatgtgggctgtgtttcttggtggtaaaagggaatgtcatttcgctcagcaaatcgcgcatgcttttgcacggcagattatacttagacgtggcaggctgtggaataggaagtttgctagagatacgtgcagtgtgatgtgccaaatactgcaggtcttcactcttcagcaacgcccgtcagccaggtgttcagcaacagcagcgcggacgactgctgcgccgacacgtgcagtgatgtgcctaatactgcagggtttagtgcttgtaattggacgaccatcagtgtgatgtagtgaagtggtgacagcagtcggtggatgttaaatccagaccggagcagagctcacctggagactgaagggtccttttcgaatttcttcatctgtaaaacttgtgatcccctccgcaagaacagcaaacagaatcaatcgagtgaaacaattttaggcagtgtttggttgaagagccaagtagaatggagccgttctgtttcagttttgttg

SEQ ID NO: 4120 - DNA, 2323 bp, Zea Mays
atcgaacatcggagagatgcgcgcgggcggcggcgcgcctccccgacacgcaccactctccccgaccgcctccgccactgccacgctagtacccgcttctgtcgccatgcccacgccgcgcctcgtacacctccgccacctcctctcattccgctccgcccttccccgcccgctgggtcccaaccaaagccacccgctccccgggtcggttcacccgtcccttctcctcccccgtgccatggctggtgtcgcatacgcaggtctggcgacggggtcggcggaatacgaggaggtgctcgggtgcctcgcgtcgctgataacgcagaaggtgcgcgcggacaccggcaaccgcggcaaccagtgggagctcatgtccaaatactggaactggaggaatccatcgcgcagttgaaagtggttcacgttgctgggaccaaagggaagggttcaacatgcacatttgctgagtcaatccttcgatcatgtggtttccacactgggctcttcacttcaccacatttgatggatgtccgcgagcgatttcggcttgatgggctggacatttcagaagaaaagtttattaggtatttctggtggtgctggaagacactgaaggacaagactggtgatggtgtaccgatgccggcctactttaggtcagagcacctgtagtttgtggaataacatcccttgggtatgatcatatggaaattcttggaaacacacttggagaaattactagagagaaggctgggatactgaagaaaggagttccagcgtatacagttccacagccagaagaggcaatgtctgtactgatgaagcgagctactgaattgggtgtttctcttcaagttgtccaccctttggacccacagaaattagaggatcaacctcttggactccatggtgagcaccaatacatgaatgcaggtcttgcaattgcattggctaatacctggcttgagaggcaaggccatttgaacagattacatgtcaaacattctggtaccttgccagatcagttcatcaaagggctgtcgagtgcttgtctgcaaggtcgaggacagattattccaaattcacaagtgaactcagaaaatgatcgtgattcttcattggttttctatttggatggggcacatagctcagaaagcatggaaatgtgtgcaagatggtttgcccacgctacaaatagtgatggaatacagccaggtccttcggagcagcctcacactgatagggattccaggaagtttctccttttcaattgcatgactgtaagagatcctcagagattgctcccacgtcttctagatacatgtgctcaaaatggtctccactttgagcatgccttatttgtgccaaaccaatcacagtacaacaagcttggatcccttgcatccccaccttcagagcgtgaacaaattgatttgtcatggcagttgtcgcttcaaaaggtgtggggaaacctgcctcatcacaataaaggtctaaatgatgtaaactctagcggagctacctcggtttttgaatctcttccattggcaattaaatggctaagggaaactgctcaacaaaatcaatcgattcagtttcaggtcttagttaccggctcgctgcaccttgtcggcgatgtcttaagattgctcaagaacaataagtaacttcatttggaatggcacattgttcagattgaactggctgcctacggaccactaaggcactaactggagcttatcgaaatttgtgattgggatagcacaacataccaacttggttacaaggctggaagaaattgaaagacatttttatttcagttccaatcagcggtaaaattgttgtatttaatcgtttctttaagttcctggcgttatgtgccatcacatcctcactccagaaggatgtaaccaatttttagaatgtacaattagtggattctcagcgacacatctttgtatgattggtggacgggtctgcgtagcctttgcaacagacaatcaagaagacgctttgacggcctgctaattcatttttggtggaatttatggctggaacgaaataacagaattttccaaagtcagcatagaagcgttaatcaagtggcccttgcagtcatcagatattgctagtagctgaggtcttgttgatctggtctagtgggtttttgttcttctccttttattttttcttttttaccctctcccctccggttctctggttttgtatcttccatttctttgctctctaatctaatatatttcggagtggcaagtcttttgccccttcctttcaaaaaaaaaaaaacaattagtggattata

SEQ ID NO: 4121 - DNA, 2400 bp, Zea Mays
atcgaacatcggagagatgcgcgcgggcggcggcgcgcctccccgacacgcaccactctccccgaccgcctccgccactgccacgctagtacccgcttctgtcgccatgcccacgccgcgcctcgtacacctccgccacctcctctcattccgctccgcccttccccgcccgctgggtcccaaccaaagccacccgctccccgggtcggttcacccgtcccttctcctcccccgtgccatggctggtgtcgcatacgcaggtctggcgacggggtcggcggaatacgaggaggtgctcgggtgcctcgcgtcgctgataacgcagaaggtgcgcgcggacaccggcaaccgcggcaaccagtgggagctcatgtccaaatactggaactggaggaatccatcgcgcagttgaaagtggttcacgttgctgggaccaaagggaagggttcaacatgcacatttgctgagtcaatccttcgatcatgtggtttccacactgggctcttcacttcaccacatttgatggatgtccgcgagcgatttcggcttgatgggctggacatttcagaagaaaagtttattaggtatttctggtggtgctggaagacactgaaggacaagactggtgatggtgtaccgatgccggcctactttaggttccttgcactgctagcattcaagatcttttcagatgagcaggtggatgtcgtagtgctcgaggttggtttgggagggaagtatgatgcaacaaatgtggtcagagcacctgtagtttgtggaataacatcccttgggaaacacacttggagaaattactagagagaaggctgggatactgaagaaaggagttccagcgtatacagttccacagccagaagaggcaatgtctgtactgatgaagcgagctactgaattgggtgtttctcttcaagttgtccaccctttggacccacagaaattagaggatcaacctcttggactccatggtgagcaccaatacatgaatgcaggtcttgcaattgcattggctaatacctggcttgagaggcaaggccatttgaacagattacatgtcaaacattctggtaccttgccagatcagttcatcaaagggctgtcgagtgcttgtctgcaaggtcgaggacagattattccaaattcacaagtgaactcagaaaatgatcgtgattcttcattggttttctatttggatggggcacatagctcagaaagcatggaaatgtgtgcaagatggtttgcccacgctacaaatagtgatggaatacagccaggtccttcggagcagcctcacactgatagggattccaggaagtttctccttttcaattgcatgactgtaagagatcctcagagattgctcccacgtcttctagatacatgtgctcaaaatggtctccactttgagcatgccttatttgtgccaaaccaatcacagtacaacaagcttggatcccttgcatccccaccttcagagcgtgaacaaattgatttgtcatggcagttgtcgcttcaaaaggtgtggggaaacctgcctcatcacaataaaggtctaaatgatgtaaactctagcggagctacctcggtttttgaatctcttccattggcaattaaatggctaagggaaactgctcaacaaaatcaatcgattcagtttcaggtcttagttaccggctcgctgcaccttgtcggcgatgtcttaagattgctcaagaacaataagtaacttcatttggaatggcacattgttcagattgaactggctgcctacggaccactaaggcactaactggagcttatcgaaatttgtgattgggatagcacaacataccaacttggttacaaggctggaagaaattgaaagacatttttatttcagttccaatcagcggtaaaattgttgtatttaatcgtttctttaagttcctggcgttatgtgccatcacatcctcactccagaaggatgtaaccaatttttagaatgtacaattagtggattctcagcgacacatctttgtatgattggtggacgggtctgcgtagcctttgcaacagacaatcaagaagacgctttgacggcctgctaattcatttttggtggaatttatggctggaacgaaataacagaattttccaaagtcagcatagaagcgttaatcaagtggcccttgcagtcatcagatattgctagtagctgaggtcttgttgatctggtctagtgggtttttgttcttctccttttattttttcttttttaccctctcccctccggttctctggttttgtatcttccatttctttgctctctaatctaatatatttcggagtggcaagtcttttgccccttcctttcaaaaaaaaaaaaacaattagtggattata

SEQ ID NO: 4122 - DNA, 2817 bp, Zea Mays
atcgaacatcggagagatgcgcgcgggcggcggcgcgcctccccgacacgcaccactctccccgaccgcctccgccactgccacgctagtacccgcttctgtcgccatgcccacgccgcgcctcgtacacctccgccacctcctctcattccgctccgcccttccccgcccgctgggtcccaaccaaagccacccgctccccgggtcggttcacccgtcccttctcctcccccgtgccatggctggtgtcgcatacgcaggtctggcgacggggtcggcggaatacgaggaggtgctcgggtgcctcgcgtcgctgataacgcagaaggtgcgcgcggacaccggcaaccgcggcaaccagtgggagctcatgtccaagtacgtccagatactggaactggaggaatccatcgcgcagttgaaagtggttcacgttgctgggaccaaagggaagggttcaacatgcacatttgctgagtcaatccttcgatcatgtggtttccacactgggctcttcacttcaccacatttgatggatgtccgcgagcgatttcggcttgatgggctggacatttcagaagaaaagtttattaggtatttctggtggtgctggaagacactgaaggacaagactggtgatggtgtaccgatgccggcctactttaggttccttgcactgctagcattcaagatcttttcagatgagcaggtctttttaaccatttagtgggtgtaggaaggatatcccagcttctttttaaatggattttgaagccttttcccagtatgaggaatttgtagatattgcctcattttatatgaaaataaattggtagaaaagcatatcttgtgtatctgtgtacagtagtggaatataaaaggttgtttcctccataatacctgtcatcatctccattcagaactgtctgttggtaatgttcttgacagatatgacactattaataatttgcattataaaatccttaattatctaataagtttatttaagaagcattactgtttaaggtagataaagctgtcatacgttgctcaattttttatgctttcctagcagcatgttcaaaacaattttcttgttttgtcatgtttaagcaggtggatgtcgtagtgctcgaggttggtttgggagggaagtatgatgcaacaaatgtggtcagagcacctgtagtttgtggaataacatcccttgggaaacacacttggagaaattactagagagaaggctgggatactgaagaaaggagttccagcgtatacagttccacagccagaagaggcaatgtctgtactgatgaagcgagctactgaattgggtgtttctcttcaagttgtccaccctttggacccacagaaattagaggatcaacctcttggactccatggtgagcaccaatacatgaatgcaggtcttgcaattgcattggctaatacctggcttgagaggcaaggccatttgaacagattacatgtcaaacattctggtaccttgccagatcagttcatcaaagggctgtcgagtgcttgtctgcaaggtcgaggacagattattccaaattcacaagtgaactcagaaaatgatcgtgattcttcattggttttctatttggatggggcacatagctcagaaagcatggaaatgtgtgcaagatggtttgcccacgctacaaatagtgatggaatacagccaggtccttcggagcagcctcacactgatagggattccaggaagtttctccttttcaattgcatgactgtaagagatcctcagagattgctcccacgtcttctagatacatgtgctcaaaatggtctccactttgagcatgccttatttgtgccaaaccaatcacagtacaacaagcttggatcccttgcatccccaccttcagagcgtgaacaaattgatttgtcatggcagttgtcgcttcaaaaggtgtggggaaacctgcctcatcacaataaaggtctaaatgatgtaaactctagcggagctacctcggtttttgaatctcttccattggcaattaaatggctaagggaaactgctcaacaaaatcaatcgattcagtttcaggtcttagttaccggctcgctgcaccttgtcggcgatgtcttaagattgctcaagaacaataagtaacttcatttggaatggcacattgttcagattgaactggctgcctacggaccactaaggcactaactggagcttatcgaaatttgtgattgggatagcacaacataccaacttggttacaaggctggaagaaattgaaagacatttttatttcagttccaatcagcggtaaaattgttgtatttaatcgtttctttaagttcctggcgttatgtgccatcacatcctcactccagaaggatgtaaccaatttttagaatgtacaattagtggattctcagcgacacatctttgtatgattggtggacgggtctgcgtagcctttgcaacagacaatcaagaagacgctttgacggcctgctaattcatttttggtggaatttatggctggaacgaaataacagaattttccaaagtcagcatagaagcgttaatcaagtggcccttgcagtcatcagatattgctagtagctgaggtcttgttgatctggtctagtgggtttttgttcttctccttttattttttcttttttaccctctcccctccggttctctggttttgtatcttccatttctttgctctctaatctaatatatttcggagtggcaagtcttttgccccttcctttcaaaaaaaaaaaaacaattagtggattata

SEQ ID NO: 4123 - DNA, 2372 bp, Zea Mays
atcgaacatcggagagatgcgcgcgggcggcggcgcgcctccccgacacgcaccactctccccgaccgcctccgccactgccacgctagtacccgcttctgtcgccatgcccacgccgcgcctcgtacacctccgccacctcctctcattccgctccgcccttccccgcccgctgggtcccaaccaaagccacccgctccccgggtcggttcacccgtcccttctcctcccccgtgccatggctggtgtcgcatacgcaggtctggcgacggggtcggcggaatacgaggaggtgctcgggtgcctcgcgtcgctgataacgcagaaggtgcgcgcggacaccggcaaccgcggcaaccagtgggagctcatgtccaagtacgtccagatactggaactggaggaatccatcgcgcagttgaaagtggttcacgttgctgggaccaaagggaagggttcaacatgcacatttgctgagtcaatccttcgatcatgtggtttccacactgggctcttcacttcaccacatttgatggatgtccgcgagcgatttcggcttgatgggctggacatttcagaagaaaagtttattaggtatttctggtggtgctggaagacactgaaggacaagactggtgatggtgtaccgatgccggcctactttaggttccttgcactgctagcattcaagatcttttcagatgagcaggtggatgtcgtagtgctcgaggttggtttgggagggaagtatgatgcaacaaatgtggaaacacacttggagaaattactagagagaaggctgggatactgaagaaaggagttccagcgtatacagttccacagccagaagaggcaatgtctgtactgatgaagcgagctactgaattgggtgtttctcttcaagttgtccaccctttggacccacagaaattagaggatcaacctcttggactccatggtgagcaccaatacatgaatgcaggtcttgcaattgcattggctaatacctggcttgagaggcaaggccatttgaacagattacatgtcaaacattctggtaccttgccagatcagttcatcaaagggctgtcgagtgcttgtctgcaaggtcgaggacagattattccaaattcacaagtgaactcagaaaatgatcgtgattcttcattggttttctatttggatggggcacatagctcagaaagcatggaaatgtgtgcaagatggtttgcccacgctacaaatagtgatggaatacagccaggtccttcggagcagcctcacactgatagggattccaggaagtttctccttttcaattgcatgactgtaagagatcctcagagattgctcccacgtcttctagatacatgtgctcaaaatggtctccactttgagcatgccttatttgtgccaaaccaatcacagtacaacaagcttggatcccttgcatccccaccttcagagcgtgaacaaattgatttgtcatggcagttgtcgcttcaaaaggtgtggggaaacctgcctcatcacaataaaggtctaaatgatgtaaactctagcggagctacctcggtttttgaatctcttccattggcaattaaatggctaagggaaactgctcaacaaaatcaatcgattcagtttcaggtcttagttaccggctcgctgcaccttgtcggcgatgtcttaagattgctcaagaacaataagtaacttcatttggaatggcacattgttcagattgaactggctgcctacggaccactaaggcactaactggagcttatcgaaatttgtgattgggatagcacaacataccaacttggttacaaggctggaagaaattgaaagacatttttatttcagttccaatcagcggtaaaattgttgtatttaatcgtttctttaagttcctggcgttatgtgccatcacatcctcactccagaaggatgtaaccaatttttagaatgtacaattagtggattctcagcgacacatctttgtatgattggtggacgggtctgcgtagcctttgcaacagacaatcaagaagacgctttgacggcctgctaattcatttttggtggaatttatggctggaacgaaataacagaattttccaaagtcagcatagaagcgttaatcaagtggcccttgcagtcatcagatattgctagtagctgaggtcttgttgatctggtctagtgggtttttgttcttctccttttattttttcttttttaccctctcccctccggttctctggttttgtatcttccatttctttgctctctaatctaatatatttcggagtggcaagtcttttgccccttcctttcaaaaaaaaaaaaacaattagtggattata

SEQ ID NO: 4124 - DNA, 2357 bp, Zea Mays
atcgaacatcggagagatgcgcgcgggcggcggcgcgcctccccgacacgcaccactctccccgaccgcctccgccactgccacgctagtacccgcttctgtcgccatgcccacgccgcgcctcgtacacctccgccacctcctctcattccgctccgcccttccccgcccgctgggtcccaaccaaagccacccgctccccgggtcggttcacccgtcccttctcctcccccgtgccatggctggtgtcgcatacgcaggtctggcgacggggtcggcggaatacgaggaggtgctcgggtgcctcgcgtcgctgataacgcagaaggtgcgcgcggacaccggcaaccgcggcaaccagtgggagctcatgtccaaatactggaactggaggaatccatcgcgcagttgaaagtggttcacgttgctgggaccaaagggaagggttcaacatgcacatttgctgagtcaatccttcgatcatgtggtttccacactgggctcttcacttcaccacatttgatggatgtccgcgagcgatttcggcttgatgggctggacatttcagaagaaaagtttattaggtatttctggtggtgctggaagacactgaaggacaagactggtgatggtgtaccgatgccggcctactttaggtggatgtcgtagtgctcgaggttggtttgggagggaagtatgatgcaacaaatgtggtcagagcacctgtagtttgtggaataacatcccttgggaaacacacttggagaaattactagagagaaggctgggatactgaagaaaggagttccagcgtatacagttccacagccagaagaggcaatgtctgtactgatgaagcgagctactgaattgggtgtttctcttcaagttgtccaccctttggacccacagaaattagaggatcaacctcttggactccatggtgagcaccaatacatgaatgcaggtcttgcaattgcattggctaatacctggcttgagaggcaaggccatttgaacagattacatgtcaaacattctggtaccttgccagatcagttcatcaaagggctgtcgagtgcttgtctgcaaggtcgaggacagattattccaaattcacaagtgaactcagaaaatgatcgtgattcttcattggttttctatttggatggggcacatagctcagaaagcatggaaatgtgtgcaagatggtttgcccacgctacaaatagtgatggaatacagccaggtccttcggagcagcctcacactgatagggattccaggaagtttctccttttcaattgcatgactgtaagagatcctcagagattgctcccacgtcttctagatacatgtgctcaaaatggtctccactttgagcatgccttatttgtgccaaaccaatcacagtacaacaagcttggatcccttgcatccccaccttcagagcgtgaacaaattgatttgtcatggcagttgtcgcttcaaaaggtgtggggaaacctgcctcatcacaataaaggtctaaatgatgtaaactctagcggagctacctcggtttttgaatctcttccattggcaattaaatggctaagggaaactgctcaacaaaatcaatcgattcagtttcaggtcttagttaccggctcgctgcaccttgtcggcgatgtcttaagattgctcaagaacaataagtaacttcatttggaatggcacattgttcagattgaactggctgcctacggaccactaaggcactaactggagcttatcgaaatttgtgattgggatagcacaacataccaacttggttacaaggctggaagaaattgaaagacatttttatttcagttccaatcagcggtaaaattgttgtatttaatcgtttctttaagttcctggcgttatgtgccatcacatcctcactccagaaggatgtaaccaatttttagaatgtacaattagtggattctcagcgacacatctttgtatgattggtggacgggtctgcgtagcctttgcaacagacaatcaagaagacgctttgacggcctgctaattcatttttggtggaatttatggctggaacgaaataacagaattttccaaagtcagcatagaagcgttaatcaagtggcccttgcagtcatcagatattgctagtagctgaggtcttgttgatctggtctagtgggtttttgttcttctccttttattttttcttttttaccctctcccctccggttctctggttttgtatcttccatttctttgctctctaatctaatatatttcggagtggcaagtcttttgccccttcctttcaaaaaaaaaaaaacaattagtggattata

SEQ ID NO: 4125 - DNA, 2321 bp, Zea Mays
atcgaacatcggagagatgcgcgcgggcggcggcgcgcctccccgacacgcaccactctccccgaccgcctccgccactgccacgctagtacccgcttctgtcgccatgcccacgccgcgcctcgtacacctccgccacctcctctcattccgctccgcccttccccgcccgctgggtcccaaccaaagccacccgctccccgggtcggttcacccgtcccttctcctcccccgtgccatggctggtgtcgcatacgcaggtctggcgacggggtcggcggaatacgaggaggtgctcgggtgcctcgcgtcgctgataacgcagaaggtgcgcgcggacaccggcaaccgcggcaaccagtgggagctcatgtccaaatactggaactggaggaatccatcgcgcagttgaaagtggttcacgttgctgggaccaaagggaagggttcaacatgcacatttgctgagtcaatccttcgatcatgtggtttccacactgggctcttcacttcaccacatttgatggatgtccgcgagcgatttcggcttgatgggctggacatttcagaagaaaagtttattaggtatttctggtggtgctggaagacactgaaggacaagactggtgatggtgtaccgatgccggcctactttaggttccttgcactgctagcattcaagatcttttcagatgagcaggtggatgtcgtagtgctcgaggttggtttgggagggaagtatgatgcaacaaatgtggtcagagcacctgtagtttgtggaataacatcccttgggaaacacacttggagaaattactagagagaaggctgggatactgaagaaaggagttccagcgtatacagttccacagccagaagaggcaatgtctgtactgatgaagcgagctactgaattgggtgtttctcttcaagttgtccaccctttggacccacagaaattagaggatcaacctcttggactccatggtgagcaccaatacatgaatgcaggtcttgcaattgcattggctaatacctggcttgagaggcaaggccatttgaacagattacatgtcaaacattctggtaccttgccagatcagttcatcaaagggctgtcgagtgcttgtctgcaaggtcgaggacagattattccaaattcacaagtgaactcagaaaatgatcgtgattcttcattggttttctatttggatggggcacatagctcagaaagcatggaaatgtgtgcaagatggtttgcccacgctacaaatagtgatggaatacagccaggtccttcggagcagcctcacactgatagggattccaggaaggtctccactttgagcatgccttatttgtgccaaaccaatcacagtacaacaagcttggatcccttgcatccccaccttcagagcgtgaacaaattgatttgtcatggcagttgtcgcttcaaaaggtgtggggaaacctgcctcatcacaataaaggtctaaatgatgtaaactctagcggagctacctcggtttttgaatctcttccattggcaattaaatggctaagggaaactgctcaacaaaatcaatcgattcagtttcaggtcttagttaccggctcgctgcaccttgtcggcgatgtcttaagattgctcaagaacaataagtaacttcatttggaatggcacattgttcagattgaactggctgcctacggaccactaaggcactaactggagcttatcgaaatttgtgattgggatagcacaacataccaacttggttacaaggctggaagaaattgaaagacatttttatttcagttccaatcagcggtaaaattgttgtatttaatcgtttctttaagttcctggcgttatgtgccatcacatcctcactccagaaggatgtaaccaatttttagaatgtacaattagtggattctcagcgacacatctttgtatgattggtggacgggtctgcgtagcctttgcaacagacaatcaagaagacgctttgacggcctgctaattcatttttggtggaatttatggctggaacgaaataacagaattttccaaagtcagcatagaagcgttaatcaagtggcccttgcagtcatcagatattgctagtagctgaggtcttgttgatctggtctagtgggtttttgttcttctccttttattttttcttttttaccctctcccctccggttctctggttttgtatcttccatttctttgctctctaatctaatatatttcggagtggcaagtcttttgccccttcctttcaaaaaaaaaaaaacaattagtggattata

SEQ ID NO: 4126 - DNA, 2298 bp, Zea Mays
atcgaacatcggagagatgcgcgcgggcggcggcgcgcctccccgacacgcaccactctccccgaccgcctccgccactgccacgctagtacccgcttctgtcgccatgcccacgccgcgcctcgtacacctccgccacctcctctcattccgctccgcccttccccgcccgctgggtcccaaccaaagccacccgctccccgggtcggttcacccgtcccttctcctcccccgtgccatggctggtgtcgcatacgcaggtctggcgacggggtcggcggaatacgaggaggtgctcgggtgcctcgcgtcgctgataacgcagaaggtgcgcgcggacaccggcaaccgcggcaaccagtgggagctcatgtccaagtacgtccagatactggaactggaggaatccatcgcgcagttgaaagtggttcacgttgctgggaccaaagggaagggttcaacatgcacatttgctgagtcaatccttcgatcatgtggtttccacactgggctcttcacttcaccacatttgatggatgtccgcgagcgatttcggcttgatgggctggacatttcagaagaaaagtttattaggtatttctggtggtgctggaagacactgaaggacaagactggtgatggtgtaccgatgccggcctactttaggtggatgtcgtagtgctcgaggttggtttgggagggaagtatgatgcaacaaatgtggaaacacacttggagaaattactagagagaaggctgggatactgaagaaaggagttccagcgtatacagttccacagccagaagaggcaatgtctgtactgatgaagcgagctactgaattgggtgtttctcttcaagttgtccaccctttggacccacagaaattagaggatcaacctcttggactccatggtgagcaccaatacatgaatgcaggtcttgcaattgcattggctaatacctggcttgagaggcaaggccatttgaacagattacatgtcaaacattctggtaccttgccagatcagttcatcaaagggctgtcgagtgcttgtctgcaaggtcgaggacagattattccaaattcacaagtgaactcagaaaatgatcgtgattcttcattggttttctatttggatggggcacatagctcagaaagcatggaaatgtgtgcaagatggtttgcccacgctacaaatagtgatggaatacagccaggtccttcggagcagcctcacactgatagggattccaggaagtttctccttttcaattgcatgactgtaagagatcctcagagattgctcccacgtcttctagatacatgtgctcaaaatggtctccactttgagcatgccttatttgtgccaaaccaatcacagtacaacaagcttggatcccttgcatccccaccttcagagcgtgaacaaattgatttgtcatggcagttgtcgcttcaaaaggtctaaatgatgtaaactctagcggagctacctcggtttttgaatctcttccattggcaattaaatggctaagggaaactgctcaacaaaatcaatcgattcagtttcaggtcttagttaccggctcgctgcaccttgtcggcgatgtcttaagattgctcaagaacaataagtaacttcatttggaatggcacattgttcagattgaactggctgcctacggaccactaaggcactaactggagcttatcgaaatttgtgattgggatagcacaacataccaacttggttacaaggctggaagaaattgaaagacatttttatttcagttccaatcagcggtaaaattgttgtatttaatcgtttctttaagttcctggcgttatgtgccatcacatcctcactccagaaggatgtaaccaatttttagaatgtacaattagtggattctcagcgacacatctttgtatgattggtggacgggtctgcgtagcctttgcaacagacaatcaagaagacgctttgacggcctgctaattcatttttggtggaatttatggctggaacgaaataacagaattttccaaagtcagcatagaagcgttaatcaagtggcccttgcagtcatcagatattgctagtagctgaggtcttgttgatctggtctagtgggtttttgttcttctccttttattttttcttttttaccctctcccctccggttctctggttttgtatcttccatttctttgctctctaatctaatatatttcggagtggcaagtcttttgccccttcctttcaaaaaaaaaaaaacaattagtggattata

SEQ ID NO: 4127 - DNA, 2342 bp, Zea Mays
atcgaacatcggagagatgcgcgcgggcggcggcgcgcctccccgacacgcaccactctccccgaccgcctccgccactgccacgctagtacccgcttctgtcgccatgcccacgccgcgcctcgtacacctccgccacctcctctcattccgctccgcccttccccgcccgctgggtcccaaccaaagccacccgctccccgggtcggttcacccgtcccttctcctcccccgtgccatggctggtgtcgcatacgcaggtctggcgacggggtcggcggaatacgaggaggtgctcgggtgcctcgcgtcgctgataacgcagaaggtgcgcgcggacaccggcaaccgcggcaaccagtgggagctcatgtccaagtacgtccagatactggaactggaggaatccatcgcgcagttgaaagtggttcacgttgctgggaccaaagggaagggttcaacatgcacatttgctgagtcaatccttcgatcatgtggtttccacactgggctcttcacttcaccacatttgatggatgtccgcgagcgatttcggcttgatgggctggacatttcagaagaaaagtttattaggtatttctggtggtgctggaagacactgaaggacaagactggtgatggtgtaccgatgccggcctactttaggttccttgcactgctagcattcaagatcttttcagatgagcaggtggatgtcgtagtgctcgaggttggtttgggagggaagtatgatgcaacaaatgtggtcagagcacctgtagtttgtggaataacatcccttgggtatgatcatatggaaattcttggaaacacacttggagaaattactagagagaaggctgggatactgaagaaaggagttccagcgtatacagttccacagccagaagaggcaatgtctgtactgatgaagcgagctactgaattgggtgtcttgcaattgcattggctaatacctggcttgagaggcaaggccatttgaacagattacatgtcaaacattctggtaccttgccagatcagttcatcaaagggctgtcgagtgcttgtctgcaaggtcgaggacagattattccaaattcacaagtgaactcagaaaatgatcgtgattcttcattggttttctatttggatggggcacatagctcagaaagcatggaaatgtgtgcaagatggtttgcccacgctacaaatagtgatggaatacagccaggtccttcggagcagcctcacactgatagggattccaggaagtttctccttttcaattgcatgactgtaagagatcctcagagattgctcccacgtcttctagatacatgtgctcaaaatggtctccactttgagcatgccttatttgtgccaaaccaatcacagtacaacaagcttggatcccttgcatccccaccttcagagcgtgaacaaattgatttgtcatggcagttgtcgcttcaaaaggtgtggggaaacctgcctcatcacaataaaggtctaaatgatgtaaactctagcggagctacctcggtttttgaatctcttccattggcaattaaatggctaagggaaactgctcaacaaaatcaatcgattcagtttcaggtcttagttaccggctcgctgcaccttgtcggcgatgtcttaagattgctcaagaacaataagtaacttcatttggaatggcacattgttcagattgaactggctgcctacggaccactaaggcactaactggagcttatcgaaatttgtgattgggatagcacaacataccaacttggttacaaggctggaagaaattgaaagacatttttatttcagttccaatcagcggtaaaattgttgtatttaatcgtttctttaagttcctggcgttatgtgccatcacatcctcactccagaaggatgtaaccaatttttagaatgtacaattagtggattctcagcgacacatctttgtatgattggtggacgggtctgcgtagcctttgcaacagacaatcaagaagacgctttgacggcctgctaattcatttttggtggaatttatggctggaacgaaataacagaattttccaaagtcagcatagaagcgttaatcaagtggcccttgcagtcatcagatattgctagtagctgaggtcttgttgatctggtctagtgggtttttgttcttctccttttattttttcttttttaccctctcccctccggttctctggttttgtatcttccatttctttgctctctaatctaatatatttcggagtggcaagtcttttgccccttcctttcaaaaaaaaaaaaacaattagtggattata

SEQ ID NO: 4128 - DNA, 784 bp, Zea Mays
gtgaagagatgtggtaaatatagaatgttctatggacctggcggaccttacgccctgttcgccggcaaagatgccagcagagctctagcgaagatgtcgttcgagccacaggacctcaccggcgacatctcgggcctaggtccgtttgagctcgacgccctgcaggactgggagtacaagttcatgagcaagtacgtgaaggtcggcacggtcaagaagagcgtccctgtggaaggcggcagcaccgcgagcaccactgaggctgataaggcaccgacaaccgaagagaagccaagcgaggcggtggttgaggagaaggaagccgcggctaatgaaggtgcccaggaaaactagagcttttctgtgcatgcggcaataattcgacatggtcccattcgggtcgtgtcagggccctgctatcctctcgtgtctcgtgtcgtatatcagcagctatggcccgtgtgattggatacgtccatctgtgccagcgccgtggtgctctataattgctgttagtcccttgtggccttgtgttcgatcggataatcggtgctcttttaaaatgagtaattttctttgcagtagtaccctaagattatcatacgtagtcttcaccgaaggttccttgtaatgtttcgcgcgcgtggggatatgccatgaaagtgtcgtgtggttcctgtcaacgtgcgtggcattgagccagaatcatgtgttctgaggggttgaatggcacggtaaaagtccaattgtgcttgtggagtcctgtcatcgttttgaaaacagc

SEQ ID NO: 4129 - DNA, 1342 bp, Zea Mays
caaattcaaaagattttgaattcaaaataaatttgaacaaccacacacatcaaaacatagtgtaccagcatctatgcatagcatttgaatcagttcatttaaaaaactaggaaaaaggggggaaaatcctacgttagagggccttgaagtttcttgcactgcaggctgcagcactgctgcccgggactggcacaccccaagtaattccaatcaaagttgtttaactggcacaaagtgtgtgagcaagatttatgtattttcttccgtttgtatcgaattagttattagggtgaaggagacatcttccaccccactgcatccagcaagtgttctgaatggcttcttgctcctctgtccgcgccgcaccatcgctccccgtctcggcgccgcctagccggcggcgcgcgagtacggccgtatgtcttcagggtgttcgccgcagcagggtcgcgtcctgccgcgtgcggtgtagcgccggggccgggcagggcggggtcaaggtccctgcgaagctggcggagctgtggtcggcggcgaagggcgcgcctcctctggccgtgctcgcgggtgtggcggcggcggtggcgatatacaaggtcgggtccagtctccttgcgccgcgccatcctccgccccgtcggctggaggcccagacggccccgccgcctccagtcccggagccggtgcaggtgggcgagataacggaggaggaactacggcagtacgacgggtccgaccccgagaaaccgctgctgatggccatcaaggggcagatctatgacgtctcagagagcaggatctgaatggtgatatatctggtctaacgccaatggagctcggcgccttgaatgactgggagtacaagttcgccaccaagtatgcgaaggtaggaaccataagaagagcagcgcccgtcgaagtggtttatggcaacatttcgcctgaaatgagggaagaagttagtgaacctgtggttgaacctgagcttgagcctgagcccgagcctgagccgcatgacgacgatgcaccatgaataggaaaaacacaaagacatcagttcgggtaggaagatgaaatggagggcggcacactgcttataatgttccagaggtagtcagaatttcgaaataatgaaaagcctcataggctcgtacttgttgcgtggatattcagaaagaatagtgtctaaatttaaaccaatagtagatgtgtactctgtagtaggattgaattgttggatatgtacatgtcattcttctattttcgtgaaacgtgtcacttcctgatctctttactatgcaaatgcgcaagaacactctgcatactaaatactttggctgac

SEQ ID NO: 4130 - DNA, 716 bp, Zea Mays
gaatattatcggcccattgcgtctacatcttccttgcacgctactgtctctctatatatcactcttttcccccattacaaggactttggatgagtcggtgctggctgatgagttttctcctccggcttagtttactgaaattgggcttctgtcttcttgggcactaaggtccatgatcgattcagccaacagctacgtaattacaagaaaccacgactactataccactccagttcgcagcagccaggaaaatgactcctctgtagattttcaggcgaccgagtactgacgccattactaccgttaagaaactcaacaacaccgctacctgttcttagaaacaactctccaccgagaaatgctcatctggtgctgccagttttcccttcccggactcccaacagccagctaagccaccgagtgccgaccccaaatcttcctgccgttaacttttatttataaatcttttcgcaggtggggggcagtatgccacgcctacggcctactcagggaagagggaagccagccgggccggctgatcgcaggggctggggacaaaaccaaagaaagatgagatctatttgcttctgcacaatagccctcacgaacctcatcttgtcagccattcccattcctcctgacagttcatcaaagaagggactaatgcttttctgatgcatgcaagttccaattttggagacagggactgccgtggg

SEQ ID NO: 4131 - DNA, 626 bp, Zea Mays
cggcactacctccaagacctgcagagcgagcgagagagagagagagagagagagagagagagagagagagagagagagagagaataggtgaggacggagatgatccgtgcggctagcggagggacaactctagtagtctagtgagtctccatgtggaaaaaaaggacagtcgaagcagggagggttgcgctgccagagtaaggacaaggagaggggaggagcggtgctgtaagctgtggcctgtggacggcgcagacctcgccgtcggatccacgaatcgcgtcaggccgataagggatcctatcctgccttgggaagaggcgatgcgcgcgtagactcgatcacccggaaacggaggcagctcgccggagagaagcggtttttcgccagaggaggcgatgaggctcccggcgtcttggaggcggcgcggtgcagcctcgaaacgaggaaacgggaggcgttgtgcccgtgtgttgatcggcggacggagtctggccagctgaagctgctgctgcagactctgcaagtcctcgagtggtggatgctgcggcctctgggcgggagcaggtagtagacgtagacgatggcgccggcggtggttcgcgattggatttggcctcttgcgg

SEQ ID NO: 4132 - DNA, 3538 bp, Zea Mays
ctctccctgtctcctaccgatgtctccagctccactactcaggctcgcctcactcctcttcctcttcctcgtccactcggccgccgccggcgacaccaggcgtgcgctgcacgagccgctcttccctatcgaatggaccccgccgccatccaccacggcgcctccagcaccgggattcgcctccgatccctccacacccgtcccacccgtctacaacggggggccggcgctactccccgctccgccgccaccgaacactgtcgccgcggacgcctcttcgtcccgcactggcccggccccgcggcgccacggcggcggcggcggcggaacgcccaaggcggccatcgtcgtcgcctctgcggccgcggcggccgtcctcgcgctgctcgccttcgccgccgcgtttctcctgacgggccgtctcgcgcggcaccccgcgtggacgcacaaacccaccggcctcgccgccgccgcgcaccccgggccagcctccgcggtcgtgctgcacgccgacgcggtgggcacctctgcggcggcggcggcggcctcgtcgtcgggtgcgactgccacttccacaccgcaccggaaagcccgctcggagcgcgccaggtggggcatgtgccgcgacgtcgacaccgtcccgagcccggaactcaggccgctcccgccgctccggcgcgcggggtcgtccgacgaggacgccgcgtactacacgccgggccagcgctcggcggggtccgcgggcggcgagggcgccgggaccgggacgtggagcgaggcgagcgcgtccagcccgcggaccaccaccccctcccgccgcagcctccccagcctcaccagcgatttcttcccaccgacgccggccgccgccgttccagctgcaagcgtggcgcctcctccgcccgcccctcctgtgccacgctcccgtcgcactctgccgcggactcgcttctccgcaggctccgcctcggatatgatcaaacaagtggtctcgccaccctccaacccaccaccacctcctccaccaccaccgccaagatgcaccaacgcagtcccaaaaccttctccaccaccaccggaaccatcctatacaccattgtcaacgcgccggcttcacaaactaaagcaaacagaggggccaggtgtcgctgttccgagcgcacccgtcatggcggtgaacaaggacaacgacggcatgccgattcggacgaacgatgatcctgccgctgccggcgacgaagcccgtcccaagctgaagccgctgcactgggacacggtccgggcgtcctccgaccgcgacatggtctgggaccggctcgagtccaactcattccagttggatgaggacatgatcgaggtgcttttcacgaacaatgctgcaaatgcgcctcctagggatacacttagaaagcctggagtgccgctatgcggtgcccaagagaaggtccttgatcctaagaaggcgcagaacatcgccatcctgctgcgcgcactgaacgtcactctggaagaggtcacggatgcgctgctagacggcaacgctgaatgcctgggggcggatctgttggaaaccttggcaaagatggctcctacaaaagaggaagagctcaaactccgcaacttcactggggatatatcgaagctcggttccgcggagcggtttctcagggcgctgcttgacatccctttctgcttcaaaagagtggacgccatgctctaccgggcgaatttcgacggcgaaattaactacctcaggaaatctttccagacactagagggagcctgcgacgatctaaaaggcagtagactgttcctgaagctactcgaagctgtcctgcaagccgggaaccgaatgaacgtcggcacgaaccgtgggcaggcaagagccttcaagctggacactctgctcaagctcgcggacgtcaaaggcgccgacggcaagaccaccctgctgcacttcgtcgtccaggagatggtccggtcggaggaggacgcgaggacgacgtccgagagagccgcagaggatgaggccagaaagatcgcgagagacgagacgttccgtagtaagcaagggctgaaggtagtgtccgggctgagcggcgagctcgggaacgtcaggaaggcagccgccatggacttcgacgtgcttcacggctacgtgtccaagctccaggccgggctcggcggggtcaggtcggtcctcgcgctcgagaagcagtgcgcccaattgcaagcccaaggccaccaccacaggtttttcgccaggatgcgtgggtttctcgaggaggctggggcggagatcggacgagtcaggcgcgacgaggagagggccctggggagagtgaaggagatcaccgtgtatttccacggtgacgctgccagggaggaggcgcaccctctgaggatcttcgtggtggtcagggacttcctgtccacgctggaccgtgtctgcagggagggatccgccacgaatcgcccatggcagacgcgctccatccgccccctttcatccatggcagctgctccatccgcgccctctttcttcccatcctccccctcaaagatctcgtccacctggtccccccgtaataggatctgggagcagggccaccaatgcagacgtccctcgtcgcggcgcagctgcggcctacgctcgacgtgcccgacctgctccgccacgctgacctggttatccgaggtcaaccgcatcgaggaggtcgagcagcccctcaagccggcgctcaccttcgcctcgccgtccgagagaaggttagagggggaaaaggagcaggccaaattcatcggtggcggtgtccgaacccacctcatgccgtccctcacaagtcacgagccttctctactgtggctacacgtccctcgcctagatcgagtggccagcagacgagaaaatggtggcgtcgagttggtggcgcgtgaggggtgctaccacttccggatccgaatctcaccatcccctccgctttcttgcctccagacgaattttggtgacattgagtttggcttctttcctcatgttgcacctaagactgtcgaacacattttcaaacttgtgcggcttggatgctacaacacaaatcacttcttccggtatgctgtatttgggagggtcactaaaggtgacgatacattgactaaactagagaggcttccaacccggagagaaggcatttttgtaatgccgatcgagcgtatcaacatcctatcaacttactattatgggcagcaacttgctatatgcattacaaaagtaaggctgaaaacttctgaggtgattagtcacactagggaaaacagttgtgtcaaattcgaaagaattctagactctagagtacgaactgaacccacttcaactacagtctccaagaggagaggagcttctttacttgattggagcttggtttctcttattaatatgatcatcttctttgctattcgatttgctgttccaagaagaggtatggtgagagtgatggttatccttctcagaaagggagagatcaagaaagatgagatataa

SEQ ID NO: 4133 - DNA, 724 bp, Zea Mays
atcgttgggccggcgcaaaccctagtcgccacatcactgcctcctcacaccatctgcctgtggttcccatgtcatcctcccccgtttgaggtcttcctgctccttcagatccgtctatgtgtgtgtttgtcgtgcctgatactggctcggaaggtattccgatctgtttcttcggtgccgtatatttcgttgcgattttggttcggttctttcttgctcttcgtgggtcgttgctggataacacggatcgatgatgctgttcaagaagtactgcgttatcttcctgatgcaagtgttaggccctcgttacgaaggcttcctgacgacacaaatatcttgctgagatccaagtgcgcaacttctctcttttttctctttcttttccgtatttctcgccgtgtgctttttctcctctggattgaattttgcgtacagtttagttttcaccaaatgcaatcgtaacttacgggcaggatgtttcagcaacgaagtaaaggaggagattattccgtcaaccgtaaggttccgctaagagctttagaatatgaaaggcattagtggtaacaagatttgatttggttaggtgttagtacaaaaatgagattccattccaatgctgttgggggtactgctagtgaatatggccgggcatctatcacggtgttgtatgtgtacgaaataatgtctgctttcgatacggtaagttttgctttaagttacataa

SEQ ID NO: 4134 - DNA, 123 bp, Zea Mays
atgcacgtaggtgagcatctaacaacactgttccacaactgtcaagcgagcttatttacatcaacaactgcagcatcctccagtagctgccatcaactatctttctacccatcagcggcatag

SEQ ID NO: 4135 - DNA, 1300 bp, Zea Mays
ttggcattattaaaatattaaaatctgaaaaaaagtttaaccgtagcgagacgcacatgcacccaagacaagcaccgaagatggcttgacgcccgaatccagaccctcgtctgttatggcggcggcggaggcggcgccaccgccgatactcgagctggacccgtcgcacgatcgagccgtcagcgttgtcgaggacatcgtgcgtctagagcggaggatctttccgaagcacgaatcgctggcgcggtccctgcacgacgagctaaagcggcggaactccgggctgatctacaagacgtccagcgccgacgagggggaggtcatcgggtatgccatgtacacctgcaacacatccctctgcgccaccatcaccaagctcgccgtgaaggagaactgcaggcggcagggccacggcgaggcgctgctggcgggcgcagtggagcggtgccggcggcggaaggtccagcggctctccctccacgtcgaccccacgaggacggctgccgtggcgctgtaccgcaaggccgggttccaggtcgacaccaccgtcgagggctactacgcgcctcacagggacgcctaccggatgttcttggatctgtagtagaaccgtcgaggacgagaaaaccagcccatgtgttccggcagctgctgccggcttgtagctggtctggtctggtgatacaatacctcgtgagtaggatacagccaacagccgagcagggtggatgattcgaagctgtaagaacgatctgctagaaagttttcataccaccaaggcaatgctgattcacagcaggagggagcaaaccaatcccgcaagtgtgcctggcccatcggaaggccgatgcgctggagtctcggagaacacccagcgggcagtgcctatgcaaggccggcggcggcgacggcgggtcagctcacaggaagattgctcgggacggacggagagggaggctttgcgtcaaggaagaagtcgttggtggtactcattacccagtggtcatgttcaaactcttatccaccttttttttttgaaaggggtcttatccacctcatttaggctttgttcggttagctctcaatccatgtggattgagcgagattggatggatttgaatctcaaataagtcaaacttcttctcaattttttccaatctcatccaatccatgtgttttagaaataaccgaacaagcccttacagggtagaatagaatacgggagtggattatccatgggtgaatcttcagctcaattcacgtaggtctagtagataacgcaaagttcgtgaaaaagcac

SEQ ID NO: 4136 - DNA, 1249 bp, Zea Mays
cccaagacaagcaccgaagatggcttgacgcccgaatccagaccctcgtctgttatggcggcggcggaggcggcgccaccgccgatactcgagctggacccgtcgcacgatcgagccgtcagcgttgtcgaggacatcgtgcgtctagagcggaggatctttccgaagcacgaatcgctggcgcggtccctgcacgacgagctaaagcggcggaactccgggctgatctacaagacgtccagcgccgacgagggggaggtcatcgggtatgccatgtacacctgcaacacatccctctgcgccaccatcaccaagctcgccgtgaaggagaactgcaggcggcagggccacggcgaggcgctgctggcgggcgcagtggagcggtgccggcggcggaaggtccagcggctctccctccacgtcgaccccacgaggacggctgccgtggcgctgtaccgcaaggccgggttccaggtcgacaccaccgtcgagggctactacgcgcctcacagggacgcctaccggatgttcttggatctgtagtagaaccgtcgaggacgagaaaaccagcccatgtgttccggcagctgctgccggcttgtagctggtctggtctggtgatacaatacctcgtgagtaggatacagccaacagccgagcagggtggatgattcgaagctgtaagaacgatctgctagaaagttttcataccaccaagtaccccttaggcaatgctgattcacagcaggagggagcaaaccaatcccgcaagtgtgcctggcccatcggaaggccgatgcgctggagtctcggagaacacccagcgggcagtgcctatgcaaggccggcggcggcgacggcgggtcagctcacaggaagattgctcgggacggacggagagggaggctttgcgtcaaggaagaagtcgttggtggtactcattacccagtggtcatgttcaaactcttatccaccttttttttttgaaaggggtcttatccacctcatttaggctttgttcggttagctctcaatccatgtggattgagcgagattggatggatttgaatctcaaataagtcaaacttcttctcaattttttccaatctcatccaatccatgtgttttagaaataaccgaacaagcccttacagggtagaatagaatacgggagtggattatccatgggtgaatcttcagctcaattcacgtaggtctagtagataacgcaaagttcgtgaaaaagcac

SEQ ID NO: 4137 - DNA, 1289 bp, Zea Mays
cccaagacaagcaccgaagatggcttgacgcccgaatccagaccctcgtctgttatggcggcggcggaggcggcgccaccgccgatactcgagctggacccgtcgcacgatcgagccgtcagcgttgtcgaggacatcgtgcgtctagagcggaggatctttccgaagcacgaatcgctggcgcggtccctgcacgacgagctaaagcggcggaactccgggctgatctacaagacgtccagcgccgacgagggggaggtcatcgggtatgccatgtacacctgcaacacatccctctgcgccaccatcaccaagctcgccgtgaaggagaactgcaggcggcagggccacggcgaggcgctgctggcgggcgcagtggagcggtgccggcggcggaaggtccagcggctctccctccacgtcgaccccacgaggacggctgccgtggcgctgtaccgcaaggccgggttccaggtcgacaccaccgtcgagggctactacgcgcctcacagggacgcctaccggatgttcttggatctgtagtagaaccgtcgaggacgagaaaaccagcccatgtgttccggcagctgctgccggcttgtagctggtctggtctggtgatacaatacctcgtgagtaggatacagccaacagccgagcagggtggatgattcgaagctgtaagaacgatctgctagaaagttttcataccaccaagagaaaatcgaaagcccaatctgattcagcatcgattcaagtaccccttaggcaatgctgattcacagcaggagggagcaaaccaatcccgcaagtgtgcctggcccatcggaaggccgatgcgctggagtctcggagaacacccagcgggcagtgcctatgcaaggccggcggcggcgacggcgggtcagctcacaggaagattgctcgggacggacggagagggaggctttgcgtcaaggaagaagtcgttggtggtactcattacccagtggtcatgttcaaactcttatccaccttttttttttgaaaggggtcttatccacctcatttaggctttgttcggttagctctcaatccatgtggattgagcgagattggatggatttgaatctcaaataagtcaaacttcttctcaattttttccaatctcatccaatccatgtgttttagaaataaccgaacaagcccttacagggtagaatagaatacgggagtggattatccatgggtgaatcttcagctcaattcacgtaggtctagtagataacgcaaagttcgtgaaaaagcac

SEQ ID NO: 4138 - DNA, 1672 bp, Zea Mays
aacactccctcaacaccagaggctgggcaagtttcctatccagactgcgagcgagggagaggcgacatgagctccatcgtctgtaccgccagcgttcgctccgctatcgtctgctccactgacgtccactgtgccgtccactgcgccaccacttagccgtgaggtactcaactgttgccatcatccgtggcttcttgatctagggtttagggtggatctaggaaatcaaatcctacactcgatctacagcctagtgctgctactgcctgagctgtagacatgccaaaatctagtcccctccgtcacggataatgggttcttggaggagcatgttaggcggtttttgttggaggaggaagaagacgatgatgaactattttttgttattctccctgctataatcccatacccctcagaagagaaaaggcccatccacacatcctccctcaccggtgctaaaaaggttaaagaaattcttaaagggcatgagagttggtgcaaatctgagttctgaatggagatggaaatattcaaagccacatcacttagaagagagaatttactatgtgacacgcgaagagttagcatggaggagcagattgggatgttcatgtatatgatctcccacaatgctagtaaccaaatgctacaaaaggcttttcaacacagtggagagactatccatcgaaaaatattcgaagtttttgagatagttcccatactaactcaatgatttgtgaagcttcctagctcagttcaaactcatgctaggattgcaactgattctaggttcatgccctttttcagaattgccttggtgccattgacgacacacatgtacccatgactaccacagaagacagggcccctccatatagaaatagaaaaggaactctttaacacaatgttatggtagtctgtgacttcgatctcaatttgacatttgtctcatgtggatgggaagggtcggcatcagacgcaggggtgcttcaatctactattagcaaaggatttattgtgccagaaggaaagttttatctggtagatggtggctatgcagatacatcatcatacattgcaccatacagaggagttcaataccatctcagtatgtttaggaggcgtcattcatcacaaagtggttatgcaaactacaaagagttgttcaatcatcgccatgcaattctccgcaaccatatagagagggccattggttttcttaagaaaaggttcccgattctaaaagtagggacattccattccatagaaaatcaaatcaagatcactgctgcagccattgcatttcacaacataattagagggcaaaatggtgatgaaggatggctcgacaaccaaccagcttatatatctccaagtcaatatgttgatgtccctgagggagacaacaattatcccaatgacatagagtcaagtgatggtagtacactaagagatcagatcgcactgcagatgtgggctacctacaatagttgattagcttaagtccacatacaataatgactgttaattcaggaacaatgtttgcagcttgttgtaatgttgtaatgcaactatctgtcttatctacttatacaagtgtgttgtcttatctgtaggtatcctgtaatgttcacaagtcaaaattgttataatacgatgcagtacacttgct

SEQ ID NO: 4139 - DNA, 2275 bp, Zea Mays
aacactccctcaacaccagaggctgggcaagtttcctatccagactgcgagcgagggagaggcgacatgagctccatcgtctgtaccgccagcgttcgctccgctatcgtctgctccactgacgtccactgtgccgtccactgcgccaccacttagccgtgagataatgggttcttggaggagcatgttaggcggtttttgttggaggaggaagaagacgatgatgaactattttttgttattctccctgctataatcccatacccctcagaagagaaaaggcccatccacacatcctccctcaccggtgctaaaaaggttaaagaaattcttaaagggcatgagagttggtgcaaatctgagttctgaatggagatggaaatattcaaagccacatcacttagaagagagaatttactatgtgacacgcgaagagttagcatggaggagcagattgggatgttcatgtatatgatctcccacaatgctagtaaccaaatgctacaaaaggcttttcaacacagtggagagactatccatcgaaaaatattcgaagtttttgagatagttcccatactaactcaatgatttgtgaagcttcctagctcagttcaaactcatgctaggattgcaactgattctaggttcatgccctttttcagaattgccttggtgccattgacgacacacatgtacccatgactaccacagaagacagggcccctccatatagaaatagaaaaggaactctttaacacaatgttatggtagtctgtgacttcgatctcaatttgacatttgtctcatgtggatgggaagggtcggcatcagacgcaggggtgcttcaatctactattagcaaaggatttattgtgccagaaggaaagttttatctggtagatggtggctatgcagatacatcatcatacattgcaccatacagaggagttcaataccatctcagtatgtttaggaggcgtcattcatcacaaagtggttatgcaaactacaaagagttgttcaatcatcgccatgcaattctccgcaaccatatagagagggccattggttttcttaagaaaaggttcccgattctaaaagtagggacattccattccatagaaaatcaaatcaagatcactgctgcagccattgcatttcacaacataattagagggcaaaatggtgatgaaggatggctcgacaaccaaccagcttatatatctccaagtcaatatgttgatgtccctgagggagacaacaattatcccaatgacatagagtcaagtgatggtagtacactaagagatcagatcgcactgcagatgtgggctacctacaatagttgattagcttaagtccacatacaataatgactgttaattcaggaacaatgtttgcagcttgttgtaatgttgtaatgcaactatctgtcttatctacttatacaagtgtgttgtcttatctgtaggtatcctgtaatgttcacaagtcaaaattgttataatacgatgcagtacacttgctatttcttctcttttttggcctttattcaattgtccatagtgtaatgttgtatgctcttttttatattactaatgtctttgaatatttattggaaaatatagccatgtcaaaggaagttgcaagggcggcctggaactcaacatatgagaagggtttattcgatgtactacatgactacaaagataacccaaagttgaagggtcaaaatggatggaattcagagggatggagatgtatcactgctaagtttaatgaaaggttctctttggctcatttcacaaaacaacaactacaagagaaggagaaagaacttaaatcaagctataaagcagtaagagattcaagaaaggaaagtgtgaatggttggaaggactccctatctaggagtacgtcggaacagactctccatccattcaatacaaatccatttgatttggatggacaagagatgacaagtgaagctcaatctatatcagctattcatgaagcaagagagggagaaggtagcaaaagcagaaagcgtaaacagagccatgttggagcagctctcgaagactatgtggagttcaaaaagagccaaactaacaagacacttgatgctcttaaagaactttccatgaggaagtgtatgaaggaaatggaagcaatggctggattcacagatgaggagaagtcatatgctatggaggtctttgagtccgagattaatagaggctttcatgtcaacaatgaaccacaatgttcgtag

SEQ ID NO: 4140 - DNA, 2010 bp, Zea Mays
aacactccctcaacaccagaggctgggcaagtttcctatccagactgcgagcgagggagaggcgacatgagctccatcgtctgtaccgccagcgttcgctccgctatcgtctgctccactgacgtccactgtgccgtccactgcgccaccacttagccgtgagataatgggttcttggaggagcatgttaggcggtttttgttggaggaggaagaagacgatgatgaactattttttgttattctccctgctataatcccatacccctcagaagagaaaaggcccatccacacatcctccctcaccggtgctaaaaaggttaaagaaattcttaaagggcatgagagttggtgcaaatctgagttctgaatggagatggaaatattcaaagccacatcacttagaagagagaatttactatgtgacacgcgaagagttagcatggaggagcagattgggatgttcatgtatatgatctcccacaatgctagtaaccaaatgctacaaaaggcttttcaacacagtggagagactatccatcgaaaaatattcgaagtttttgagatagttcccatactaactcaatgatttgtgaagcttcctagctcagttcaaactcatgctaggattgcaactgattctaggttcatgccctttttcagaattgccttggtgccattgacgacacacatgtacccatgactaccacagaagacagggcccctccatatagaaatagaaaaggaactctttaacacaatgttatggtagtctgtgacttcgatctcaatttgacatttgtctcatgtggatgggaagggtcggcatcagacgcaggggtgcttcaatctactattagcaaaggatttattgtgccagaaggaaagttttatctggtagatggtggctatgcagatacatcatcatacattgcaccatacagaggagttcaataccatctcagtatgtttaggaggcgtcattcatcacaaagtggttatgcaaactacaaagagttgttcaatcatcgccatgcaattctccgcaaccatatagagagggccattggttttcttaagaaaaggttcccgattctaaaagtagggacattccattccatagaaaatcaaatcaagatcactgctgcagccattgcatttcacaacataattagagggcaaaatggtgatgaaggatggctcgacaaccaaccagcttatatatctccaagtcaatatgttgatgtccctgagggagacaacaattatcccaatgacatagagtcaagtgatgccatgtcaaaggaagttgcaagggcggcctggaactcaacatatgagaagggtttattcgatgtactacatgactacaaagataacccaaagttgaagggtcaaaatggatggaattcagagggatggagatgtatcactgctaagtttaatgaaaggttctctttggctcatttcacaaaacaacaactacaagagaaggagaaagaacttaaatcaagctataaagcagtaagagattcaagaaaggaaagtgtgaatggttggaaggactccctatctaggagtacgtcggaacagactctccatccattcaatacaaatccatttgatttggatggacaagagatgacaagtgaagctcaatctatatcagctattcatgaagcaagagagggagaaggtagcaaaagcagaaagcgtaaacagagccatgttggagcagctctcgaagactatgtggagttcaaaaagagccaaactaacaagacacttgatgctcttaaagaactttccatgaggaagtgtatgaaggaaatggaagcaatggctggattcacagatgaggagaagtcatatgctatggaggtctttgagtccgagattaatagaggctttcatgtcaacaatgaaccacaatgttcgtagaatgtggctaaagcgcaaaatcagtcgcttagtaccttgacgacacatgccaagaaaaaataaaaccagg

SEQ ID NO: 4141 - DNA, 912 bp, Zea Mays
ctccctcaacaccagaggctgggcaagtttcctatccagactgcgagcgagggagaggcgacatgagctccatcgtctgtaccgccagcgttcgctccgctatcgtctgctccactgacgtccactgtgccgtccactgcgccaccacttagccgtgagataatgggttcttggaggagcatgttaggcggtttttgttggaggaggaagaagacgatgatgaactattttttgttattctccctgctataatcccatacccctcagaagagaaaaggcccatccacacatcctccctcaccggtgctaaaaagcttcctagctcagttcaaactcatgctaggattgcaactgattctaggttcatgccctttttcagtggttatgcaaactacaaagagttgttcaatcatcgccatgcaattctccgcaaccatatagagagggccattggttttcttaagaaaaggttcccgattctaaaagtagggacattccattccatagaaaatcaaatcaagatcactgctgcagccattgcatttcacaacataattagagggcaaaatggtgatgaaggatggctcgacaaccaaccagcttatatatctccaagtcaatatgttgatgtccctgagggagacaacaattatcccaatgacatagagtcaagtgatggtagtacactaagagatcagatcgcactgcagatgtgggctacctacaatagttgattagcttaagtccacatacaataatgactgttaattcaggaacaatgtttgcagcttgttgtaatgttgtaatgcaactatctgtcttatctacttatacaagtgtgttgtcttatctgtaggtatcctgtaatgttcacaagtcaaaattgttataatacgatgcagtacacttgct

SEQ ID NO: 4142 - DNA, 1640 bp, Zea Mays
gcattatatagcaccaaggaactgcctggaagatttgtataccttcagttacactatttatacaacattcatgttttttgcaaccagaagatgcttcaatatatggcgcctctgtacatagggctacatagttgaattgcacggctattatgtgatatacaatcttaactcagatttaggcatgcggtcactgattccatgtgacacgagcatacaacctgaaaggcagacagcccaggaactgaaacagcacaactacattccccctacggcctatgttgttattgtacattcataatacggactattcctacgacaatgaaacatgtgatttcgggggatgcggagaacaagaaactagggacaaaagaaagaataaaatcactgttagctcccaaagcccactgcaggccagcctctggcatccatttgttgcgccctggccaggtgatgagcaacacctgtgtgtgcttcggctgcaaagaggtcagctaatctgtacagggcgcctcttcccacttctatgatagccgacatctttcgatgacttcagtcacagctgaatgcgtttcccttgtcatcatgttgagctgcagatgaaatgactgcaggagaccaagatggtcaggtaaattacgagcaaaactagctataaggttgtcgcgggaaggaagatcgggaaaacaaccaagacattttttaatctagagcagtcgcatactatgtagacgtagtaaacatgccagaaaacgaacaaatatatacaacgtacataaagaatagggattagcatctatggacatgacaaattactggctcccagaaaaatggtagttcatgtatctctctcgaacgttgcttgagacagtacattcagaaattatggaaacataccacaaatttctctagcactggtacaagaactttcaagttgttgtccggaaggcaactagaaatggctcctcgaaccttcatactgtggcagcaaacatcagttcataagctgacggcagtggggtggggctcacattaaaattataactaattaagaaaagattatgaaataaggcactatgaacctttccgttgaaagaaaggcgagcacaagagctgcataggcctccacaatcatcatttcagcttcgcgttctccttgcaacagagattcttcatcatcctgagaattagaaacaaacatcaaataaatggctcatgagagtcatacgatatgcagaacacagttatacgtttctaggtagcatgtagaaatataaaatacagaaaagctgtaattgcattgccaacccagaactaaaaggtgctaatttaattcagacattttggcaatctttagtgtctataagtaaacatatataattatgttcctggtgctccatctacataactgtcaactgatactctgattatattggaatagcagagagaaattgcaagtgcaatcaagcccttatgtgggttttatcgagttaacaaagcaggtgataaaagtacgaggatgtgttatgactttgcaaagcccccatttacaagatgtatggtgatgaacacaaaatgatgatttaaattctttttatattttgaatttgagtatagaataaatgggatgcaatacacaaact

SEQ ID NO: 4143 - DNA, 533 bp, Zea Mays
atgttttttgcaaccagaagatgcttcaatatatggcgcctctgtacatagggctacatagttgaattgcacggctattatgtgatatacaatcttaactcagatttaggcatgcggtcactgattccatgtgacacgagcatacaacctgaaaggcagacagcccaggaactgaaacagcacaactacattccccctacggcctatgttgttattgtacattcataatacggactattcctacgacaatgaaacatgtgatttcgggggatgcggagaacaagaaactagggacaaaagaaagaataaaatcactgttagctcccaaagcccactgcaggccagcctctggcatccatttgttgcgccctggccaggtgatgagcaacacctgtgtgtgcttcggctgcaaagaggtcagctaatctgtacagggcgcctcttcccacttctatgatagccgacatctttcgatgacttcagtcacagctgaatgcgtttcccttgtcatcatgttgagctgcagatgaaat

SEQ ID NO: 4144 - DNA, 890 bp, Zea Mays
atgccgtcctcctttctgacctcttcttcctcttccgcttcgtcgcacctctcttacctgatccctgctagggcggcgccgccgcctccctttgccatgggatacggtgccaccagtggcggcggcgtggcgaacgccacgagtgccgcggcggcgcctccgcctccgaggcagggagccagcaggaacgcgggcgcggggcacccgccgctgccgcgcccgccgccgcggcagtgcccgcgctgccggtccgccaacaccaagttctgctactacaacaactacagccgcgagcagccacggtacctctgcaaggcgtgccgccgccactggaccgagggcggcacgctccgcgacgtgcccgtcggcggcggccgcaagaacaggcgcggcgccaagggcggcgccgctgcgaaagggtctgcctcggccgcggccgcggctccggcgcagcagggagggaacgtcctcggcgccgacacgttcccaggggacttgctgcggcagctggtgcagttccagccggacgcggccgtgggcgggggcggctacgccatcgacctgagcgcgtggcaccaaatggtcgctgccacggcgccgccgccgccgccgccgggaactggcggcgatgtcagcagtctcggtctcggagcggcgggggcgggagcgggagcggaggccaactgcgtcgcgttgcagtactggagcgaagacggcatgcccggtcttgatggggcctgctaagtgcgtactactactagagctttgttattactattacggtattaccacaggagtatgttccagcctacttatatatgtgtgcgtgtactgcgtgcgaaacatacatactagttagtatatatgatcagcttgttttctctacttcc

SEQ ID NO: 4145 - DNA, 1140 bp, Zea Mays
tgacctcttctctgttctgaccaattctgtccaatcagacctagattaaaaaagtgctaagagttaaagctgctactaaacaatttaagcattttaatttataattgagcaggcagcacactttggattccactggagccgacaccacactaccattccaataattatgtctccaaaaccatgtgcaaatccacaaagcaacatgtaaaatacaaatgttaacgagcagatatcctggcagctaccagaaaacatttttacctagagttgtcttttgtctacagaattcgtttgttaaccttggtggctagtaaatgtgatgaaaccatgaaagaacacatggaccacctccaaaatccagtgaactctggtgctcttgaacttgaacaaaatggctgaataccttactatcttagcagctttaacgagagagggaaaaaaaaaggacaaccaactgtttttttctaatattatgttaagaaagccgctaggattgtcagcatatgttcccaaatgctactgctacaccgcgcatggaacaaccatttcagcttgaacaaataattatgatgggcgacattgggcagccattgatccaacacgctttcctacacaaacagctcttgactttatggtagcccaacatggacagctaagattccattccaatcgctaaactctcacgactctgctaaaaaaatgagaacgcaatatggatcgagatgcctccggcggtggggcccgcgcgtcagcctgacgcgggaagtcaaggtggcgactggcgagctgagaaagggaagagtttgggggaggtcgggaggacaggagaatattgggatcggcgaggaagaattagtggtaccaggaggagatgaagaggacgagcgcgcaggccctggcgccgccgggccgcagcacggacccgcagcagaagcagcgactggcggcggcggccaccgcctgtcccacgaacaccagcgcgagcgcggcgccgcccagcgccgtggcggcgtccgtgcggtacacgcagtaggtccactcctgcctctcgtccgtctccagcctcgcctgtggaaccgggacggcaaacagggagaagagtggtggcggcgcccgcgtcagagaacgggagaaagaaaa

SEQ ID NO: 4146 - DNA, 3856 bp, Zea Mays
ccctccgccgcctcctcccctctctagggttttacccttcccgcccgaaacaagggccgccgctgccgcacaggaacccgttctgggatctcagccatctctccggccatgggcaaggctaataagtctccgtcgccggcggtggccaaggaaggcgactactcggcgttgcgggagctgttccggccgcacgtggaatcctttgattacttcctcgataaggggctcgacgagatgattgaatccatccgccccatgggtcatgtgctctcgccgatgaggggtgcccggccaggtgtactacccatctacccccaggagcagtgcagacaagcaagaatttcatatcacggggaattcaaagttgaggtctgcttccagtataatgaaggggcacaaatcaggcataccttcaattttggccatttgcctattatgttgatgtcaaaactgtgtcatctgaggggtgctgatccccataaattagttttccatggtgaagaggcaactgagatgggggggtacttcatatgtggtgggatggagagacttgtgcgtattcttgttttacaaaagcgtaactatcccatgggattggtacgcaattcttttcttaaacgtggtgctggatacactgacaaagcagtggtcataagatgtgtccaacgtgaccagtccagtgtgacaataaagttgtattacatcctaaatggaagtgcaaggcttggattttggttgggtggcagagagtttctgcttcctgttgggattgttctcaaggcccttattgatgcaagtgaccgggaaatctttacaagcttgacttgctgctacagtgataaacatggaagaggaaagggagttgtcagtactcaactaattggtgaaagggcacaaatagttcttgacgaagtcagaaatctgtccattctgactcgcacacagtgtttggtgcatattgggcaatacttccgatctgtgatggaaggatttgaaaatgatgactatataactgttgctgaagcggttctaaaggactatatttttgtgcacttggaaaataaccatgataaatttaatctattgatatttatgctgcagaaactttatgctctggtagatcaaactgcttcacctgacaatcccgacgcgctacaataccaggaggctctattgcctgggcacttattcacagtttttctgaaggataggcttcaggagtggctaagaaagtctaagcgtttaatccttgaagaggctgcaaagaacaaaggttttgaccttggtaatgcgctggagataaggaaatttcttactaaatatacaacatctgtcggaagagctgttgagagtatgataaaggttgggaacgtgaattcacgatcaggattggatcttccacagagagaagggatgaccattcatgctgaacggctcaactttcatcgttatatctcacacttccgttctgttcataggggctctgcttttgctaaaatgcgtacaacatctgttagaaagttactcccggaatcatggggtttcctgtgtccagttcatacacctgacggagagccttgtggtttactgaatcacatgacttctacatgccgtgtttcatcattctacaactcagaaggggtgataaaaaattttggggaaatgaagaagttgctttctgctgagttggttcgtgttggaatgaacccagtgttaccgaagattgagcaaaccggtcccccagaagtactccatgtccatttggatgggtgcattcttgattcctgaagatctggaagttggttatgtcccacctagttttaatggagcttttcctggcctgtacctttttaccaatccggctagatttgtccgacctgtcagaaatctttttattctatctgatggaaagcaaagtattgagctcattgggccattcgaacaggcatttatggagatacggtgtcctgatggtggggatggtgggagacaagaaccatttcctgcaactcatgaagagatccaccctacagctattctcagtgtagttgccaatctgacaccttggtctgatcacaaccaaagtcctaggaacatgtaccaatgccagatggcaaagcagaccatgggtttttgcggacaggccctaaaattccgtactgatgtaaaagcattccatctacagacccctcagacaccaattgttcggacaggtacatataccaaatattgtatggatgaatttccatctggaacgaatgctattgttgcagtgctatcatacacaggttatgacatggaggatgccatgattttgaacaaatcagctgttgagcgtggtatgttccgtggacatatttaccagactgaatgcattgacttatcaacaaaaagcagagataatgttccagaaacttttgcaaagagtatattaacaagggatacaagtaatgtgattgattcagatggccttcctcggcttggacaggctgtacatccaaacgagcaatactatagcgtccataatagccttacaaatgtgataaggcctgtcaaactaaaaggcacagagccagcatttattgactatgttgctgtcaacgggacaggttcaaaatgtggcctgcagaaggcgaacattcgtctgcgtcgtgtaagaaaccctataatcggtgacaagttcagcagtcgacatgggcagaagggtgtttgctctcagttgtggcctgacattgacatgccattctctgcaaatactggcatgagaccagatctgatcattaatcctcatgcatttccttcaagaatgacaatagcaatgcttttagagtctatggcagctaaggctggaagtctacatggaaagttcattgatgcaacaccttttgcaaactcactcaaaaaggacaaggactccgacaagcctaattcgattgtggacgaattgggtcccatgcttgcatcttatgggtttaattatcatggaaacgaagtcctttatagtggagtttttggcactgagatggactgtgagattttcatcggacctgtttattaccaacgtcttcgtcatatggtctcagacaaattccaggtccgcactaccggtcgtatagaccagataacaagacaacccataggaggaaggaagcatggtggagggatccgatttggtgagatggagcgtgatgccctcctcgcccatggttcgtcctacctcttgcatgacaggctccactcctgctcggattaccacatcgcagatgtgtgctccttctgtgggagcctgctgactgcgacaatgatcaaatccgatacccagaagaaagtcaagcacgagatgcttgggctccccactgtgagaccagcgaagaactttgcatgccaggcctgcaaaacaagcaaggggatggagaccgtggcaatgccgtatgtgttcaggtacctggctgctgagttggctgccatgaacataaagctggagctccggttgagcaacaaatcaggattgcctctcagctaagaatcataacaccagaattagcgcttgttcatcgcgggggctgcttcgcaggagaagcttaaatgtaaccattggtccggcgtgtagttgtttcatatgtcggtgtgatgtaccaatgtaacttgtaagaaaaacataaatgacaacacgagttattatagtttgaatggcggttctttttcattgtcatgtcttaactagtgtttgaatataccagaactgagcttagttagctgttaaaattagggagtgtttggtttttagagactattttttagttcctccattttattctattttagttattaaattgtcaaatatagtaactaaata

SEQ ID NO: 4147 - DNA, 3948 bp, Zea Mays
tttacccttcccgcccgaaacaagggccgccgctgccgcacaggaacccgttctgggatctcagccatctctccggccatgggcaaggctaataagtctccgtcgccggcggtggccaaggaaggcgactactcggcgttgcgggagctgttccggccgcacgtggaatcctttgattacttcctcgataaggggctcgacgagatgattgaatccatccgccccatggtgatcagggaccccaactccagcaacacactaaaaataatcctggaaaagggtcatgtgctctcgccgatgaggggtgcccggccaggtgtactacccatctacccccaggagtgcagacaagcaagaatttcatatcacggggaattcaaagttgaggtctgcttccagtataatgaaggggcacaaatcaggcataccttcaattttggccatttgcctattatgttgatgtcaaaactgtgtcatctgaggggtgctgatccccataaattagttttccatggtgaagaggcaactgagatgggggggtacttcatatgtggtgggatggagagacttgtgcgtattcttgttttacaaaagcgtaactatcccatgggattggtacgcaattcttttcttaaacgtggtgctggatacactgacaaagcagtggtcataagatgtgtccaacgtgaccagtccagtgtgacaataaagttgtattacatcctaaatggaagtgcaaggcttggattttggttgggtggcagagagtttctgcttcctgttgggattgttctcaaggcccttattgatgcaagtgaccgggaaatctttacaagcttgacttgctgctacagtgataaacatggaagaggaaagggagttgtcagtactcaactaattggtgaaagggcacaaatagttcttgacgaagtcagaaatctgtccattctgactcgcacacagtgtttggtgcatattgggcaatacttccgatctgtgatggaaggatttgaaaatgatgactatataactgttgctgaagcggttctaaaggactatatttttgtgcacttggaaaataaccatgataaatttaatctattgatatttatgctgcagaaactttatgctctggtagatcaaactgcttcacctgacaatcccgacgcgctacaataccaggaggctctattgcctgggcacttattcacagtttttctgaaggataggcttcaggagtggctaagaaagtctaagcgtttaatccttgaagaggctgcaaagaacaaaggttttgaccttggtaatgcgctggagataaggaaatttcttactaaatatacaacatctgtcggaagagctgttgagagtatgataaaggttgggaacgtgaattcacgatcaggattggatcttccacagagagaagggatgaccattcatgctgaacggctcaactttcatcgttatatctcacacttccgttctgttcataggggctctgcttttgctaaaatgcgtacaacatctgttagaaagttactcccggaatcatggggtttcctgtgtccagttcatacacctgacggagagccttgtggtttactgaatcacatgacttctacatgccgtgtttcatcattctacaactcagaaggggtgataaaaaattttggggaaatgaagaagttgctttctgctgagttggttcgtgttggaatgaacccagtgttaccgaagattgagcaaaccggtcccccagaagtactccatgtccatttggatgggtgcattcttggtactattgcttctgctatgattgagaaagcagttaattatcttcgtacattgaaacttctggcacactcagggattcctgaagatctggaagttggttatgtcccacctagttttaatggagcttttcctggcctgtacctttttaccaatccggctagatttgtccgacctgtcagaaatctttttattctatctgatggaaagcaaagtattgagctcattgggccattcgaacaggcatttatggagatacggtgtcctgatggtggggatggtgggagacaagaaccatttcctgcaactcatgaagagatccaccctacagctattctcagtgtagttgccaatctgacaccttggtctgatcacaaccaaagtcctaggaacatgtaccaatgccagatggcaaagcagaccatgggtttttgcggacaggccctaaaattccgtactgatgtaaaagcattccatctacagacccctcagacaccaattgttcggacaggtacatataccaaatattgtatggatgaatttccatctggaacgaatgctattgttgcagtgctatcatacacaggttatgacatggaggatgccatgattttgaacaaatcagctgttgagcgtggtatgttccgtggacatatttaccagactgaatgcattgacttatcaacaaaaagcagagataatgttccagaaacttttgcaaagagtatattaacaagggatacaagtaatgtgattgattcagatggccttcctcggcttggacaggctgtacatccaaacgagcaatactatagcgtccataatagccttacaaatgtgataaggcctgtcaaactaaaaggcacagagccagcatttattgactatgttgctgtcaacgggacaggttcaaaatgtggcctgcagaaggcgaacattcgtctgcgtcgtgtaagaaaccctataatcggtgacaagttcagcagtcgacatgggcagaagggtgtttgctctcagttgtggcctgacattgacatgccattctctgcaaatactggcatgagaccagatctgatcattaatcctcatgcatttccttcaagaatgacaatagcaatgcttttagagtctatggcagctaaggctggaagtctacatggaaagttcattgatgcaacaccttttgcaaactcactcaaaaaggacaaggactccgacaagcctaattcgattgtggacgaattgggtcccatgcttgcatcttatgggtttaattatcatggaaacgaagtcctttatagtggagtttttggcactgagatggactgtgagattttcatcggacctgtttattaccaacgtcttcgtcatatggtctcagacaaattccaggtccgcactaccggtcgtatagaccagataacaagacaacccataggaggaaggaagcatggtggagggatccgatttggtgagatggagcgtgatgccctcctcgcccatggttcgtcctacctcttgcatgacaggctccactcctgctcggattaccacatcgcagatgtgtgctccttctgtgggagcctgctgactgcgacaatgatcaaatccgatacccagaagaaagtcaagcacgagatgcttgggctccccactgtgagaccagcgaagaactttgcatgccaggcctgcaaaacaagcaaggggatggagaccgtggcaatgccgtatgtgttcaggtacctggctgctgagttggctgccatgaacataaagctggagctccggttgagcaacaaatcaggattgcctctcagctaagaatcataacaccagaattagcgcttgttcatcgcgggggctgcttcgcaggagaagcttaaatgtaaccattggtccggcgtgtagttgtttcatatgtcggtgtgatgtaccaatgtaacttgtaagaaaaacataaatgacaacacgagttattatagtttgaatggcggttctttttcattgtcatgtcttaactagtgtttgaatataccagaactgagcttagttagctgttaaaattagggagtgtttggtttttagagactattttttagttcctccattttattctattttagttattaaattgtcaaatatagtaactaaata

SEQ ID NO: 4148 - DNA, 3849 bp, Zea Mays
tttacccttcccgcccgaaacaagggccgccgctgccgcacaggaacccgttctgggatctcagccatctctccggccatgggcaaggctaataagtctccgtcgccggcggtggccaaggaaggcgactactcggcgttgcgggagctgttccggccgcacgtggaatcctttgattacttcctcgataaggggctcgacgagatgattgaatccatccgccccatggtgatcagggaccccaactccagcaacacactaaaaataatcctggaaaagggtcatgtgctctcgccgatgaggggtgcccggccaggtgtactacccatctacccccaggagcagtgcagacaagcaagaatttcatatcacggggaattcaaagttgaggtctgcttccagtataatgaaggggcacaaatcaggcataccttcaattttggccatttgcctattatgttgatgtcaaaactgtgtcatctgaggggtgctgatccccataaattagttttccatggtgaagaggcaactgagatgggggggtacttcatatgtggtgggatggagagacttgtgcgtattcttgttttacaaaagcgtaactatcccatgggattggtacgcaattcttttcttaaacgtggtgctggatacactgacaaagcagtggtcataagatgtgtccaacgtgaccagtccagtgtgacaataaagttgtattacatcctaaatggaagtgcaaggcttggattttggttgggtggcagagagtttctgcttcctgttgggattgttctcaaggcccttattgatgcaagtgaccgggaaatctttacaagcttgacttgctgctacagtgataaacatggaagaggaaagggagttgtcagtactcaactaattggtgaaagggcacaaatagttcttgacgaagttgctgaagcggttctaaaggactatatttttgtgcacttggaaaataaccatgataaatttaatctattgatatttatgctgcagaaactttatgctctggtagatcaaactgcttcacctgacaatcccgacgcgctacaataccaggaggctctattgcctgggcacttattcacagtttttctgaaggataggcttcaggagtggctaagaaagtctaagcgtttaatccttgaagaggctgcaaagaacaaaggttttgaccttggtaatgcgctggagataaggaaatttcttactaaatatacaacatctgtcggaagagctgttgagagtatgataaaggttgggaacgtgaattcacgatcaggattggatcttccacagagagaagggatgaccattcatgctgaacggctcaactttcatcgttatatctcacacttccgttctgttcataggggctctgcttttgctaaaatgcgtacaacatctgttagaaagttactcccggaatcatggggtttcctgtgtccagttcatacacctgacggagagccttgtggtttactgaatcacatgacttctacatgccgtgtttcatcattctacaactcagaaggggtgataaaaaattttggggaaatgaagaagttgctttctgctgagttggttcgtgttggaatgaacccagtgttaccgaagattgagcaaaccggtcccccagaagtactccatgtccatttggatgggtgcattcttggtactattgcttctgctatgattgagaaagcagttaattatcttcgtacattgaaacttctggcacactcagggattcctgaagatctggaagttggttatgtcccacctagttttaatggagcttttcctggcctgtacctttttaccaatccggctagatttgtccgacctgtcagaaatctttttattctatctgatggaaagcaaagtattgagctcattgggccattcgaacaggcatttatggagatacggtgtcctgatggtggggatggtgggagacaagaaccatttcctgcaactcatgaagagatccaccctacagctattctcagtgtagttgccaatctgacaccttggtctgatcacaaccaaagtcctaggaacatgtaccaatgccagatggcaaagcagaccatgggtttttgcggacaggccctaaaattccgtactgatgtaaaagcattccatctacagacccctcagacaccaattgttcggacaggtacatataccaaatattgtatggatgaatttccatctggaacgaatgctattgttgcagtgctatcatacacaggttatgacatggaggatgccatgattttgaacaaatcagctgttgagcgtggtatgttccgtggacatatttaccagactgaatgcattgacttatcaacaaaaagcagagataatgttccagaaacttttgcaaagagtatattaacaagggatacaagtaatgtgattgattcagatggccttcctcggcttggacaggctgtacatccaaacgagcaatactatagcgtccataatagccttacaaatgtgataaggcctgtcaaactaaaaggcacagagccagcatttattgactatgttgctgtcaacgggacaggttcaaaatgtggcctgcagaaggcgaacattcgtctgcgtcgtgtaagaaaccctataatcggtgacaagttcagcagtcgacatgggcagaagggtgtttgctctcagttgtggcctgacattgacatgccattctctgcaaatactggcatgagaccagatctgatcattaatcctcatgcatttccttcaagaatgacaatagcaatgcttttagagtctatggcagctaaggctggaagtctacatggaaagttcattgatgcaacaccttttgcaaactcactcaaaaaggacaaggactccgacaagcctaattcgattgtggacgaattgggtcccatgcttgcatcttatgggtttaattatcatggaaacgaagtcctttatagtggagtttttggcactgagatggactgtgagattttcatcggacctgtttattaccaacgtcttcgtcatatggtctcagacaaattccaggtccgcactaccggtcgtatagaccagataacaagacaacccataggaggaaggaagcatggtggagggatccgatttggtgagatggagcgtgatgccctcctcgcccatggttcgtcctacctcttgcatgacaggctccactcctgctcggattaccacatcgcagatgtgtgctccttctgtgggagcctgctgactgcgacaatgatcaaatccgatacccagaagaaagtcaagcacgagatgcttgggctccccactgtgagaccagcgaagaactttgcatgccaggcctgcaaaacaagcaaggggatggagaccgtggcaatgccgtatgtgttcaggtacctggctgctgagttggctgccatgaacataaagctggagctccggttgagcaacaaatcaggattgcctctcagctaagaatcataacaccagaattagcgcttgttcatcgcgggggctgcttcgcaggagaagcttaaatgtaaccattggtccggcgtgtagttgtttcatatgtcggtgtgatgtaccaatgtaacttgtaagaaaaacataaatgacaacacgagttattatagtttgaatggcggttctttttcattgtcatgtcttaactagtgtttgaatataccagaactgagcttagttagctgttaaaattagggagtgtttggtttttagagactattttttagttcctccattttattctattttagttattaaattgtcaaatatagtaactaaata

SEQ ID NO: 4149 - DNA, 3943 bp, Zea Mays
tttacccttcccgcccgaaacaagggccgccgctgccgcacaggaacccgttctgggatctcagccatctctccggccatgggcaaggctaataagtctccgtcgccggcggtggccaaggaaggcgactactcggcgttgcgggagctgttccggccgcacgtggaatcctttgattacttcctcgataaggggctcgacgagatgattgaatccatccgccccatggtgatcagggaccccaactccagcaacacactaaaaataatcctggaaaagggtcatgtgctctcgccgatgaggggtgcccggccaggtgtactacccatctacccccaggagacaagcaagaatttcatatcacggggaattcaaagttgaggtctgcttccagtataatgaaggggcacaaatcaggcataccttcaattttggccatttgcctattatgttgatgtcaaaactgtgtcatctgaggggtgctgatccccataaattagttttccatggtgaagaggcaactgagatgggggggtacttcatatgtggtgggatggagagacttgtgcgtattcttgttttacaaaagcgtaactatcccatgggattggtacgcaattcttttcttaaacgtggtgctggatacactgacaaagcagtggtcataagatgtgtccaacgtgaccagtccagtgtgacaataaagttgtattacatcctaaatggaagtgcaaggcttggattttggttgggtggcagagagtttctgcttcctgttgggattgttctcaaggcccttattgatgcaagtgaccgggaaatctttacaagcttgacttgctgctacagtgataaacatggaagaggaaagggagttgtcagtactcaactaattggtgaaagggcacaaatagttcttgacgaagtcagaaatctgtccattctgactcgcacacagtgtttggtgcatattgggcaatacttccgatctgtgatggaaggatttgaaaatgatgactatataactgttgctgaagcggttctaaaggactatatttttgtgcacttggaaaataaccatgataaatttaatctattgatatttatgctgcagaaactttatgctctggtagatcaaactgcttcacctgacaatcccgacgcgctacaataccaggaggctctattgcctgggcacttattcacagtttttctgaaggataggcttcaggagtggctaagaaagtctaagcgtttaatccttgaagaggctgcaaagaacaaaggttttgaccttggtaatgcgctggagataaggaaatttcttactaaatatacaacatctgtcggaagagctgttgagagtatgataaaggttgggaacgtgaattcacgatcaggattggatcttccacagagagaagggatgaccattcatgctgaacggctcaactttcatcgttatatctcacacttccgttctgttcataggggctctgcttttgctaaaatgcgtacaacatctgttagaaagttactcccggaatcatggggtttcctgtgtccagttcatacacctgacggagagccttgtggtttactgaatcacatgacttctacatgccgtgtttcatcattctacaactcagaaggggtgataaaaaattttggggaaatgaagaagttgctttctgctgagttggttcgtgttggaatgaacccagtgttaccgaagattgagcaaaccggtcccccagaagtactccatgtccatttggatgggtgcattcttggtactattgcttctgctatgattgagaaagcagttaattatcttcgtacattgaaacttctggcacactcagggattcctgaagatctggaagttggttatgtcccacctagttttaatggagcttttcctggcctgtacctttttaccaatccggctagatttgtccgacctgtcagaaatctttttattctatctgatggaaagcaaagtattgagctcattgggccattcgaacaggcatttatggagatacggtgtcctgatggtggggatggtgggagacaagaaccatttcctgcaactcatgaagagatccaccctacagctattctcagtgtagttgccaatctgacaccttggtctgatcacaaccaaagtcctaggaacatgtaccaatgccagatggcaaagcagaccatgggtttttgcggacaggccctaaaattccgtactgatgtaaaagcattccatctacagacccctcagacaccaattgttcggacaggtacatataccaaatattgtatggatgaatttccatctggaacgaatgctattgttgcagtgctatcatacacaggttatgacatggaggatgccatgattttgaacaaatcagctgttgagcgtggtatgttccgtggacatatttaccagactgaatgcattgacttatcaacaaaaagcagagataatgttccagaaacttttgcaaagagtatattaacaagggatacaagtaatgtgattgattcagatggccttcctcggcttggacaggctgtacatccaaacgagcaatactatagcgtccataatagccttacaaatgtgataaggcctgtcaaactaaaaggcacagagccagcatttattgactatgttgctgtcaacgggacaggttcaaaatgtggcctgcagaaggcgaacattcgtctgcgtcgtgtaagaaaccctataatcggtgacaagttcagcagtcgacatgggcagaagggtgtttgctctcagttgtggcctgacattgacatgccattctctgcaaatactggcatgagaccagatctgatcattaatcctcatgcatttccttcaagaatgacaatagcaatgcttttagagtctatggcagctaaggctggaagtctacatggaaagttcattgatgcaacaccttttgcaaactcactcaaaaaggacaaggactccgacaagcctaattcgattgtggacgaattgggtcccatgcttgcatcttatgggtttaattatcatggaaacgaagtcctttatagtggagtttttggcactgagatggactgtgagattttcatcggacctgtttattaccaacgtcttcgtcatatggtctcagacaaattccaggtccgcactaccggtcgtatagaccagataacaagacaacccataggaggaaggaagcatggtggagggatccgatttggtgagatggagcgtgatgccctcctcgcccatggttcgtcctacctcttgcatgacaggctccactcctgctcggattaccacatcgcagatgtgtgctccttctgtgggagcctgctgactgcgacaatgatcaaatccgatacccagaagaaagtcaagcacgagatgcttgggctccccactgtgagaccagcgaagaactttgcatgccaggcctgcaaaacaagcaaggggatggagaccgtggcaatgccgtatgtgttcaggtacctggctgctgagttggctgccatgaacataaagctggagctccggttgagcaacaaatcaggattgcctctcagctaagaatcataacaccagaattagcgcttgttcatcgcgggggctgcttcgcaggagaagcttaaatgtaaccattggtccggcgtgtagttgtttcatatgtcggtgtgatgtaccaatgtaacttgtaagaaaaacataaatgacaacacgagttattatagtttgaatggcggttctttttcattgtcatgtcttaactagtgtttgaatataccagaactgagcttagttagctgttaaaattagggagtgtttggtttttagagactattttttagttcctccattttattctattttagttattaaattgtcaaatatagtaactaaata

SEQ ID NO: 4150 - DNA, 3945 bp, Zea Mays
cttcccgcccgaaacaagggccgccgctgccgcacaggaacccgttctgggatctcagccatctctccggccatgggcaaggctaataagtctccgtcgccggcggtggccaaggaaggcgactactcggcgttgcgggagctgttccggccgcacgtggaatcctttgattacttcctcgataaggggctcgacgagatgattgaatccatccgccccatggtgatcagggaccccaactccagcaacacactaaaaataatcctggaaaagggtcatgtgctctcgccgatgaggggtgcccggccaggtgtactacccatctacccccaggagcagtgcagacaagcaagaatttcatatcacggggaattcaaagttgaggtctgcttccagtataatgaaggggcacaaatcaggcataccttcaattttggccatttgcctattatgttgatgtcaaaactgtgtcatctgaggggtgctgatccccataaattagttttccatggtgaagaggcaactgagatgggggggtacttcatatgtggtgggatggagagacttgtgcgtattcttgttttacaaaagcgtaactatcccatgggattggtacgcaattcttttcttaaacgtggtgctggatacactgacaaagcagtggtcataagatgtgtccaacgtgaccagtccagtgtgacaataaagttgtattacatcctaaatggaagtgcaaggcttggattttggttgggtggcagagagtttctgcttcctgttgggattgttctcaaggcccttattgatgcaagtgaccgggaaatctttacaagcttgacttgctgctacagtgataaacatggaagaggaaagggagttgtcagtactcaactaattggtgaaagggcacaaatagttcttgacgaagtcagaaatctgtccattctgactcgcacacagtgtttggtgcatattgggcaatacttccgatctgtgatggaaggatttgaaaatgatgactatataactgttgctgaagcggttctaaaggactatatttttgtgcacttggaaaataaccatgataaatttaatctattgatatttatgctgcagaaactttatgctctggtagatcaaactgcttcacctgacaatcccgacgcgctacaataccaggaggctctattgcctgggcacttattcacagtttttctgaaggataggcttcaggagtggctaagaaagtctaagcgtttaatccttgaagaggctgcaaagaacaaaggttttgaccttggtaatgcgctggagataaggaaatttcttactaaatatacaacatctgtcggaagagctgttgagagtatgataaaggttgggaacgtgaattcacgatcaggattggatcttccacagagagaagggatgaccattcatgctgaacggctcaactttcatcgttatatctcacacttccgttctgttcataggggctctgcttttgctaaaatgcgtacaacatctgttagaaagttactcccggaatcatggggtttcctgtgtccagttcatacacctgacggagagccttgtggtttactgaatcacatgacttctacatgccgtgtttcatcattctacaactcagaaggggtgataaaaaattttggggaaatgaagaagttgctttctgctgagttggttcgtgttggaatgaacccagtgttaccgaagattgagcaaaccggtcccccagaagtactccatgtccatttggatgggtgcattcttggtactattgcttctgctatgattgagaaagcagttaattatcttcgtacattgaaacttctggcacactcagggattcctgaagatctggaagttggttatgtcccacctagttttaatggagcttttcctggcctgtacctttttaccaatccggctagatttgtccgacctgtcagaaatctttttattctatctgatggaaagcaaagtattgagctcattgggccattcgaacaggcatttatggagatacggtgtcctgatggtggggatggtgggagacaagaaccatttcctgcaactcatgaagagatccaccctacagctattctcagtgtagttgccaatctgacaccttggtctgatcacaaccaaagtcctaggaacatgtaccaatgccagatggcaaagcagaccatgggtttttgcggacaggccctaaaattccgtactgatgtaaaagcattccatctacagacccctcagacaccaattgttcggacaggtacatataccaaatattgtatggatgaatttccatctggaacgaatgctattgttgcagtgctatcatacacaggttatgacatggaggatgccatgattttgaacaaatcagctgttgagcgtggtatgttccgtggacatatttaccagactgaatgcattgacttatcaacaaaaagcagagataatgttccagaaacttttgcaaagagtatattaacaagggatacaagtaatgtgattgattcagatggccttcctcggcttggacaggctgtacatccaaacgagcaatactatagcgtccataatagccttacaaatgtgataaggcctgtcaaactaaaaggcacagagccagcatttattgactatgttgctgtcaacgggacaggttcaaaatgtggcctgcagaaggcgaacattcgtctgcgtcgtgtaagaaaccctataatcggtgacaagttcagcagtcgacatgggcagaagggtgtttgctctcagttgtggcctgacattgacatgccattctctgcaaatactggcatgagaccagatctgatcattaatcctcatgcatttccttcaagaatgacaatagcaatgcttttagagtctatggcagctaaggctggaagtctacatggaaagttcattgatgcaacaccttttgcaaactcactcaaaaaggacaaggactccgacaagcctaattcgattgtggacgaattgggtcccatgcttgcatcttatgggtttaattatcatggaaacgaagtcctttatagtggagtttttggcactgagatggactgtgagattttcatcggacctgtttattaccaacgtcttcgtcatatggtctcagacaaattccaggtccgcactaccggtcgtatagaccagataacaagacaacccataggaggaaggaagcatggtggagggatccgatttggtgagatggagcgtgatgccctcctcgcccatggttcgtcctacctcttgcatgacaggctccactcctgctcggattaccacatcgcagatgtgtgctccttctgtgggagcctgctgactgcgacaatgatcaaatccgatacccagaagaaagtcaagcacgagatgcttgggctccccactgtgagaccagcgaagaactttgcatgccaggcctgcaaaacaagcaaggggatggagaccgtggcaatgccgtatgtgttcaggtacctggctgctgagttggctgccatgaacataaagctggagctccggttgagcaacaaatcaggattgcctctcagctaagaatcataacaccagaattagcgcttgttcatcgcgggggctgcttcgcaggagaagcttaaatgtaaccattggtccggcgtgtagttgtttcatatgtcggtgtgatgtaccaatgtaacttgtaagaaaaacataaatgacaacacgagttattatagtttgaatggcggttctttttcattgtcatgtcttaactagtgtttgaatataccagaactgagcttagttagctgttaaaattagggagtgtttggtttttagagactattttttagttcctccattttattctattttagttattaaattgtcaaatatagtaactaaata

SEQ ID NO: 4151 - DNA, 3760 bp, Zea Mays
gcccgaaacaagggccgccgctgccgcacaggaacccgttctgggatctcagccatctctccggccatgggcaaggctaataagtctccgtcgccggcggtggccaaggaaggcgactactcggcgttgcgggagctgttccggccgcacgtggaatcctttgattacttcctcgataaggggctcgacgagatgattgaatccatccgccccatggtgatcagggaccccaactccagcaacacactaaaaataatcctggaaaagggtcatgtgctctcgccgatgaggggtgcccggccaggtgtactacccatctacccccaggagtgcagacaagcaagaatttcatatcacggggaattcaaagttgaggtctgcttccagtataatgaaggggcacaaatcaggcataccttcaattttggccatttgcctattatgttgatgtcaaaactgtgtcatctgaggggtgctgatccccataaattagttttccatggtgaagaggcaactgagatgggggggtacttcatatgtggtgggatggagagacttgtgcgtattcttgttttacaaaagcgtaactatcccatgggattggtacgcaattcttttcttaaacgtggtgctggatacactgacaaagcagtggtcataagatgtgtccaacgtgaccagtccagtgtgacaataaagttgtattacatcctaaatggaagtgcaaggcttggattttggttgggtggcagagagtttctgcttcctgttgggattgttctcaaggcccttattgatgcaagtgaccgggaaatctttacaagcttgacttgctgctacagtgataaacatggaagaggaaagggagttgtcagtactcaactaattggtgaaagggcacaaatagttcttgacgaagttgctgaagcggttctaaaggactatatttttgtgcacttggaaaataaccatgataaatttaatctattgatatttatgctgcagaaactttatgctctggtagatcaaactgcttcacctgacaatcccgacgcgctacaataccaggaggctctattgcctgggcacttattcacagtttttctgaaggataggcttcaggagtggctaagaaagtctaagcgtttaatccttgaagaggctgcaaagaacaaaggttttgaccttggtaatgcgctggagataaggaaatttcttactaaatatacaacatctgtcggaagagctgttgagagtatgataaaggttgggaacgtgaattcacgatcaggattggatcttccacagagagaagggatgaccattcatgctgaacggctcaactttcatcgttatatctcacacttccgttctgttcataggggctctgcttttgctaaaatgcgtacaacatctgttagaaagttactcccggaatcatggggtttcctgtgtccagttcatacacctgacggagagccttgtggtttactgaatcacatgacttctacatgccgtgtttcatcattctacaactcagaaggggtgataaaaaattttggggaaatgaagaagttgctttctgctgagttggttcgtgttggaatgaacccagtgttaccgaagattgagcaaaccggtcccccagaagtactccatgtccatttggatgggtgcattcttgattcctgaagatctggaagttggttatgtcccacctagttttaatggagcttttcctggcctgtacctttttaccaatccggctagatttgtccgacctgtcagaaatctttttattctatctgatggaaagcaaagtattgagctcattgggccattcgaacaggcatttatggagatacggtgtcctgatggtggggatggtgggagacaagaaccatttcctgcaactcatgaagagatccaccctacagctattctcagtgtagttgccaatctgacaccttggtctgatcacaaccaaagtcctaggaacatgtaccaatgccagatggcaaagcagaccatgggtttttgcggacaggccctaaaattccgtactgatgtaaaagcattccatctacagacccctcagacaccaattgttcggacaggtacatataccaaatattgtatggatgaatttccatctggaacgaatgctattgttgcagtgctatcatacacaggttatgacatggaggatgccatgattttgaacaaatcagctgttgagcgtggtatgttccgtggacatatttaccagactgaatgcattgacttatcaacaaaaagcagagataatgttccagaaacttttgcaaagagtatattaacaagggatacaagtaatgtgattgattcagatggccttcctcggcttggacaggctgtacatccaaacgagcaatactatagcgtccataatagccttacaaatgtgataaggcctgtcaaactaaaaggcacagagccagcatttattgactatgttgctgtcaacgggacaggttcaaaatgtggcctgcagaaggcgaacattcgtctgcgtcgtgtaagaaaccctataatcggtgacaagttcagcagtcgacatgggcagaagggtgtttgctctcagttgtggcctgacattgacatgccattctctgcaaatactggcatgagaccagatctgatcattaatcctcatgcatttccttcaagaatgacaatagcaatgcttttagagtctatggcagctaaggctggaagtctacatggaaagttcattgatgcaacaccttttgcaaactcactcaaaaaggacaaggactccgacaagcctaattcgattgtggacgaattgggtcccatgcttgcatcttatgggtttaattatcatggaaacgaagtcctttatagtggagtttttggcactgagatggactgtgagattttcatcggacctgtttattaccaacgtcttcgtcatatggtctcagacaaattccaggtccgcactaccggtcgtatagaccagataacaagacaacccataggaggaaggaagcatggtggagggatccgatttggtgagatggagcgtgatgccctcctcgcccatggttcgtcctacctcttgcatgacaggctccactcctgctcggattaccacatcgcagatgtgtgctccttctgtgggagcctgctgactgcgacaatgatcaaatccgatacccagaagaaagtcaagcacgagatgcttgggctccccactgtgagaccagcgaagaactttgcatgccaggcctgcaaaacaagcaaggggatggagaccgtggcaatgccgtatgtgttcaggtacctggctgctgagttggctgccatgaacataaagctggagctccggttgagcaacaaatcaggattgcctctcagctaagaatcataacaccagaattagcgcttgttcatcgcgggggctgcttcgcaggagaagcttaaatgtaaccattggtccggcgtgtagttgtttcatatgtcggtgtgatgtaccaatgtaacttgtaagaaaaacataaatgacaacacgagttattatagtttgaatggcggttctttttcattgtcatgtcttaactagtgtttgaatataccagaactgagcttagttagctgttaaaattagggagtgtttggtttttagagactattttttagttcctccattttattctattttagttattaaattgtcaaatatagtaactaaata

SEQ ID NO: 4152 - DNA, 3856 bp, Zea Mays
cccgaaacaagggccgccgctgccgcacaggaacccgttctgggatctcagccatctctccggccatgggcaaggctaataagtctccgtcgccggcggtggccaaggaaggcgactactcggcgttgcgggagctgttccggccgcacgtggaatcctttgattacttcctcgataaggggctcgacgagatgattgaatccatccgccccatggtgatcagggaccccaactccagcaacacactaaaaataatcctggaaaagggtcatgtgctctcgccgatgaggggtgcccggccaggtgtactacccatctacccccaggagacaagcaagaatttcatatcacggggaattcaaagttgaggtctgcttccagtataatgaaggggcacaaatcaggcataccttcaattttggccatttgcctattatgttgatgtcaaaactgtgtcatctgaggggtgctgatccccataaattagttttccatggtgaagaggcaactgagatgggggggtacttcatatgtggtgggatggagagacttgtgcgtattcttgttttacaaaagcgtaactatcccatgggattggtacgcaattcttttcttaaacgtggtgctggatacactgacaaagcagtggtcataagatgtgtccaacgtgaccagtccagtgtgacaataaagttgtattacatcctaaatggaagtgcaaggcttggattttggttgggtggcagagagtttctgcttcctgttgggattgttctcaaggcccttattgatgcaagtgaccgggaaatctttacaagcttgacttgctgctacagtgataaacatggaagaggaaagggagttgtcagtactcaactaattggtgaaagggcacaaatagttcttgacgaagtcagaaatctgtccattctgactcgcacacagtgtttggtgcatattgggcaatacttccgatctgtgatggaaggatttgaaaatgatgactatataactgttgctgaagcggttctaaaggactatatttttgtgcacttggaaaataaccatgataaatttaatctattgatatttatgctgcagaaactttatgctctggtagatcaaactgcttcacctgacaatcccgacgcgctacaataccaggaggctctattgcctgggcacttattcacagtttttctgaaggataggcttcaggagtggctaagaaagtctaagcgtttaatccttgaagaggctgcaaagaacaaaggttttgaccttggtaatgcgctggagataaggaaatttcttactaaatatacaacatctgtcggaagagctgttgagagtatgataaaggttgggaacgtgaattcacgatcaggattggatcttccacagagagaagggatgaccattcatgctgaacggctcaactttcatcgttatatctcacacttccgttctgttcataggggctctgcttttgctaaaatgcgtacaacatctgttagaaagttactcccggaatcatggggtttcctgtgtccagttcatacacctgacggagagccttgtggtttactgaatcacatgacttctacatgccgtgtttcatcattctacaactcagaaggggtgataaaaaattttggggaaatgaagaagttgctttctgctgagttggttcgtgttggaatgaacccagtgttaccgaagattgagcaaaccggtcccccagaagtactccatgtccatttggatgggtgcattcttgattcctgaagatctggaagttggttatgtcccacctagttttaatggagcttttcctggcctgtacctttttaccaatccggctagatttgtccgacctgtcagaaatctttttattctatctgatggaaagcaaagtattgagctcattgggccattcgaacaggcatttatggagatacggtgtcctgatggtggggatggtgggagacaagaaccatttcctgcaactcatgaagagatccaccctacagctattctcagtgtagttgccaatctgacaccttggtctgatcacaaccaaagtcctaggaacatgtaccaatgccagatggcaaagcagaccatgggtttttgcggacaggccctaaaattccgtactgatgtaaaagcattccatctacagacccctcagacaccaattgttcggacaggtacatataccaaatattgtatggatgaatttccatctggaacgaatgctattgttgcagtgctatcatacacaggttatgacatggaggatgccatgattttgaacaaatcagctgttgagcgtggtatgttccgtggacatatttaccagactgaatgcattgacttatcaacaaaaagcagagataatgttccagaaacttttgcaaagagtatattaacaagggatacaagtaatgtgattgattcagatggccttcctcggcttggacaggctgtacatccaaacgagcaatactatagcgtccataatagccttacaaatgtgataaggcctgtcaaactaaaaggcacagagccagcatttattgactatgttgctgtcaacgggacaggttcaaaatgtggcctgcagaaggcgaacattcgtctgcgtcgtgtaagaaaccctataatcggtgacaagttcagcagtcgacatgggcagaagggtgtttgctctcagttgtggcctgacattgacatgccattctctgcaaatactggcatgagaccagatctgatcattaatcctcatgcatttccttcaagaatgacaatagcaatgcttttagagtctatggcagctaaggctggaagtctacatggaaagttcattgatgcaacaccttttgcaaactcactcaaaaaggacaaggactccgacaagcctaattcgattgtggacgaattgggtcccatgcttgcatcttatgggtttaattatcatggaaacgaagtcctttatagtggagtttttggcactgagatggactgtgagattttcatcggacctgtttattaccaacgtcttcgtcatatggtctcagacaaattccaggtccgcactaccggtcgtatagaccagataacaagacaacccataggaggaaggaagcatggtggagggatccgatttggtgagatggagcgtgatgccctcctcgcccatggttcgtcctacctcttgcatgacaggctccactcctgctcggattaccacatcgcagatgtgtgctccttctgtgggagcctgctgactgcgacaatgatcaaatccgatacccagaagaaagtcaagcacgagatgcttgggctccccactgtgagaccagcgaagaactttgcatgccaggcctgcaaaacaagcaaggggatggagaccgtggcaatgccgtatgtgttcaggtacctggctgctgagttggctgccatgaacataaagctggagctccggttgagcaacaaatcaggattgcctctcagctaagaatcataacaccagaattagcgcttgttcatcgcgggggctgcttcgcaggagaagcttaaatgtaaccattggtccggcgtgtagttgtttcatatgtcggtgtgatgtaccaatgtaacttgtaagaaaaacataaatgacaacacgagttattatagtttgaatggcggttctttttcattgtcatgtcttaactagtgtttgaatataccagaactgagcttagttagctgttaaaattagggagtgtttggtttttagagactattttttagttcctccattttattctattttagttattaaattgtcaaatatagtaactaaata

SEQ ID NO: 4153 - DNA, 3859 bp, Zea Mays
cgaaacaagggccgccgctgccgcacaggaacccgttctgggatctcagccatctctccggccatgggcaaggctaataagtctccgtcgccggcggtggccaaggaaggcgactactcggcgttgcgggagctgttccggccgcacgtggaatcctttgattacttcctcgataaggggctcgacgagatgattgaatccatccgccccatggtgatcagggaccccaactccagcaacacactaaaaataatcctggaaaagggtcatgtgctctcgccgatgaggggtgcccggccaggtgtactacccatctacccccaggagtgcagacaagcaagaatttcatatcacggggaattcaaagttgaggtctgcttccagtataatgaaggggcacaaatcaggcataccttcaattttggccatttgcctattatgttgatgtcaaaactgtgtcatctgaggggtgctgatccccataaattagttttccatggtgaagaggcaactgagatgggggggtacttcatatgtggtgggatggagagacttgtgcgtattcttgttttacaaaagcgtaactatcccatgggattggtacgcaattcttttcttaaacgtggtgctggatacactgacaaagcagtggtcataagatgtgtccaacgtgaccagtccagtgtgacaataaagttgtattacatcctaaatggaagtgcaaggcttggattttggttgggtggcagagagtttctgcttcctgttgggattgttctcaaggcccttattgatgcaagtgaccgggaaatctttacaagcttgacttgctgctacagtgataaacatggaagaggaaagggagttgtcagtactcaactaattggtgaaagggcacaaatagttcttgacgaagtcagaaatctgtccattctgactcgcacacagtgtttggtgcatattgggcaatacttccgatctgtgatggaaggatttgaaaatgatgactatataactgttgctgaagcggttctaaaggactatatttttgtgcacttggaaaataaccatgataaatttaatctattgatatttatgctgcagaaactttatgctctggtagatcaaactgcttcacctgacaatcccgacgcgctacaataccaggaggctctattgcctgggcacttattcacagtttttctgaaggataggcttcaggagtggctaagaaagtctaagcgtttaatccttgaagaggctgcaaagaacaaaggttttgaccttggtaatgcgctggagataaggaaatttcttactaaatatacaacatctgtcggaagagctgttgagagtatgataaaggttgggaacgtgaattcacgatcaggattggatcttccacagagagaagggatgaccattcatgctgaacggctcaactttcatcgttatatctcacacttccgttctgttcataggggctctgcttttgctaaaatgcgtacaacatctgttagaaagttactcccggaatcatggggtttcctgtgtccagttcatacacctgacggagagccttgtggtttactgaatcacatgacttctacatgccgtgtttcatcattctacaactcagaaggggtgataaaaaattttggggaaatgaagaagttgctttctgctgagttggttcgtgttggaatgaacccagtgttaccgaagattgagcaaaccggtcccccagaagtactccatgtccatttggatgggtgcattcttgattcctgaagatctggaagttggttatgtcccacctagttttaatggagcttttcctggcctgtacctttttaccaatccggctagatttgtccgacctgtcagaaatctttttattctatctgatggaaagcaaagtattgagctcattgggccattcgaacaggcatttatggagatacggtgtcctgatggtggggatggtgggagacaagaaccatttcctgcaactcatgaagagatccaccctacagctattctcagtgtagttgccaatctgacaccttggtctgatcacaaccaaagtcctaggaacatgtaccaatgccagatggcaaagcagaccatgggtttttgcggacaggccctaaaattccgtactgatgtaaaagcattccatctacagacccctcagacaccaattgttcggacaggtacatataccaaatattgtatggatgaatttccatctggaacgaatgctattgttgcagtgctatcatacacaggttatgacatggaggatgccatgattttgaacaaatcagctgttgagcgtggtatgttccgtggacatatttaccagactgaatgcattgacttatcaacaaaaagcagagataatgttccagaaacttttgcaaagagtatattaacaagggatacaagtaatgtgattgattcagatggccttcctcggcttggacaggctgtacatccaaacgagcaatactatagcgtccataatagccttacaaatgtgataaggcctgtcaaactaaaaggcacagagccagcatttattgactatgttgctgtcaacgggacaggttcaaaatgtggcctgcagaaggcgaacattcgtctgcgtcgtgtaagaaaccctataatcggtgacaagttcagcagtcgacatgggcagaagggtgtttgctctcagttgtggcctgacattgacatgccattctctgcaaatactggcatgagaccagatctgatcattaatcctcatgcatttccttcaagaatgacaatagcaatgcttttagagtctatggcagctaaggctggaagtctacatggaaagttcattgatgcaacaccttttgcaaactcactcaaaaaggacaaggactccgacaagcctaattcgattgtggacgaattgggtcccatgcttgcatcttatgggtttaattatcatggaaacgaagtcctttatagtggagtttttggcactgagatggactgtgagattttcatcggacctgtttattaccaacgtcttcgtcatatggtctcagacaaattccaggtccgcactaccggtcgtatagaccagataacaagacaacccataggaggaaggaagcatggtggagggatccgatttggtgagatggagcgtgatgccctcctcgcccatggttcgtcctacctcttgcatgacaggctccactcctgctcggattaccacatcgcagatgtgtgctccttctgtgggagcctgctgactgcgacaatgatcaaatccgatacccagaagaaagtcaagcacgagatgcttgggctccccactgtgagaccagcgaagaactttgcatgccaggcctgcaaaacaagcaaggggatggagaccgtggcaatgccgtatgtgttcaggtacctggctgctgagttggctgccatgaacataaagctggagctccggttgagcaacaaatcaggattgcctctcagctaagaatcataacaccagaattagcgcttgttcatcgcgggggctgcttcgcaggagaagcttaaatgtaaccattggtccggcgtgtagttgtttcatatgtcggtgtgatgtaccaatgtaacttgtaagaaaaacataaatgacaacacgagttattatagtttgaatggcggttctttttcattgtcatgtcttaactagtgtttgaatataccagaactgagcttagttagctgttaaaattagggagtgtttggtttttagagactattttttagttcctccattttattctattttagttattaaattgtcaaatatagtaactaaata

SEQ ID NO: 4154 - DNA, 3892 bp, Zea Mays
gaaacaagggccgccgctgccgcacaggaacccgttctgggatctcagccatctctccggccatgggcaaggctaataagtctccgtcgccggcggtggccaaggaaggcgactactcggcgttgcgggagctgttccggccgcacgtggaatcctttgattacttcctcgataaggggctcgacgagatgattgaatccatccgccccatggtgatcagggaccccaactccagcaacacactaaaaataatcctggaaaagggtcatgtgctctcgccgatgaggggtgcccggccaggtgtactacccatctacccccaggagtgcagacaagcaagaatttcatatcacggggaattcaaagttgaggtctgcttccagtataatgaaggggcacaaatcagtcaaaactgtgtcatctgaggggtgctgatccccataaattagttttccatggtgaagaggcaactgagatgggggggtacttcatatgtggtgggatggagagacttgtgcgtattcttgttttacaaaagcgtaactatcccatgggattggtacgcaattcttttcttaaacgtggtgctggatacactgacaaagcagtggtcataagatgtgtccaacgtgaccagtccagtgtgacaataaagttgtattacatcctaaatggaagtgcaaggcttggattttggttgggtggcagagagtttctgcttcctgttgggattgttctcaaggcccttattgatgcaagtgaccgggaaatctttacaagcttgacttgctgctacagtgataaacatggaagaggaaagggagttgtcagtactcaactaattggtgaaagggcacaaatagttcttgacgaagtcagaaatctgtccattctgactcgcacacagtgtttggtgcatattgggcaatacttccgatctgtgatggaaggatttgaaaatgatgactatataactgttgctgaagcggttctaaaggactatatttttgtgcacttggaaaataaccatgataaatttaatctattgatatttatgctgcagaaactttatgctctggtagatcaaactgcttcacctgacaatcccgacgcgctacaataccaggaggctctattgcctgggcacttattcacagtttttctgaaggataggcttcaggagtggctaagaaagtctaagcgtttaatccttgaagaggctgcaaagaacaaaggttttgaccttggtaatgcgctggagataaggaaatttcttactaaatatacaacatctgtcggaagagctgttgagagtatgataaaggttgggaacgtgaattcacgatcaggattggatcttccacagagagaagggatgaccattcatgctgaacggctcaactttcatcgttatatctcacacttccgttctgttcataggggctctgcttttgctaaaatgcgtacaacatctgttagaaagttactcccggaatcatggggtttcctgtgtccagttcatacacctgacggagagccttgtggtttactgaatcacatgacttctacatgccgtgtttcatcattctacaactcagaaggggtgataaaaaattttggggaaatgaagaagttgctttctgctgagttggttcgtgttggaatgaacccagtgttaccgaagattgagcaaaccggtcccccagaagtactccatgtccatttggatgggtgcattcttggtactattgcttctgctatgattgagaaagcagttaattatcttcgtacattgaaacttctggcacactcagggattcctgaagatctggaagttggttatgtcccacctagttttaatggagcttttcctggcctgtacctttttaccaatccggctagatttgtccgacctgtcagaaatctttttattctatctgatggaaagcaaagtattgagctcattgggccattcgaacaggcatttatggagatacggtgtcctgatggtggggatggtgggagacaagaaccatttcctgcaactcatgaagagatccaccctacagctattctcagtgtagttgccaatctgacaccttggtctgatcacaaccaaagtcctaggaacatgtaccaatgccagatggcaaagcagaccatgggtttttgcggacaggccctaaaattccgtactgatgtaaaagcattccatctacagacccctcagacaccaattgttcggacaggtacatataccaaatattgtatggatgaatttccatctggaacgaatgctattgttgcagtgctatcatacacaggttatgacatggaggatgccatgattttgaacaaatcagctgttgagcgtggtatgttccgtggacatatttaccagactgaatgcattgacttatcaacaaaaagcagagataatgttccagaaacttttgcaaagagtatattaacaagggatacaagtaatgtgattgattcagatggccttcctcggcttggacaggctgtacatccaaacgagcaatactatagcgtccataatagccttacaaatgtgataaggcctgtcaaactaaaaggcacagagccagcatttattgactatgttgctgtcaacgggacaggttcaaaatgtggcctgcagaaggcgaacattcgtctgcgtcgtgtaagaaaccctataatcggtgacaagttcagcagtcgacatgggcagaagggtgtttgctctcagttgtggcctgacattgacatgccattctctgcaaatactggcatgagaccagatctgatcattaatcctcatgcatttccttcaagaatgacaatagcaatgcttttagagtctatggcagctaaggctggaagtctacatggaaagttcattgatgcaacaccttttgcaaactcactcaaaaaggacaaggactccgacaagcctaattcgattgtggacgaattgggtcccatgcttgcatcttatgggtttaattatcatggaaacgaagtcctttatagtggagtttttggcactgagatggactgtgagattttcatcggacctgtttattaccaacgtcttcgtcatatggtctcagacaaattccaggtccgcactaccggtcgtatagaccagataacaagacaacccataggaggaaggaagcatggtggagggatccgatttggtgagatggagcgtgatgccctcctcgcccatggttcgtcctacctcttgcatgacaggctccactcctgctcggattaccacatcgcagatgtgtgctccttctgtgggagcctgctgactgcgacaatgatcaaatccgatacccagaagaaagtcaagcacgagatgcttgggctccccactgtgagaccagcgaagaactttgcatgccaggcctgcaaaacaagcaaggggatggagaccgtggcaatgccgtatgtgttcaggtacctggctgctgagttggctgccatgaacataaagctggagctccggttgagcaacaaatcaggattgcctctcagctaagaatcataacaccagaattagcgcttgttcatcgcgggggctgcttcgcaggagaagcttaaatgtaaccattggtccggcgtgtagttgtttcatatgtcggtgtgatgtaccaatgtaacttgtaagaaaaacataaatgacaacacgagttattatagtttgaatggcggttctttttcattgtcatgtcttaactagtgtttgaatataccagaactgagcttagttagctgttaaaattagggagtgtttggtttttagagactattttttagttcctccattttattctattttagttattaaattgtcaaatatagtaactaaata

SEQ ID NO: 4155 - DNA, 3720 bp, Zea Mays
atgggcaaggctaataagtctccgtcgccggcggtggccaaggaaggcgactactcggcgttgcgggagctgttccggccgcacgtggaatcctttgattacttcctcgataaggggctcgacgagatgattgaatccatccgccccatgggtcatgtgctctcgccgatgaggggtgcccggccaggtgtactacccatctacccccaggagcagtgcagacaagcaagaatttcatatcacggggaattcaaagttgaggtctgcttccagtataatgaaggggcacaaatcaggcataccttcaattttggccatttgcctattatgttgatgtcaaaactgtgtcatctgaggggtgctgatccccataaattagttttccatggtgaagaggcaactgagatgggggggtacttcatatgtggtgggatggagagacttgtgcgtattcttgttttacaaaagcgtaactatcccatgggattggtacgcaattcttttcttaaacgtggtgctggatacactgacaaagcagtggtcataagatgtgtccaacgtgaccagtccagtgtgacaataaagttgtattacatcctaaatggaagtgcaaggcttggattttggttgggtggcagagagtttctgcttcctgttgggattgttctcaaggcccttattgatgcaagtgaccgggaaatctttacaagcttgacttgctgctacagtgataaacatggaagaggaaagggagttgtcagtactcaactaattggtgaaagggcacaaatagttcttgacgaagtcagaaatctgtccattctgactcgcacacagtgtttggtgcatattgggcaatacttccgatctgtgatggaaggatttgaaaatgatgactatataactgttgctgaagcggttctaaaggactatatttttgtgcacttggaaaataaccatgataaatttaatctattgatatttatgctgcagaaactttatgctctggtagatcaaactgcttcacctgacaatcccgacgcgctacaataccaggaggctctattgcctgggcacttattcacagtttttctgaaggataggcttcaggagtggctaagaaagtctaagcgtttaatccttgaagaggctgcaaagaacaaaggttttgaccttggtaatgcgctggagataaggaaatttcttactaaatatacaacatctgtcggaagagctgttgagagtatgataaaggttgggaacgtgaattcacgatcaggattggatcttccacagagagaagggatgaccattcatgctgaacggctcaactttcatcgttatatctcacacttccgttctgttcataggggctctgcttttgctaaaatgcgtacaacatctgttagaaagttactcccggaatcatggggtttcctgtgtccagttcatacacctgacggagagccttgtggtttactgaatcacatgacttctacatgccgtgtttcatcattctacaactcagaaggggtgataaaaaattttggggaaatgaagaagttgctttctgctgagttggttcgtgttggaatgaacccagtgttaccgaagattgagcaaaccggtcccccagaagtactccatgtccatttggatgggtgcattcttgattcctgaagatctggaagttggttatgtcccacctagttttaatggagcttttcctggcctgtacctttttaccaatccggctagatttgtccgacctgtcagaaatctttttattctatctgatggaaagcaaagtattgagctcattgggccattcgaacaggcatttatggagatacggtgtcctgatggtggggatggtgggagacaagaaccatttcctgcaactcatgaagagatccaccctacagctattctcagtgtagttgccaatctgacaccttggtctgatcacaaccaaagtcctaggaacatgtaccaatgccagatggcaaagcagaccatgggtttttgcggacaggccctaaaattccgtactgatgtaaaagcattccatctacaggtacatataccaaatattgtatggatgaatttccatctggaacgaatgctattgttgcagtgctatcatacacaggttatgacatggaggatgccatgattttgaacaaatcagctgttgagcgtggtatgttccgtggacatatttaccagactgaatgcattgacttatcaacaaaaagcagagataatgttccagaaacttttgcaaagagtatattaacaagggatacaagtaatgtgattgattcagatggccttcctcggcttggacaggctgtacatccaaacgagcaatactatagcgtccataatagccttacaaatgtgataaggcctgtcaaactaaaaggcacagagccagcatttattgactatgttgctgtcaacgggacaggttcaaaatgtggcctgcagaaggcgaacattcgtctgcgtcgtgtaagaaaccctataatcggtgacaagttcagcagtcgacatgggcagaagggtgtttgctctcagttgtggcctgacattgacatgccattctctgcaaatactggcatgagaccagatctgatcattaatcctcatgcatttccttcaagaatgacaatagcaatgcttttagagtctatggcagctaaggctggaagtctacatggaaagttcattgatgcaacaccttttgcaaactcactcaaaaaggacaaggactccgacaagcctaattcgattgtggacgaattgggtcccatgcttgcatcttatgggtttaattatcatggaaacgaagtcctttatagtggagtttttggcactgagatggactgtgagattttcatcggacctgtttattaccaacgtcttcgtcatatggtctcagacaaattccaggtccgcactaccggtcgtatagaccagataacaagacaacccataggaggaaggaagcatggtggagggatccgatttggtgagatggagcgtgatgccctcctcgcccatggttcgtcctacctcttgcatgacaggctccactcctgctcggattaccacatcgcagatgtgtgctccttctgtgggagcctgctgactgcgacaatgatcaaatccgatacccagaagaaagtcaagcacgagatgcttgggctccccactgtgagaccagcgaagaactttgcatgccaggcctgcaaaacaagcaaggggatggagaccgtggcaatgccgtatgtgttcaggtacctggctgctgagttggctgccatgaacataaagctggagctccggttgagcaacaaatcaggattgcctctcagctaagaatcataacaccagaattagcgcttgttcatcgcgggggctgcttcgcaggagaagcttaaatgtaaccattggtccggcgtgtagttgtttcatatgtcggtgtgatgtaccaatgtaacttgtaagaaaaacataaatgacaacacgagttattatagtttgaatggcggttctttttcattgtcatgtcttaactagtgtttgaatataccagaactgagcttagttagctgttaaaattagggagtgtttggtttttagagactattttttagttcctccattttattctattttagttattaaattgtcaaatatagtaactaaata

SEQ ID NO: 4156 - DNA, 3441 bp, Zea Mays
ctcaaccctgccgcaccagccaagcaccaaaggtacttcatatgtggtgggatggagagacttgtgcgtattcttgttttacaaaagcgtaactatcccatgggattggtacgcaattcttttcttaaacgtggtgctggatacactgacaaagcagtggtcataagatgtgtccaacgtgaccagtccagtgtgacaataaagttgtattacatcctaaatggaagtgcaaggcttggattttggttgggtggcagagagtttctgcttcctgttgggattgttctcaaggcccttattgatgcaagtgaccgggaaatctttacaagcttgacttgctgctacagtgataaacatggaagaggaaagggagttgtcagtactcaactaattggtgaaagggcacaaatagttcttgacgaagtcagaaatctgtccattctgactcgcacacagtgtttggtgcatattgggcaatacttccgatctgtgatggaaggatttgaaaatgatgactatataactgttgctgaagcggttctaaaggactatatttttgtgcacttggaaaataaccatgataaatttaatctattgatatttatgctgcagaaactttatgctctggtagatcaaactgcttcacctgacaatcccgacgcgctacaataccaggaggctctattgcctgggcacttattcacagtttttctgaaggataggcttcaggagtggctaagaaagtctaagcgtttaatccttgaagaggctgcaaagaacaaaggttttgaccttggtaatgcgctggagataaggaaatttcttactaaatatacaacatctgtcggaagagctgttgagagtatgataaaggttgggaacgtgaattcacgatcaggattggatcttccacagagagaagggatgaccattcatgctgaacggctcaactttcatcgttatatctcacacttccgttctgttcataggggctctgcttttgctaaaatgcgtacaacatctgttagaaagttactcccggaatcatggggtttcctgtgtccagttcatacacctgacggagagccttgtggtttactgaatcacatgacttctacatgccgtgtttcatcattctacaactcagaaggggtgataaaaaattttggggaaatgaagaagttgctttctgctgagttggttcgtgttggaatgaacccagtgttaccgaagattgagcaaaccggtcccccagaagtactccatgtccatttggatgggtgcattcttggtactattgcttctgctatgattgagaaagcagttaattatcttcgtacattgaaacttctggcacactcagggattcctgaagatctggaagttggttatgtcccacctagttttaatggagcttttcctggcctgtacctttttaccaatccggctagatttgtccgacctgtcagaaatctttttattctatctgatggaaagcaaagtattgagctcattgggccattcgaacaggcatttatggagatacggtgtcctgatggtggggatggtgggagacaagaaccatttcctgcaactcatgaagagatccaccctacagctattctcagtgtagttgccaatctgacaccttggtctgatcacaaccaaagtcctaggaacatgtaccaatgccagatggcaaagcagaccatgggtttttgcggacaggccctaaaattccgtactgatgtaaaagcattccatctacagacccctcagacaccaattgttcggacaggtacatataccaaatattgtatggatgaatttccatctggaacgaatgctattgttgcagtgctatcatacacaggttatgacatggaggatgccatgattttgaacaaatcagctgttgagcgtggtatgttccgtggacatatttaccagactgaatgcattgacttatcaacaaaaagcagagataatgttccagaaacttttgcaaagagtatattaacaagggatacaagtaatgtgattgattcagatggccttcctcggcttggacaggctgtacatccaaacgagcaatactatagcgtccataatagccttacaaatgtgataaggcctgtcaaactaaaaggcacagagccagcatttattgactatgttgctgtcaacgggacaggttcaaaatgtggcctgcagaaggcgaacattcgtctgcgtcgtgtaagaaaccctataatcggtgacaagttcagcagtcgacatgggcagaagggtgtttgctctcagttgtggcctgacattgacatgccattctctgcaaatactggcatgagaccagatctgatcattaatcctcatgcatttccttcaagaatgacaatagcaatgcttttagagtctatggcagctaaggctggaagtctacatggaaagttcattgatgcaacaccttttgcaaactcactcaaaaaggacaaggactccgacaagcctaattcgattgtggacgaattgggtcccatgcttgcatcttatgggtttaattatcatggaaacgaagtcctttatagtggagtttttggcactgagatggactgtgagattttcatcggacctgtttattaccaacgtcttcgtcatatggtctcagacaaattccaggtccgcactaccggtcgtatagaccagataacaagacaacccataggaggaaggaagcatggtggagggatccgatttggtgagatggagcgtgatgccctcctcgcccatggttcgtcctacctcttgcatgacaggctccactcctgctcggattaccacatcgcagatgtgtgctccttctgtgggagcctgctgactgcgacaatgatcaaatccgatacccagaagaaagtcaagcacgagatgcttgggctccccactgtgagaccagcgaagaactttgcatgccaggcctgcaaaacaagcaaggggatggagaccgtggcaatgccgtatgtgttcaggtacctggctgctgagttggctgccatgaacataaagctggagctccggttgagcaacaaatcaggattgcctctcagctaagaatcataacaccagaattagcgcttgttcatcgcgggggctgcttcgcaggagaagcttaaatgtaaccattggtccggcgtgtagttgtttcatatgtcggtgtgatgtaccaatgtaacttgtaagaaaaacataaatgacaacacgagttattatagtttgaatggcggttctttttcattgtcatgtcttaactagtgtttgaatataccagaactgagcttagttagctgttaaaattagggagtgtttggtttttagagactattttttagttcctccattttattctattttagttattaaattgtcaaatatagtaactaaata

SEQ ID NO: 4157 - DNA, 938 bp, Zea Mays
gatccccagcacgggaattgaatttccatgtcccatcttcttcgtacacttgatcagtagtagcctcagcatactggcaatgaaaggtttgtgggtgggatttagaggaaacaatgcactactttacagaagggaaaatcctctctcgttgagatgctcttttcgctccttgaaagcaagaaataaccgttcatcagctgtggcacctaaggactactgtgaaacttacatccaattcttgagagataaatggatagttcctgattcagatcctccaggccctaaagatgtggacctattgtatcagtttatagataagagtaaaaggctcatggtagtaactggggcaggaatgagcactgaatttgggattcctgattacaggagtcctaatggtgcatacagtacacgttttaaaccactttctcatcaggtgtgcccagcattgcttatcaaatgatgtctcttgctgtttttgatacacatttcttccattatggtgctatttttaaaagggacgctggcatcttttacaaaaatttcaaatttgtatcctaaagataacaaggtttttgttctgtttatctgcatacattgtctttgtgtgaggactcataaaaagaggctacttgtgttacaatcagctatattacataagaagttaactctgtctcttcacctttgttcagctgtataactatctggagcattgaatccaagctaaaaaatgatatttttttattctcgagctaacattttacctacagaaatcattcaaaagtatgatcatcaatgatgtttggtctatgtaggcctcatcattcttctttcttgctctgttactgtaagttgttttgtgaattgtggcattcttttataattttactttatgatttttgcaaattcggttctggttattactgattagttaaaccaac

SEQ ID NO: 4158 - DNA, 646 bp, Zea Mays
gtataacacatattttgtatataatttatcgtagtatattggtattatatattcccgttgcaacgcatctgcgcgaagctagtaagaaaaaaaactataacaaaaatatatatgataaaaaaaactaaaaaaatggcgtgagaaacaagaggccgggagcgacgccggaagccaggactcgctgtgcagtgcttccttcctcaacgttccttctcccttcaccatcccactccacctaacaattgggagaagttttagcccagctaagcggctgtggatgggaggatcctaagagcaccctggaaatccaaaaccatctcgtctccgcagcgggagcccaggcttcgtatgacagcggccattgccgatggccactacgcgcgcctacaagcttcaggagtttgtcgcgcacactttgaatgtcaattgtgccaagtttgggaggcgagcatcaaggatcctcatcactggtggggaggatttgaaggtcaatctttgggctatagggaaacccggtgccctcctggtgtttttcattgtacattgcagagtctatcaggctttacaagtccagttgagtcagtaagctttgactcttctgaagttacgataggtgctggtgcagcaagtggaacgataaaaatat

SEQ ID NO: 4159 - DNA, 2498 bp, Zea Mays
gacaatttgcacaatgtgcagttgttcgaactttcactggacacagatcaagctgtgcatctcttgatttccatccttttggagaattcttagccactgggtcttcagatacaaacatgaaaatatgggatactcgaaagaagagatgcatccacacatacaagggtcatacccaacgaattaatgtgcttaaatttactcctgatggccgatggattgtttctggtctgggatttgacggctggaaaactcatgcatgatttttgtcttcatgaaggtccagtcaactgcttagatgttcacccctatgagtttttattggctacaggttcagttgataagactgttaaattttgggaccttgaaacttttgagttgatcggttcttctggacccgagaacaaccgagaatactttgagctggctagtgcaatccgttctatgaagttcaacagtgatggtaaaacaattttttgtggattgcatgaaagcttaaaggctctttcctgggaacccaccatatgtcatgatgtgattgatgtaggctggtccacattagcagatctaactgttgacgaagggaaacttcttggctgctcatataaccaaaattgtgtcggtgtgtgggttgtggatttgatgagaaatgagccttatgttgatagtagtgctggatcacacttaaatggaagtataaataggccaattcaatcagatgatagcatgtcatcagtgtttgggaggctatcgatttccagaagcccagccaatgaaattggatcggatactctgcttggatgctcaatgtctggttcaaaagaaagtcctgtctcaacttctgcatcaatgaggggattgtcaaagccacctggaaaaggggacctccggctctcaagatctatttctacacctcttctttctcctagagttagattgaacccaaatttcattgacagacagaagaatcaggcagctactgctgtaccattaccagaaccaatagtccgctttaaagcgaatctctcttcagatgctggaatgttgtctcgcaagtcacatgcatcagcagctcccatgtatagatcaaggtccaatagttctcggtatggtattatggaatcatcttccatacctgttctggccttgaggcatagctctagaaaggatgctggtcccgttcacagtgaagctgccacaggtgagttagcagatattgagcctcaaaatatagaaaaggaaggtttagttgccaatcatggcaaagaagatggcaagttggtacctgtaattgcttcaaggagctcaaagatagtcgaagaagttggctatagaagaatcaccaatgatgtaggatgtaagagagtaaccctagaaagtggtttgagagttaattcagatatggactatagaagcagagctccagaaagccacgaggtgcagcagcttatacatctgtcagaacctgctggtttacatgggaaatttataagagaatcttcagggtatctggttttgataaatggaaccctgctgctgcaaggaatccagaatttgccagcatccacagaaatgaagtgattggaataagacagttgatggagtcaagtggaaagtatgttgttgacgatcgaccttcctcttctaattacgataacatccagtatgtgacaacactatacagctcggtggtttaccgttgctggcaaagaaatgatataaaaggatctattgatgctacatggagaatgttggattttgctgtcactaatgatattgttaatgctctaatggagaataggaactgtatcacattagatgtttgcgcttctctcttacgtcttaccaccagtcttcttgaaagcacatatgacaggcatatgagcattgccttgaggatgattctcagtttcgtgaagagctttggtcccacaatttcttcagccttgttggctataccacctgttggggtagaccttgaagcagagcagaggatggagtggtgcaatctatgtttccaagaactgaagaatgtgagcgtcagcctcaagtttctgacaaggcggcaaggcgaggttgggagattagctcaggagctcagcctttttcttcaggatctctttcaattgtcaagcgtgtaaacagtgaccataccacgacgtgcaaaatattcacgcactcaatttcctttggtcataacagatatagcgacatatagtaggatttacctctagaaagaaagaaatatacagaaactatagggtgaagcttacagggtattttctccgagctagtttgggagcatcatttttttcatagaattcctatttttctaaggtctcgtttgtttcctttcattttaaggaattagaatcttactaatataatatgctattttttttagaatatgacatttcactacttttcaaagttatcatataagcttatcttaaattcatggggtgagagatgaaaattgattttataaatttatgttattt

SEQ ID NO: 4160 - DNA, 2637 bp, Zea Mays
gacaatttgcacaatgtgcagttgttcgaactttcactggacacagatcaagctgtgcatctcttgatttccatccttttggagaattcttagccactgggtcttcagatacaaacatgaaaatatgggatactcgaaagaagagatgcatccacacatacaagggtcatacccaacgaattaatgtgcttaaatttactcctgatggccgatggattgtttctggtctgggatttgacggctggaaaactcatgcatgatttttgtcttcatgaaggtccagtcaactgcttagatgttcacccctatgagtttttattggctacaggttcagttgataagactgttaaattttgggaccttgaaacttttgagttgatcggttcttctggacccgagaacaaccgagaatactttgagctggctagtgcaatccgttctatgaagttcaacagtgatggtaaaacaattttttgtggattgcatgaaagcttaaaggctctttcctgggaacccaccatatgtcatgatgtgattgatgtaggctggtccacattagcagatctaactgttgacgaagggaaacttcttggctgctcatataaccaaaattgtgtcggtgtgtgggttgtggatttgatgagaaatgagccttatgttgatagtagtgctggatcacacttaaatggaagtataaataggccaattcaatcagatgatagcatgtcatcagtgtttgggaggctatcgatttccagaagcccagccaatgaaattggatcggatactctgcttggatgctcaatgtctggttcaaaagaaagtcctgtctcaacttctgcatcaatgaggggattgtcaaagccacctggaaaaggggacctccggctctcaagatctatttctacacctcttctttctcctagagttagattgaacccaaatttcattgacagacagaagaatcaggcagctactgctgtaccattaccagaaccaatagtccgctttaaagcgaatctctcttcagatgctggaatgttgtctcgcaagtcacatgcatcagcagctcccatgtatagatcaaggtccaatagttctcggtatggtattatggaatcatcttccatacctgttctggccttgaggcatagctctagaaaggatgctggtcccgttcacagtgaagctgccacaggtgagttagcagatattgagcctcaaaatatagaaaaggaaggtttagttgccaatcatggcaaagaagatggcaagttggtacctgtaattgcttcaaggagctcaaagatagtcgaagaagttggctatagaagaatcaccaatgatgtaggatgtaagagagtaaccctagaaagtggtttgagagttaattcagatatggactatagaagcagagctccagaaagccacgaggtgcagcagcttatacatctgtcagaacctgctggtttacatgggaaatttataagagaatcttcagggtatctggttttgataaatggaaccctgctgctgcaaggaatccagaatttgccagcatccacagaaatgaagtgattggaataagacagttgatggagtcaagtggaaagtatgttgttgacgatcgaccttcctcttctaattacgataacatccagtatgtgacaacactatacagctcgaggctgcatccttcactttctggaaaacttagtgcatctgcaagttatgaagatgatatttctggtctagtggaaaaccatcaagaattcattcatgtaatgaaatctcgactaacaaaactagaggtgatatctgcaggtggtttaccgttgctggcaaagaaatgatataaaaggatctattgatgctacatggagaatgttggattttgctgtcactaatgatattgttaatgctctaatggagaataggaactgtatcacattagatgtttgcgcttctctcttacgtcttaccaccagtcttcttgaaagcacatatgacaggcatatgagcattgccttgaggatgattctcagtttcgtgaagagctttggtcccacaatttcttcagccttgttggctataccacctgttggggtagaccttgaagcagagcagaggatggagtggtgcaatctatgtttccaagaactgaagaatgtgagcgtcagcctcaagtttctgacaaggcggcaaggcgaggttgggagattagctcaggagctcagcctttttcttcaggatctctttcaattgtcaagcgtgtaaacagtgaccataccacgacgtgcaaaatattcacgcactcaatttcctttggtcataacagatatagcgacatatagtaggatttacctctagaaagaaagaaatatacagaaactatagggtgaagcttacagggtattttctccgagctagtttgggagcatcatttttttcatagaattcctatttttctaaggtctcgtttgtttcctttcattttaaggaattagaatcttactaatataatatgctattttttttagaatatgacatttcactacttttcaaagttatcatataagcttatcttaaattcatggggtgagagatgaaaattgattttataaatttatgttattt

SEQ ID NO: 4161 - DNA, 2624 bp, Zea Mays
gacaatttgcacaatgtgcagttgttcgaactttcactggacacagatcaagctgtgcatctcttgatttccatccttttggagaattcttagccactgggtcttcagatacaaacatgaaaatatgggatactcgaaagaagagatgcatccacacatacaagggtcatacccaacgaattaatgtgcttaaatttactcctgatggccgatggattgtttctggtctgggatttgacggctggaaaactcatgcatgatttttgtcttcatgaaggtccagtcaactgcttagatgttcacccctatgagtttttattggctacaggttcagttgataagactgttaaattttgggaccttgaaacttttgagttgatcggttcttctggacccgagaacaaccgagaatactttgagctggctagtgcaatccgttctatgaagttcaacagtgatggtaaaacaattttttgtggattgcatgaaagcttaaaggctctttcctgggaacccaccatatgtcatgatgtgattgatgtaggctggtccacattagcagatctaactgttgacgaagggaaacttcttggctgctcatataaccaaaattgtgtcggtgtgtgggttgtggatttgatgagaaatgagccttatgttgatagtagtgctggatcacacttaaatggaagtataaataggccaattcaatcagatgatagcatgtcatcagtgtttgggaggctatcgatttccagaagcccagccaatgaaattggatcggatactctgcttggatgctcaatgtctggttcaaaagaaagtcctgtctcaacttctgcatcaatgaggggattgtcaaagccacctggaaaaggggacctccggctctcaagatctatttctacacctcttctttctcctagagttagattgaacccaaatttcattgacagacagaagaatcaggcagctactgctgtaccattaccagaaccaatagtccgctttaaagcgaatctctcttcagatgctggaatgttgtctcgcaagtcacatgcatcagcagctcccatgtatagatcaaggtccaatagttctcggtatggtattatggaatcatcttccatacctgttctggccttgaggcatagctctagaaaggatgctggtcccgttcacagtgaagctgccacaggtgagttagcagatattgagcctcaaaatatagaaaaggaaggtttagttgccaatcatggcaaagaagatggcaagttggtacctgtaattgcttcaaggagctcaaagatagtcgaagaagttggctatagaagaatcaccaatgatgtaggatgtaagagagtaaccctagaaagtggtttgagagttaattcagatatggactatagaagcagagctccagaaagccacgaggtgcagcagcttatacatctgtcagaacctgctggtttacatgggaaatttataagagaatcttcagggtatctggttttgataaatggaaccctgctgctgcaaggaatccagaatttgccagcatccacagaaatgaagtgattggaataagacagttgatggagtcaagtggaaagtatgttgttgacgatcgaccttcctcttctaattacgataacatccagtatgtgacaacactatacagctcgaggctgcatccttcactttctggaaaacttagtgcatctgcaagttatgaagatgatatttctggtctagtggaaaaccatcaagaattcattcatgtaatgaaatctcgactaacaaaactagaggtggtttaccgttgctggcaaagaaatgatataaaaggatctattgatgctacatggagaatgttggattttgctgtcactaatgatattgttaatgctctaatggagaataggaactgtatcacattagatgtttgcgcttctctcttacgtcttaccaccagtcttcttgaaagcacatatgacaggcatatgagcattgccttgaggatgattctcagtttcgtgaagagctttggtcccacaatttcttcagccttgttggctataccacctgttggggtagaccttgaagcagagcagaggatggagtggtgcaatctatgtttccaagaactgaagaatgtgagcgtcagcctcaagtttctgacaaggcggcaaggcgaggttgggagattagctcaggagctcagcctttttcttcaggatctctttcaattgtcaagcgtgtaaacagtgaccataccacgacgtgcaaaatattcacgcactcaatttcctttggtcataacagatatagcgacatatagtaggatttacctctagaaagaaagaaatatacagaaactatagggtgaagcttacagggtattttctccgagctagtttgggagcatcatttttttcatagaattcctatttttctaaggtctcgtttgtttcctttcattttaaggaattagaatcttactaatataatatgctattttttttagaatatgacatttcactacttttcaaagttatcatataagcttatcttaaattcatggggtgagagatgaaaattgattttataaatttatgttattt

SEQ ID NO: 4162 - DNA, 2587 bp, Zea Mays
gacaatttgcacaatgtgcagttgttcgaactttcactggacacagatcaagctgtgcatctcttgatttccatccttttggagaattcttagccactgggtcttcagatacaaacatgaaaatatgggatactcgaaagaagagatgcatccacacatacaagggtcatacccaacgaattaatgtgcttaaatttactcctgatggccgatggattgtttctggtctgggatttgacggctggaaaactcatgcatgatttttgtcttcatgaaggtccagtcaactgcttagatgttcacccctatgagtttttattggctacaggttcagttgataagactgttaaattttgggaccttgaaacttttgagttgatcggttcttctggacccgagaacaaccgagaatactttgagctggctagtgcaatccgttctatgaagttcaacagtgatggtaaaacaattttttgtggattgcatgaaagcttaaaggctctttcctgggaacccaccatatgtcatgatgtgattgatgtaggctggtccacattagcagatctaactgttgacgaagggaaacttcttggctgctcatataaccaaaattgtgtcggtgtgtgggttgtggatttgatgagaaatgagccttatgttgatagtagtgctggatcacacttaaatggaagtataaataggccaattcaatcagatgatagcatgtcatcagtgtttgggaggctatcgatttccagaagcccagccaatgaaattggatcggatactctgcttggatgctcaatgtctggttcaaaagaaagtcctgtctcaacttctgcatcaatgaggggattgtcaaagccacctggaaaaggggacctccggctctcaagatctatttctacacctcttctttctcctagagttagattgaacccaaatttcattgacagacagaagaatcaggcagctactgctgtaccattaccagaaccaatagtccgctttaaagcgaatctctcttcagatgctggaatgttgtctcgcaagtcacatgcatcagcagctcccatgtatagatcaaggtccaatagttctcggtatggtattatggaatcatcttccatacctgttctggccttgaggcatagctctagaaaggatgctggtcccgttcacagtgaagctgccacaggtgagttagcagatattgagcctcaaaatatagaaaaggaaggtttagttgccaatcatggcaaagaagatggcaagttggtacctgtaattgcttcaaggagctcaaagatagtcgaagaagttggctatagaagaatcaccaatgatgtaggatgtaagagagtaaccctagaaagtggtttgagagttaattcagatatggactatagaagcagagctccagaaagccacgaggtgcagcagcttatacatctgtcagaacctgctggtttacatgggaaatttataagagaatcttcaggtgctggggacaataactgttctggttcaatatgcactgagagtgctgagtttaatgaagttgatatctggtacagggtatctggttttgataaatggaaccctgctgctgcaaggaatccagaatttgccagcatccacagaaatgaagtgattggaataagacagttgatggagtcaagtggaaagtatgttgttgacgatcgaccttcctcttctaattacgataacatccagtatgtgacaacactatacagctcgaggctgcatccttcactttctggaaaacttagtgcatctgcaagttatgaagatgatatttctggtctagtggaaaaccatcaagaattcattcatgtaatgaaatctcgactaacaaaactagaggtggtttaccgttgctggcaaagaaatgatataaaaggatctattgatgctacatggagaatgttggattttgctgcatatgagcattgccttgaggatgattctcagtttcgtgaagagctttggtcccacaatttcttcagccttgttggctataccacctgttggggtagaccttgaagcagagcagaggatggagtggtgcaatctatgtttccaagaactgaagaatgtgagcgtcagcctcaagtttctgacaaggcggcaaggcgaggttgggagattagctcaggagctcagcctttttcttcaggatctctttcaattgtcaagcgtgtaaacagtgaccataccacgacgtgcaaaatattcacgcactcaatttcctttggtcataacagatatagcgacatatagtaggatttacctctagaaagaaagaaatatacagaaactatagggtgaagcttacagggtattttctccgagctagtttgggagcatcatttttttcatagaattcctatttttctaaggtctcgtttgtttcctttcattttaaggaattagaatcttactaatataatatgctattttttttagaatatgacatttcactacttttcaaagttatcatataagcttatcttaaattcatggggtgagagatgaaaattgattttataaatttatgttattt

SEQ ID NO: 4163 - DNA, 2401 bp, Zea Mays
gttaaattttgggaccttgaaacttttgagttgatcggttcttctggacccgaggttttcttttcctaggatataattaaccttttcttgcttaatgcagaacaaccgagaatactttgagctggctagtgcaatccgttctatgaagttcaacagtgatggtaaaacaattttttgtggattgcatgaaagcttaaaggctctttcctgggaacccaccatatgtcatgatgtgattgatgtaggctggtccacattagcagatctaactgttgacgaagggaaacttcttggctgctcatataaccaaaattgtgtcggtgtgtgggttgtggatttgatgagaaatgagccttatgttgatagtagtgctggatcacacttaaatggaagtataaataggccaattcaatcagatgatagcatgtcatcagtgtttgggaggctatcgatttccagaagcccagccaatgaaattggatcggatactctgcttggatgctcaatgtctggttcaaaagaaagtcctgtctcaacttctgcatcaatgaggggattgtcaaagccacctggaaaaggggacctccggctctcaagatctatttctacacctcttctttctcctagagttagattgaacccaaatttcattgacagacagaagaatcaggcagctactgctgtaccattaccagaaccaatagtccgctttaaagcgaatctctcttcagatgctggaatgttgtctcgcaagtcacatgcatcagcagctcccatgtatagatcaaggtccaatagttctcggtatggtattatggaatcatcttccatacctgttctggccttgaggcatagctctagaaaggatgctggtcccgttcacagtgaagctgccacaggtgagttagcagatattgagcctcaaaatatagaaaaggaaggtttagttgccaatcatggcaaagaagatggcaagttggtacctgtaattgcttcaaggagctcaaagatagtcgaagaagttggctatagaagaatcaccaatgatgtaggatgtaagagagtaaccctagaaagtggtttgagagttaattcagatatggactatagaagcagagctccagaaagccacgaggtgcagcagcttatacatctgtcagaacctgctggtttacatgggaaatttataagagaatcttcaggtgctggggacaataactgttctggttcaatatgcactgagagtgctgagtttaatgaagttgatatctggtacagggtatctggttttgataaatggaaccctgctgctgcaaggaatccagaatttgccagcatccacagaaatgaagtgattggaataagacagttgatggagtcaagtggaaagtatgttgttgacgatcgaccttcctcttctaattacgataacatccagtatgtgacaacactatacagctcgaggctgcatccttcactttctggaaaacttagtgcatctgcaagttatgaagatgatatttctggtctagtggaaaaccatcaagaattcattcatgtaatgaaatctcgactaacaaaactagaggtggtttaccgttgctggcaaagaaatgatataaaaggatctattgatgctacatggagaatgttggattttgctgtcactaatgatattgttaatgctctaatggagaataggaactgtatcacattagatgtttgcgcttctctcttacgtcttaccaccagtcttcttgaaagcacatatgacaggcatatgagcattgccttgaggatgattctcagtttcgtgaagagctttggtcccacaatttcttcagccttgttggctataccacctgttggggtagaccttgaagcagagcagaggatggagtggtgcaatctatgtttccaagaactgaagaatgtgagcgtcagcctcaagtttctgacaaggcggcaaggcgaggttgggagattagctcaggagctcagcctttttcttcaggatctctttcaattgtcaagcgtgtaaacagtgaccataccacgacgtgcaaaatattcacgcactcaatttcctttggtcataacagatatagcgacatatagtaggatttacctctagaaagaaagaaatatacagaaactatagggtgaagcttacagggtattttctccgagctagtttgggagcatcatttttttcatagaattcctatttttctaaggtctcgtttgtttcctttcattttaaggaattagaatcttactaatataatatgctattttttttagaatatgacatttcactacttttcaaagttatcatataagcttatcttaaattcatggggtgagagatgaaaattgattttataaatttatgttattt

SEQ ID NO: 4164 - DNA, 2319 bp, Zea Mays
gttaaattttgggaccttgaaacttttgagttgatcggttcttctggacccgagagaacaaccgagaatactttgagctggctagtgcaatccgttctatgaagttcaacagtgatggtaaaacaattttttgtggattgcatgaaagcttaaaggctctttcctgggaacccaccatatgtcatgatgtgattgatgtaggctggtccacattagcagatctaactgttgacgaagggaaacttcttggctgctcatataaccaaaattgtgtcggtgtgtgggttgtggatttgatgagaaatgagccttatgttgatagtagtgctggatcacacttaaatggaagtataaataggccaattcaatcagatgatagcatgtcatcagtgtttgggaggctatcgatttccagaagcccagccaatgaaattggatcggatactctgcttggatgctcaatgtctggttcaaaagaaagtcctgtctcaacttctgcatcaatgaggggattgtcaaagccacctggaaaaggggacctccggctctcaagatctatttctacacctcttctttctcctagagttagattgaacccaaatttcattgacagacagaagaatcaggcagctactgctgtaccattaccagaaccaatagtccgctttaaagcgaatctctcttcagatgctggaatgttgtctcgcaagtcacatgcatcagcagctcccatgtatagatcaaggtccaatagttctcggtatggtattatggaatcatcttccatacctgttctggccttgaggcatagctctagaaaggatgctggtcccgttcacagtgaagctgccacaggtgagttagcagatattgagcctcaaaatatagaaaaggaaggtttagttgccaatcatggcaaagaagatggcaagttggtacctgtaattgcttcaaggagctcaaagatagtcgaagaagttggctatagaagaatcaccaatgatgtaggatgtaagagagtaaccctagaaagtggtttgagagttaattcagatatggactatagaagcagagctccagaaagccacgaggtgcagcagcttatacatctgtcagaacctgctggtttacatgggaaatttataagagaatcttcaggtgctggggacaataactgttctggttcaatatgcactgagagtgctgagtttaatgaagttgatatctggtacagggtatctggttttgataaatggaaccctgctgctgcaaggaatccagaatttgccagcatccacagaaatgaagtgattggaataagacagttgatggagtcaagtggaaagtatgttgttgacgatcgaccttcctcttctaattacgataacatccagtatgtgacaacactatacagctcgaggctgcatccttcactttctggaaaacttagtgcatctgcaagttatgaagatgatatttctggtctagtggaaaaccatcaagaattcattcatgtaatgaaatctcgactaacaaaactagaggtggtttaccgttgctggcaaagaaatgatataaaaggatctattgatgctacatggagaatgttggattttgctgaactgtatcacattagatgtttgcgcttctctcttacgtcttaccaccagtcttcttgaaagcacatatgacaggcatatgagcattgccttgaggatgattctcagtttcgtgaagagctttggtcccacaatttcttcagccttgttggctataccacctgttggggtagaccttgaagcagagcagaggatggagtggtgcaatctatgtttccaagaactgaagaatgtgagcgtcagcctcaagtttctgacaaggcggcaaggcgaggttgggagattagctcaggagctcagcctttttcttcaggatctctttcaattgtcaagcgtgtaaacagtgaccataccacgacgtgcaaaatattcacgcactcaatttcctttggtcataacagatatagcgacatatagtaggatttacctctagaaagaaagaaatatacagaaactatagggtgaagcttacagggtattttctccgagctagtttgggagcatcatttttttcatagaattcctatttttctaaggtctcgtttgtttcctttcattttaaggaattagaatcttactaatataatatgctattttttttagaatatgacatttcactacttttcaaagttatcatataagcttatcttaaattcatggggtgagagatgaaaattgattttataaatttatgttattt

SEQ ID NO: 4165 - DNA, 3173 bp, Zea Mays
gttaaattttgggaccttgaaacttttgagttgatcggttcttctggacccgagagaacaaccgagaatactttgagctggctagtgcaatccgttctatgaagttcaacagtgatggtaaaacaattttttgtggattgcatgaaagcttaaaggctctttcctgggaacccaccatatgtcatgatgtgattgatgtaggctggtccacattagcagatctaactgttgacgaagggaaacttcttggctgctcatataaccaaaattgtgtcggtgtgtgggttgtggatttgatgagaaatgagccttatgttgatagtagtgctggatcacacttaaatggaagtataaataggccaattcaatcagatgatagcatgtcatcagtgtttgggaggctatcgatttccagaagcccagccaatgaaattggatcggatactctgcttggatgctcaatgtctggttcaaaagaaagtcctgtctcaacttctgcatcaatgaggggattgtcaaagccacctggaaaaggggacctccggctctcaagatctatttctacacctcttctttctcctagagttagattgaacccaaatttcattgacagacagaagaatcaggcagctactgctgtaccattaccagaaccaatagtccgctttaaagcgaatctctcttcagatgctggaatgttgtctcgcaagtcacatgcatcagcagctcccatgtatagatcaaggtccaatagttctcggtatggtattatggaatcatcttccatacctgttctggccttgaggcatagctctagaaaggatgctggtcccgttcacagtgaagctgccacaggtgagttagcagatattgagcctcaaaatatagaaaaggaaggtttagttgccaatcatggcaaagaagatggcaagttggtacctgtaattgcttcaaggagctcaaagatagtcgaagaagttggctatagaagaatcaccaatgatgtaggatgtaagagagtaaccctagaaagtggtttgagagttaattcagatatggactatagaagcagagctccagaaagccacgaggtgcagcagcttatacatctgtcagaacctgctggtttacatgggaaatttataagagaatcttcaggtgctggggacaataactgttctggttcaatatgcactgagagtgctgagtttaatgaagttgatatctggtacagggtatctggttttgataaatggaaccctgctgctgcaaggaatccagaatttgccagcatccacagaaatgaagtgattggaataagacagttgatggagtcaagtggaaagtatgttgttgacgatcgaccttcctcttctaattacgataacatccagtatgtgacaacactatacagctcgaggctgcatccttcactttctggaaaacttagtgcatctgcaagttatgaagatgatatttctggtctagtggaaaaccatcaagaattcattcatgtaatgaaatctcgactaacaaaactagaggtggtttaccgttgctggcaaagaaatgatataaaaggatctattgatgctacatggagaatgttggattttgctgaactgtatcacattagatgtttgcgcttctctcttacgtcttaccaccagtcttcttgaaagcacatatgacaggtcatttctcatatttcctattaatttatcaatattgaaattgtgagatcatttaaatttgaccttgctattgaacatggctgattattttgattaaaagctgacttaatgcccttttggagagttggaactcgcaatgggaattgaatctgattataatgcccctttcttgaaaaagagatggaattctgaatacgcagatatgaaatattgttcatggtccagactatggtcaaattgtagcactagccggcctttgtattcaaggctatgacacgtacagatttgagtatgcagactataggctagcacaagctggtcattctattcaaggaatcaaggctaagccacataaaaaaaagaatcttatgacacagcaaattactgcatcactaaaaccgcatttgcacgactgcactttttcttaattcacttgagtcatgggctccatgtttccacttctatggatcgcaatcaaacagtttagtgaccatgtatcgatgtcttgctttacctattcccaaaaaggaagtcccaatggtataccctcggcttccttcgctgatggtagcactagtagcctcatcaatcagaagattttctactgtgcaatatttaactgcccttccactgttttaagttacttttcacattttgtatatggtgctacactgctgctactacgaaaaatgactggcggtgtacattgcaacagtaactgttttgtcaaaagtgtgtgttgacactttccaacgcaggcatatgagcattgccttgaggatgattctcagtttcgtgaagagctttggtcccacaatttcttcagccttgttggctataccacctgttggggtagaccttgaagcagagcagaggtgtttttttcttttcatctcactgaaattgtaatggattctccttcctgcctcatgcatacaacggacttgcttcacgagcgcgtatcttgctaggatggagtggtgcaatctatgtttccaagaactgaagaatgtgagcgtcagcctcaagtttctgacaaggcggcaaggcgaggttgggagattagctcaggagctcagcctttttcttcaggatctctttcaattgtcaagcgtgtaaacagtgaccataccacgacgtgcaaaatattcacgcactcaatttcctttggtcataacagatatagcgacatatagtaggatttacctctagaaagaaagaaatatacagaaactatagggtgaagcttacagggtattttctccgagctagtttgggagcatcatttttttcatagaattcctatttttctaaggtctcgtttgtttcctttcattttaaggaattagaatcttactaatataatatgctattttttttagaatatgacatttcactacttttcaaagttatcatataagcttatcttaaattcatggggtgagagatgaaaattgattttataaatttatgttattt

SEQ ID NO: 4166 - DNA, 2497 bp, Zea Mays
gtcatacttatttatgtaatcacaaatttctcatttcacttcagtagtcatgccactcgctagtatcacttgaatattgtgtgataccgctttttaagaaattctccagtctacctggtacaatgcacatgttgtgcaaaaaatctagtaattatttaaaaaacggagcagattcatagacaaacgagccttccttcttccttgaaactgattccatgtttctgaccattgcaacacgggttgtttggggggggggggggggggggcatcccctacctccctagataataatacgtagcaactacaattcggaaacatcctataaattataattctctcagctacgcataacagagatacaggttgctgggtaacctagaagtagacataaccaggcaatctaataggattgtcgaaggagctgatgaaacctatttggttttgtgccactttatactgcatttacagtctagacctgaaaaagagcacatctctctccaatctgataatttgcccgagtcttcatgactgtacttaatcttcagattcctgaacccaacaagtggcaataggtgccgcatgcagcacccaaccacccttatgtgataaacgtcgcacaagtaggtgatagcctcttatttctcacctataatgcttttgtagttaaccatgtagatggcaaccagtgtgagaagcgcaccaccaatctgtactgttgagaaggtctcacccaggtacaggtacctgaacagcaaagaggtggcaaggagtcaagataacattgtgtgaatactgaaatcaggtagcagtaacacaacatcctcagaagaatcttacccgaaaacggatgcaaacatgggggtcaagaaagtgagagaactaagtgtggttaagctacctgaaaaaatgacaaagaactagttatgtgggatacctttcagagtgaatcatggaaatatagcattggaaatgaaacaatcatacccctagtagcattgtaaaagtatacaccgtagctgacagcactgccaaatatagatgtataaccaagtgctaatatgtcgctccatgtaagatcttgaatatggccactcagagcaggatcatgattaagaacagatatcactagcaaaggaagcccaccaataatcatgtgctgtcataatgttgatattagtattataataataatgatgtaatgccagatttggtactaattgcaaggaccatcccataaaagggtggaaatttcaacaacatggattaaatgtaacatcttcattccgatggaatcttaaacaagttggaaggcctaggtacctttaggaatatcaacaaaataacaaatgcaattctgttttgaaatttatgcatctgccttcaactacatgggtaatattatgggagctacatgagtatgcaataatctttgcaattataataacaagaaatgatatatacatcgcgttctgcagaatgaactaactaaattaaaattctaggaaacatgcaaaatcattagccaaaatagatcacagaaaggctaagttgaaacaatataaccgatagcaaaacagagctttggtgcatgtgacacaaactaagacataacatggatgattattcatctatggataatatacccatcctgttgccataattggatcagagtactttgacacccagcggaccatgatagttccgactgccatgctttgagctgagaggaacatcaacgattccccgcttccccagattgttgtgtcatttccttcaactgacagtgctggaacctagtgatttttttaaaaaaaaaaatgaaaggggagacaaaagttcagctatagggcaagtcataatccataaaaagggcacacctagtgccggaggcataatccataaatagaagcaaattatttgtaaatagaggctttacttggcattcatgatctcaatttcataaagttcaaaatgatcataaaccatttttgaacatcttacagatgatatctgatgtaaatatacacctgacatggaaacagtcgagaagaatatagaacgtttgcataagacagttgttttaaacaccaaatcatttaaggtgtggtccaaaatattgcataataaagagcgtatatatgcatgaatgtttgccttcaaatgttgcaaatacgcacttgaacatggataaaatagaatttgaacgatgcatcttttgtcactataatcaatattcatgtctcaggatttctaacgtgtctgatgcatatgttaagtttgaactcgcatcaacagaaggcaaacctccagaagcaagagccccacgacgcccaacacgagtcctccaactcctatcgcgccaatcgactctccaaagagcagtgatgcaaggatagcaaccgtcaatggctgcgagtcaatgatgacctggaatggagaatcgagctccgtaagtgctaccagttcaccaggccaagatggcaaggcaaatacttgc

SEQ ID NO: 4167 - DNA, 97 bp, Zea Mays
ggggcgcggccgagacatggccacgtgcgacattcttctttcggtccgccgtctgcccgcgatcctgcgattcgtgagcaaccctgctcgcgtgcgc

SEQ ID NO: 4168 - DNA, 1688 bp, Zea Mays
ccactcgctgtctcgaccccacccaccgttcccatccacgcgccgctgccacgtcgttgccttgcccaccaactcaccggcgcatctcgccgggacggatgccgtatatatccgcgcgccgagcttgagggacgcccctaccaccgcccggccgaccccccttcctttccctcccctcccctcccctcaaaccgcccctcgttgtaaaaggaaggagacgaccgaggctggggaaaggggagaagatttttcagattctgcggcagcgacctacccagctccgcgcgagagagaccgagcggcagcagctctcttcccttcccttccctccgacatgacgccgcatctgcccgccgtctcctcctcctcgaccaccaccacatcccgcgccgccgcggccgcccaccacctgctcgacgccgccgccgcgcccccgtcctcgccgcaccagtaccggaggcggaggcggcgccgggtgctggggtgcctccgcccgcgcgccgcgtccgtccgctgctgcgccgcggcggcgcgggcggcggaggccaccacgcgtgtcttcgtcgtctccgacctgcacacggactacccggagaacatggagtgggtgcgccgcctgcccgcccaggtcggggcgggcgaggggcgaggcgtcgacgcgctcgtcgtcgcgggcgacgtggccgagaccagggataacttcgcgcgcaccatggaggtcctcagggagcgcttcgccgccgtcttctacgttccagggaaccacgacctctggctgcgccgcgagggcggcctctatatggattcgctggagaaactgactgcattgcttgatgcatgtagtgagctgggtgtggatacaggcccaagaacgataggtgacttgggaatcataccattgttctcatggtaccacaagagttttgacaaggagaaggatgttaacagtttgaatgacaagaatcatgatgctattgaagaagtgaaaagtagcagcaaacatatattaacgttttcacactttgtaccaaggcaagagttgtgtccggagaaacgaatgctttattacccatatcttcctaaggtcattggctctgattttttggagaggaggctgagagatatacacagcaacagagaagacagagcagcttgccatgtttttgggcacactcatttctgttgggattctgtggttgatgagatcaggtacgtgcaggctcctctggcataccctcgagaaagaaaacgccggatgaacggtgaaggctggctgccattttgtgtataccgtgacggtttcaacccagaaatttatccagcactgtggtcagattactacaacaagaacaaaagggaacccgagaacactcagctcgcgccttgggttgccagccattacgcaaagtaccacaagttccactgaccctttctgagttgccttggctttttgccgaattgatgcagatcgtcccttcaggatggtgttgaattagctgggaaaaggagatattgacgttttacctgtacatgatcttttcttgtttctacccttaccataacttttgggcaagtaagcgccagcctctgttcgttgtatgttgcagaaatctgaataatgtgtataagattcttcaaagcattgctgcagagatagcgaaatatagctgattctgttcatctaacaa

SEQ ID NO: 4169 - DNA, 1726 bp, Zea Mays
ctcgaccccacccaccgttcccatccacgcgccgctgccacgtcgttgccttgcccaccaactcaccggcgcatctcgccgggacggatgccgtatatatccgcgcgccgagcttgagggacgcccctaccaccgcccggccgaccccccttcctttccctcccctcccctcccctcaaaccgcccctcgttgtaaaaggaaggagacgaccgaggctggggaaaggggagaagatttttcagattctgcggcagcgacctacccagctccgcgcgagagagaccgagcggcagcagctctcttcccttcccttccctccgacatgacgccgcatctgcccgccgtctcctcctcctcgaccaccaccacatcccgcgccgccgcggccgcccaccacctgctcgacgccgccgccgcgcccccgtcctcgccgcaccagtaccggaggcggaggcggcgccgggtgctggggtgcctccgcccgcgcgccgcgtccgtccgctgctgcgccgcggcggcgcgggcggcggaggccaccacgcgtgtcttcgtcgtctccgacctgcacacggactacccggagaacatggagtgggtgcgccgcctgcccgcccaggtcggggcgggcgaggggcgaggcgtcgacgcgctcgtcgtcgcgggcgacgtggccgagaccagggataacttcgcgcgcaccatggaggtcctcagggagcgcttcgccgccgtcttctacgttccagggaaccacgacctctggctgcgccgcgagggcggcctctattgagctgggtgtggatacaggcccaagaacgataggtgacttgggaatcataccattgttctcatggtaccacaagagttttgacaaggagaaggatgttaacagtgtgcgtgtcccttcgctagaaatggcttgtaaagactttcatgcttgccaatggccttcagacctgacaaatgatgatgaggctcttgctctttactttgacaagttgaatgacaagaatcatgatgctattgaagaagtgaaaagtagcagcaaacatatattaacgttttcacactttgtaccaaggcaagagttgtgtccggagaaacgaatgctttattacccatatcttcctaaggtcattggctctgattttttggagaggaggctgagagatatacacagcaacagagaagacagagcagcttgccatgtttttgggcacactcatttctgttgggattctgtggttgatgagatcaggtacgtgcaggctcctctggcataccctcgagaaagaaaacgccggatgaacggtgaaggctggctgccattttgtgtataccgtgacggtttcaacccagaaatttatccagcactgtggtcagattactacaacaagaacaaaagggaacccgagaacactcagctcgcgccttgggttgccagccattacgcaaagtaccacaagttccactgaccctttctgagttgccttggctttttgccgaattgatgcagatcgtcccttcaggatggtgttgaattagctgggaaaaggagatattgacgttttacctgtacatgatcttttcttgtttctacccttaccataacttttgggcaagttattttttattggtgtatctggaaatcatttgtctgaaatctgaagagaagggaaagtttgtgtcgcggcctcgctgagtgcatcaactcgcaacctgttg

SEQ ID NO: 4170 - DNA, 2249 bp, Zea Mays
ctcgaccccacccaccgttcccatccacgcgccgctgccacgtcgttgccttgcccaccaactcaccggcgcatctcgccgggacggatgccgtatatatccgcgcgccgagcttgagggacgcccctaccaccgcccggccgaccccccttcctttccctcccctcccctcccctcaaaccgcccctcgttgtaaaaggaaggagacgaccgaggctggggaaaggggagaagatttttcagattctgcggcagcgacctacccagctccgcgcgagagagaccgagcggcagcagctctcttcccttcccttccctccgacatgacgccgcatctgcccgccgtctcctcctcctcgaccaccaccacatcccgcgccgccgcggccgcccaccacctgctcgacgccgccgccgcgcccccgtcctcgccgcaccagtaccggaggcggaggcggcgccgggtgctggggtgcctccgcccgcgcgccgcgtccgtccgctgctgcgccgcggcggcgcgggcggcggaggccaccacgcgtgtcttcgtcgtctccgacctgcacacggactacccggagaacatggagtgggtgcgccgcctgcccgcccaggtcggggcgggcgaggggcgaggcgtcgacgcgctcgtcgtcgcgggcgacgtggccgagaccagggataacttcgcgcgcaccatggaggtcctcagggagcgcttcgccgccgtcttctacgttccagggaaccacgacctctggctgcgccgcgagggcggcctctattgagctgggtgtggatacaggcccaagaacgataggtgacttgggaatcataccattgttctcatggtaccacaagagttttgacaaggagaaggatgttaacagtgtgcgtgtcccttcgctagaaatggcttgtaaagactttcatgcttgccaatggccttcagacctgacaaatgatgatgaggctcttgctctttactttgacaagttgaatgacaagaatcatgatgctattgaagaagtgaaaagtagcagcaaacatatattaacgttttcacactttgtaccaaggcaagagttgtgtccggagaaacgaatgctttattacccatatcttcctaaggtcattggctctgattttttggagaggaggctgagagatatacacagcaacagagaagacagagcagcttgccatgtttttgggcacactcatttctgttgggattctgtggttgatgagatcaggtacgtgcaggctcctctggcataccctcgagaaagaaaacgccggatgaacggtgaaggctggctgccattttgtgtataccgtgacggtttcaacccagaaatttatccagcactgtggtcagattactacaacaagaacaaaagggaacccgagaacactcagctcgcgccttgggttgccagccattacgcaaagtaccacaagttccactgaccctttctgagttgccttggctttttgccgaattgatgcagatcgtcccttcaggatggtgttgaattagctgggaaaaggagatattgacgttttacctgtacatgatcttttcttgtttctacccttaccataacttttgggcaagtaagcgccagcctctgttcgttgtatgttgcagaaatctgaataatgtgtataagattcttcaaagcattgctgcagagatagcgaaatatagctgattctgttcatctaacaagctccatctgtccatttgacttctctctagtggagtttataactgcaaagtcactgataattctgcttcaccctgatactattttaggttattttttattggtgtatctggaaatcatttgtctgaaatctgaagagaagggaaagtttgtgtcgcggcctcgctgagtgcatcaactcgcaacctgttggatggaaacagtataataacaacggacatatcacttctccatggtctggggattaaatttgttcttgttccaggaacacatattcaaattgataagctgttgtcagaaagagggaataaggccaagtatgttggtcagtacaaaattactgatgaagatgccagaaaggctgcaatggatgcaggtggtagaatacgattgacaatagaagctaaactttctcctggtcctcttcgtaggcatggtgttattggacgctggcatggtcttgtggatagcattgcaagtggcaatttccttggtgcattatctaactactga

SEQ ID NO: 4171 - DNA, 1632 bp, Zea Mays
ggccgaccccccttcctttccctcccctcccctcccctcaaaccgcccctcgttgtaaaaggaaggagacgaccgaggctggggaaaggggagaagatttttcagattctgcggcagcgacctacccagctccgcgcgagagagaccgagcggcagcagctctcttcccttcccttccctccgacatgacgccgcatctgcccgccgtctcctcctcctcgaccaccaccacatcccgcgccgccgcggccgcccaccacctgctcgacgccgccgccgcgcccccgtcctcgccgcaccagtaccggaggcggaggcggcgccgggtgctggggtgcctccgcccgcgcgccgcgtccgtccgctgctgcgccgcggcggcgcgggcggcggaggccaccacgcgtgtcttcgtcgtctccgacctgcacacggactacccggagaacatggagtgggtgcgccgcctgcccgcccaggtcggggcgggcgaggggcgaggcgtcgacgcgctcgtcgtcgcgggcgacgtggccgagaccagggataacttcgcgcgcaccatggaggtcctcagggagcgcttcgccgccgtcttctacgttccagggaaccacgacctctggctgcgccgcgagggcggcctctatatggattcgctggagaaactgactgcattgcttgatgcatgtagtgagctgggtgtggatacaggcccaagaacgataggtgacttgggaatcataccattgttctcatggtaccacaagagttttgacaaggagaaggatgttaacagtgtgcgtgtcccttcgctagaaatggcttgtaaagactttcatgcttgccaatggccttcagacctgacaaatgatgatgaggctcttgctctttactttgacaagttgaatgacaagaatcatgatgctattgaagaagtgaaaagtagcagcaaacatatattaacgttttcacactttgtaccaaggcaagagttgtgtccggagaaacgaatgctttattacccatatcttcctaaggtcattggctctgattttttggagaggaggctgagagatatacacagcaacagagaagacagagcagcttgccatgtttttgggcacactcatttctgttgggattctgtggttgatgagatcaggtacgtgcaggctcctctggcataccctcgagaaagaaaacgccggatgaacggtgaaggctggctgccattttgtgtataccgtgacggtttcaacccagaaatttatccagcactgtggtcagattactacaacaagaacaaaagggaacccgagaacactcagctcgcgccttgggttgccagccattacgcaaagtaccacaagttccactgaccctttctgagttgccttggctttttgccgaattgatgcagatcgtcccttcaggatggtgttgaattagctgggaaaaggagatattgacgttttacctgtacatgatcttttcttgtttctacccttaccataacttttgggcaagttattttttattggtgtatctggaaatcatttgtctgaaatctgaagagaagggaaagtttgtgtcgcggcctcgctgagtgcatcaactcgcaacctgttg

SEQ ID NO: 4172 - DNA, 3870 bp, Zea Mays
gtgagtacggccatgttcccagtcgtggcgcgcgaccgcagccaggccaggagccagcaaagcgagcagtcgaccatgtaccacggaacgagaggagaaaacgtctgaaataggcgagggatcacggccgcgcccgcgcaagcggcaaggcaaacccttgtgttggtccagccgcccctcgccccgccgcaccaatcccccaccccatcccaacgctatccgctgccctcgccgcgcccccctcctcttccacctcgtccgccaccctccccaatccatcacatcccaccctaccccaccggccctgccgccgccgaggaggaggtgtccccacccccgtccgcagaggcagcagggatctctaccgggcatggagctggcgctcgcctccgcgaagccctcgcctcgggcggcgggggccttcccgccacttatcttctcgccgcttaaaccattcccgctcctccgcttcccgccgcggaggaccgcagcggcggcgctgcggctccggctccggctccgcgcggctgccgctgacgcgggcgagacttcccctggcgaggaggtgttcggcgcgcggcgggagctaacgggcatccagccgctggtggaggcgctgccgcccgcagcgcggacggcggcggaactggccgtcgccgcggcagccgtggcggcgggatacggcatcgggctccgcgcgggtggcgggtcgcgcgccgtggcggtggcgggggcggcagtgctctgcgcggccagcgtggcgggagcagctgcggtgaactccgtggtcccagaggtcgccgccgtggggctgcacaattacgtcgcgggccacgacgaccccaccaacctggacaacggcgaggtggaggcaatcgcgaagaaatatggagttagcacacaggatgacgccttcaaagcagagctctgtgacttgtatgccaggtatctttactcagtacttcctccaggagatgaagatctcaaaggtacagaggttcaggcaattataaaatttaaaagtgctcttgggcttgatgatgtagatgctgctaacatgcacatggagattggtagacgcatatacagagagaggttggaaacgagtgatcgtgatgctgacatggaacaaagacgggcatttcagaagttaatttatgtgtccaatcttgtctttggagatgcatctgtattcctacttccttggaaacgtctgtttggggtgactgattctcagattgacattgctatgagggaaaatgccaagaatttatactcggtgcagctcaagtctattggaagaggtcttgacataggcacactcattgaagtaaggagagcacaacttgcatataaactttctgatgagattgctgctgagatgttccgtgagcacgcgaagcagctagttcaagaaaacatttcatcagcattagacatcttgaagtcacgtattccggatagtctaactcaggctgtggaagaagtgaatattgtaattaaatttaatagtttgcttacaacattaagcaaacaccctgaagctgataattttgctcgtggtcttggccctatttcattagctggagaggatgatcacgataggagagctgatgatttcaagatactctataaggcctatgctacagaagtactttcagatggaattgtggatgataagaagcttttcccctctgaatgaactgagaaacatatttggactggggaagcgggaagcagaaggaatcttatctgatgccaaagctcacatatacagaaggacacttgctaaatcatttaacactgaattagcttcagtccatagcaaagcagcatttctccaaactctttgcgaaaagttacagtttgatcctgaactggctagtaagatgcatgaagaaatttacagacagaagcttcagcagtttgtaactgatggagagctgagcaaggaggaagtggaagctctgatggcattccaagtgcgtctctgcatccctcaagaaactgtggacgctgcacatactgagatttgtgggcaactgttcgaaaaggttgtcaaagaagccattgcatctgttgacggatataatgctgatagacgtgaggctgttaggaaggcagcacaaagtctaaacctgaaaacggaggctgtcatgacgatctttagtaaagcagtacggaagttattcttgagctacattcagagagcaaaagaagctggaaaccgcattgaaactgcaaaagaactgaagaagttaatttccttcaacatagttgttgttaccgagcttttagctgacattaaaggagaactatctccagttgctgaaactgaagcatcaagtgcagcttcagaatctgaaggagaggatggtgaacatgaatgggaatcattggatacactgaggaagactagacctgataaagagctcaaagaaaagctgagaaagtcaagccagaaagagataactctcaaggatgacattccattgagggatagggctgagctgtatgaaacgtacctgatgttctgcatcactggggagacgactaatgtatcatttggaacagctatctctacaaagaaagatgattcagagtttttaatgctaaagcaattgggtgacatacttggtttaactcgcaaagaagctcaagatgttcacattaagtttgcagagaaagcttttgtgcaacaggcggaagtaattcttgctgatgggaaattaacagaggctaaggctgaccagcttgctaagattcaaaagcaggtcggtttgcctactgaacatgcacagaaaatcattaagggtattacaacgacaaagttatcttctgcaattgaagcctctgttgctcggggtcagatcggtatacagcaggtccgaggattgaaggaagcaaacttccaactagatagcttgattgcggagccgcagcgagaaagcatttataggaaaactgttgaagagctcttttcttcaggatattgcaaaggttaggttggagaactcccttgtccaggctattgcgttgcttcggcagaagaagagagatgatgtgctttcatctctgaatgacatgctcgcatgtgatgctgcggtccctgcatcacgacccttgtcatggcccacaccaggagagctagatgatctatttgccatctacctgaagagcattcctaagcctgagaagctatcaaggttgcagtacctgctcggcattagcaacgagaaggctaacgagatgcagtacgcagcctcggagggatcgctgccggttgcagctgaagagaaagaggagttggcgttctaggaagggagacagttttgttagggtagccaccggagttgaggtcccttgccaaggaacgaacgaacttggtgcctgtggcggacagctgctattgtagctaggcgcatacatgtttttggaaaaggaaatcgacgtgtaacactgacatatttattgcatgtctatctgtatagacaagtcaataacaccgacgctgttaggctgttgcattccaccaggccacactggaagcgttttgttttctggttcattgtttctcttttggtttaagaatgtattacagctatgactgccacccttgcttataacctggatttgttgttaacctacctggagtgcttaagggcccgttcggttctacccggattgtttgtgtaacttataagttttgatcgctggaacgttccgggatggaatccggaagaaacgaacacggctaaggggcagtttggagccttctgttgcttaccatcagcaacctctttgcaaaatgtgaaatctctctgttttactcctccatgtcttagcctataaatcagatagatatgtcta

SEQ ID NO: 4173 - DNA, 940 bp, Zea Mays
gcaagcggcaaggcaaacccttgtgttggtccagccgcccctcgccccgccgcaccaatcccccaccccatcccaacgctatccgctgccctcgccgcgcccccctcctcttccacctcgtccgccaccctccccaatccatcacatcccaccctaccccaccggccctgccgccgccgaggaggaggtgtccccacccccgtccgcagaggcagcagggatctctaccgggcatggagctggcgctcgcctccgcgaagccctcgcctcgggcggcgggggccttcccgccacttatcttctcgccgcttaaaccattcccgctcctccgcttcccgccgcggaggaccgcagcggcggcgctgcggctccggctccggctccgcgcggctgccgctgacgcgggcgagacttcccctggcgaggaggtgttcggcgcgcggcgggagctaacgggcatccagccgctggtggaggcgctgccgcccgcagcgcggacggcggcggaactggccgtcgccgcggcagccgtggcggcgggatacggcatcgggctccgcgcgggtggcgggtcgcgcgccgtggcggtggcgggggcggcagtgctctgcgcggccagcgtggcgggagcagctgcggtgaactccgtggtcccagaggtcgccgccgtggggctgcacaattacgtcgcgggccacgacgaccccaccaacctggacaacggcgaggtggaggcaatcgcgaagaaatatggagttagcacacaggatgacgccttcaaagcagagctctgtgacttgtatgccagggacagatcgcaaggggtaggaacagtggctagtttggcggacttcatcaccacggctggcagcttgccgagccacgatgaccgaggtagtcctgccgaactccagggagacttcattcctcgatgatctcc

SEQ ID NO: 4174 - DNA, 3067 bp, Zea Mays
cttttaatgacagcctttcagtttcgtggatggatgtcaacaatcttgcctgggtatctttactcagtacttcctccaggagatgaagatctcaaaggtacagaggttcaggcaattataaaatttaaaagtgctcttgggcttgatgatgtagatgctgctaacatgcacatggagattggtagacgcatatacagagagaggttggaaacgagtgatcgtgatgctgacatggaacaaagacgggcatttcagaagttaatttatgtgtccaatcttgtctttggagatgcatctgtattcctacttccttggaaacgtctgtttggggtgactgattctcagattgacattgctatgagggaaaatgccaagaatttatactcggtgcagctcaagtctattggaagaggtcttgacataggcacactcattgaagtaaggagagcacaacttgcatataaactttctgatgagattgctgctgagatgttccgtgagcacgcgaagcagctagttcaagaaaacatttcatcagcattagacatcttgaagtcacgtattccggatagtctaactcaggctgtggaagaagtgaatattgtaattaaatttaatagtttgcttacaacattaagcaaacaccctgaagctgataattttgctcgtggtcttggccctatttcattagctggagaggatgatcacgataggagagctgatgatttcaagatactctataaggcctatgctacagaagtactttcagatggaattgtggatgataagaagcttttcccctctgaatgaactgagaaacatatttggactggggaagcgggaagcagaaggaatcttatctgatgccaaagctcacatatacagaaggacacttgctaaatcatttaacactgaattagcttcagtccatagcaaagcagcatttctccaaactctttgcgaaaagttacagtttgatcctgaactggctagtaagatgcatgaagaaatttacagacagaagcttcagcagtttgtaactgatggagagctgagcaaggaggaagtggaagctctgatggcattccaagtgcgtctctgcatccctcaagaaactgtggacgctgcacatactgagatttgtgggcaactgttcgaaaaggttgtcaaagaagccattgcatctgttgacggatataatgctgatagacgtgaggctgttaggaaggcagcacaaagtctaaacctgaaaacggaggctgtcatgacgatctttagtaaagcagtacggaagttattcttgagctacattcagagagcaaaagaagctggaaaccgcattgaaactgcaaaagaactgaagaagttaatttccttcaacatagttgttgttaccgagcttttagctgacattaaaggagaactatctccagttgctgaaactgaagcatcaagtgcagcttcagaatctgaaggagaggatggtgaacatgaatgggaatcattggatacactgaggaagactagacctgataaagagctcaaagaaaagctgagaaagtcaagccagaaagagataactctcaaggatgacattccattgagggatagggctgagctgtatgaaacgtacctgatgttctgcatcactggggagacgactaatgtatcatttggaacagctatctctacaaagaaagatgattcagagtttttaatgctaaagcaattgggtgacatacttggtttaactcgcaaagaagctcaagatgttcacattaagtttgcagagaaagcttttgtgcaacaggcggaagtaattcttgctgatgggaaattaacagaggctaaggctgaccagcttgctaagattcaaaagcaggtcggtttgcctactgaacatgcacagaaaatcattaagggtattacaacgacaaagttatcttctgcaattgaagcctctgttgctcggggtcagatcggtatacagcaggtccgaggattgaaggaagcaaacttccaactagatagcttgattgcggagccgcagcgagaaagcatttataggaaaactgttgaagagctcttttcttcaggtacaggggatttcgatgaagaggaaatgtatgtgaagattccagctgatctcataataagttctgagaaggccaagtcaattgtacaggatattgcaaaggttaggttggagaactcccttgtccaggctattgcgttgcttcggcagaagaagagagatgatgtgctttcatctctgaatgacatgctcgcatgtgatgctgcggtccctgcatcacgacccttgtcatggcccacaccaggagagctagatgatctatttgccatctacctgaagagcattcctaagcctgagaagctatcaaggttgcagtacctgctcggcattagcaacgagaaggctaacgagatgcagtacgcagcctcggagggatcgctgccggttgcagctgaagagaaagaggagttggcgttctaggaagggagacagttttgttagggtagccaccggagttgaggtcccttgccaaggaacgaacgaacttggtgcctgtggcggacagctgctattgtagctaggcgcatacatgtttttggaaaaggaaatcgacgtgtaacactgacatatttattgcatgtctatctgtatagacaagtcaataacaccgacgctgttaggctgttgcattccaccaggccacactggaagcgttttgttttctggttcattgtttctcttttggtttaagaatgtattacagctatgactgccacccttgcttataacctggatttgttgttaacctacctggagtgcttaagggcccgttcggttctacccggattgtttgtgtaacttataagttttgatcgctggaacgttccgggatggaatccggaagaaacgaacacggctaaggggcagtttggagccttctgttgcttaccatcagcaacctctttgcaaaatgtgaaatctctctgttttactcctccatgtcttagcctataaatcagatagatatgtcta

SEQ ID NO: 4175 - DNA, 2970 bp, Zea Mays
cagcctttcagtttcgtggatggatgtcaacaatcttgcctgggtatctttactcagtacttcctccaggagatgaagatctcaaaggtacagaggttcaggcaattataaaatttaaaagtgctcttgggcttgatgatgtagatgctgctaacatgcacatggagattggtagacgcatatacagagagaggttggaaacgagtgatcgtgatgctgacatggaacaaagacgggcatttcagaagttaatttatgtgtccaatcttgtctttggagatgcatctgtattcctacttccttggaaacgtctgtttggggtgactgattctcagagattgacattgctatgagggaaaatgccaagaatttatactcggtgcagctcaagtctattggaagaggtcttgacataggcacactcattgaagtaaggagagcacaacttgcatataaactttctgatgagattgctgctgagatgttccgtgagcacgcgaagcagctagttcaagaaaacatttcatcagcattagacatcttgaagtcacgtattccggatagtctaactcaggctgtggaagaagtgaatattgtaattaaatttaatagtttgcttacaacattaagcaaacaccctgaagctgataattttgctcgtggtcttggccctatttcattagctggagaggatgatcacgataggagagctgatgatttcaagatactctataaggcctatgctacagaagtactttcagatggaattgtggatgataagaagcttttcccctctgaatgaactgagaaacatatttggactggggaagcgggaagcagaaggaatcttatctgatgccaaagctcacatatacagaaggacacttgctaaatcatttaacactgaattagcttcagtccatagcaaagcagcatttctccaaactctttgcgaaaagttacagtttgatcctgaactggctagtaagatgcatgaagaaatttacagacagaagcttcagcagtttgtaactgatggagagctgagcaaggaggaagtggaagctctgatggcattccaagtgcgtctctgcatccctcaagaaactgtggacgctgcacatactgagatttgtgggcaactgttcgaaaaggttgtcaaagaagccattgcatctgttgacggatataatgctgatagacgtgaggctgttaggaaggcagcacaaagtctaaacctgaaaacggaggctgtcatgacgatctttagtaaagcagtacggaagttattcttgagctacattcagagagcaaaagaagctggaaaccgcattgaaactgcaaaagaactgaagaagttaatttccttcaacatagttgttgttaccgagcttttagctgacattaaaggagaactatctccagttgctgaaactgaagcatcaagtgcagcttcagaatctgaaggagaggatggtgaacatgaatgggaatcattggatacactgaggaagactagacctgataaagagctcaaagaaaagctgagaaagtcaagccagaaagagataactctcaaggatgacattccattgagggatagggctgagctgtatgaaacgtacctgatgttctgcatcactggggagacgactaatgtatcatttggaacagctatctctacaaagaaagatgattcagagtttttaatgctaaagcaattgggtgacatacttggtttaactcgcaaagaagctcaagatgttcacattaagtttgcagagaaagcttttgtgcaacaggcggaagtaattcttgctgatgggaaattaacagaggctaaggctgaccagcttgctaagattcaaaagcaggtcggtttgcctactgaacatgcacagaaaatcattaagggtattacaacgacaaagttatcttctgcaattgaagcctctgttgctcggggtcagatcggtatacagcaggtccgaggattgaaggaagcaaacttccaactagatagcttgattgcggagccgcagcgagaaagcatttataggaaaactgttgaagagctcttttcttcaggatattgcaaaggttaggttggagaactcccttgtccaggctattgcgttgcttcggcagaagaagagagatgatgtgctttcatctctgaatgacatgctcgcatgtgatgctgcggtccctgcatcacgacccttgtcatggcccacaccaggagagctagatgatctatttgccatctacctgaagagcattcctaagcctgagaagctatcaaggttgcagtacctgctcggcattagcaacgagaaggctaacgagatgcagtacgcagcctcggagggatcgctgccggttgcagctgaagagaaagaggagttggcgttctaggaagggagacagttttgttagggtagccaccggagttgaggtcccttgccaaggaacgaacgaacttggtgcctgtggcggacagctgctattgtagctaggcgcatacatgtttttggaaaaggaaatcgacgtgtaacactgacatatttattgcatgtctatctgtatagacaagtcaataacaccgacgctgttaggctgttgcattccaccaggccacactggaagcgttttgttttctggttcattgtttctcttttggtttaagaatgtattacagctatgactgccacccttgcttataacctggatttgttgttaacctacctggagtgcttaagggcccgttcggttctacccggattgtttgtgtaacttataagttttgatcgctggaacgttccgggatggaatccggaagaaacgaacacggctaaggggcagtttggagccttctgttgcttaccatcagcaacctctttgcaaaatgtgaaatctctctgttttactcctccatgtcttagcctataaatcagatagatatgtcta

SEQ ID NO: 4176 - DNA, 631 bp, Zea Mays
gtcacagttccatatttccattttccccaaaatttaacgtcgacggattctagtgggaaggttggaacctgtagagactcgtgttaagaataacaagcgtggtataggttctaaagaaccaaaaccacaacctaaggttgaggatgacattgaaacacatcctcaaaagcccaaggaaatgcaatcaaagaaaagggcaaaattagctgcaaagaggataagaaaactgcaagaagaggagaagcgcttgaaagagaaggaattcgagatggcttttttcagggaattttggcctgataatgtgtaaggcagaaacttcaacacttgacaatgtagctgctgactttgcctgatatagtggatgtataggcttgcaaaacgcttggcctacaaaatgttaccccattcattccgtggatgatttcacacatgatttgtggctagggttggcacaaagctgttcatccatgtagtggacaaatctagtgtagaattgcccatgctatgtgatcttgtaatttttatacattataaatcttgtttttttttgttcatataactgtgctcaatattttgccttgccaatgcaaagatttaaatctaggctcagaaaccaggcaatagttcacta

SEQ ID NO: 4177 - DNA, 2432 bp, Zea Mays
tgagcaccaaacacaccgaaaatgcaattctacagttcctaatctggcatgagtatatgatccctactccctagtctgtatgaacaggaaatgtttgttggagagggcagggaaaacatctaggtcataggtttccgaacgggttggctttgatggagcaatagaacaagtgggctgaaagcttgaagtaatgaacggctcgagttgtgcagctttgccccgcatttttttttgaaaagtgcagcgttcctccgtttcgcttctcccgctcccttccgcaacggcgtactccctccgccgcccgccgaccgccgactcccgccgcaaaatcctgcgtcagaagcgccgattctcggacgtcctccggatctgagacaccgagcgcactacgagctgtagcttgacctaaaaatgagtgagggggatgctactcagcttgcccttgagaaaggattaccgcaagtgtctaatgatgatggttcgagtagtcctgcaactatgcacaagttgaaagttgacacagaagatgctggaagcaaaattgaatcacccactccagagaagcttgaatctagaagcaaaggggttgttgtgagttcgttggcaaggaatttacttgcagagaggtacaaagatagatttgcaaatcagttcctggaagatgagggtgacatagatgatgaagactataatgacagtatttcgccaggcatgagccgatctcagagatcaagaagcattgaacttctggagaagcacaaggatttactgaatctttttaatagaatggagagttctataaggttgctacgcttacggaagaggatggctacatttaataatattgccacccaggtggaaatactcgcaaaaaggaagttatcgtactgtcatttggcccaaatgaagtatttgtttccagaagcaatccagattaagagggtacttctacatgacgagaaaagcctatgcatgtatgctgatatggaaatcatacttgtaatggatgttgtggaatacacaagtactgatcactctccatccatgacaatttgcgatgctttttactcgaagcttttgacatttttggatgctcatcataagtcacaattgctatttatgcagggtacagacattccagaggcaatcttaccagaaccctttaacttgaggtcaaggggccagttaaatcttgaggcatcacataatggacatgctgctgagccacatctgcaaggcaccactaaggatggattctcaaatgcttcccacttcccacaatcttttcgaaagctaatgtcccagaaagtcattactgatggagctgaaaggactcaattgctacttgatccaacaaaactgagctctgtgagtgcttatgatacagaaggaacaaacagaagccctaaaaagcaagacaaacatgcttcagttacagtgaactctgaaatttctgctactccaagccgtcatttgatctctcgttgtcaagagggtacgccaaaacaagagaccttagaatcaccactgttggctcaaacaccagcaactcagacacccaaaaggcaattgcccactccacttgagaaacttgaggccacatgtggacacatttctgaaccacgttcagctagttctgcccgcagatcactaaatacatctttaaaatttgaagggggaagcccttcttatcatgatagaatggaacatgtggctacatctaaaattggaattctctcggaagattcatctagtttcaacaagtcattagaggagaatggtcctgtcttctttactgatagagacaaaatcaatctggcagacccagtgggtgtccaggaaaagatggcttcgttacgttccacatttggcatcgtctgcgatatttctcattctatcaagaattcgctaattacaaaacaggagcttttccataatattcttgccaacaacttggagatagaacagatgggagagatagaagagcagctacatattttagaggatctggctcccaattggatatctaagaaggtgataaatggagaagaaatactttacagctttgaaactatagcagatcagaattcagtgtgggaaaggcttgtagaagctgtgtgaggtgtggaatagctgggattggtttaaagctaaagaatcagccgcatagtactatgtatgtaacgctaacggaacccatcaaacagccacattttctcatcatggaatcctcaggattgctcgtcttattcaattttaattttttcttctgttgcattgctaatgtgctaattacatgcttaatactgaaatttctacaagacataaatttgcctgggtctaattctgcttaatatttcacagcactgacatgctctgtgagctttccttggatattttcagtcctaagaaatagaatttgtgtggaattg

SEQ ID NO: 4178 - DNA, 2335 bp, Zea Mays
gttcctaatctggcatgagtatatgatccctactccctagtctgtatgaacaggaaatgtttgttggagagggcagggaaaacatctaggtcataggtttccgaacgggttggctttgatggagcaatagaacaagtgggctgaaagcttgaagtaatgaacggctcgagttgtgcagctttgccccgcatttttttttgaaaagtgcagcgttcctccgtttcgcttctcccgctcccttccgcaacggcgtactccctccgccgcccgccgaccgccgactcccgccgcaaaatcctgcgtcagaagcgccgattctcggacgtcctccggatctgagacaccgagcgcactacgagctgtagctgtagtgacctaaaaatgagtgagggggatgctactcagcttgcccttgagaaaggattaccgcaagtgtctaatgatgatggttcgagtagtcctgcaactatgcacaagttgaaagttgacacagaagatgctggaagcaaaattgaatcacccactccagagaagcttgaatctagaagcaaaggggttgttgtgagttcgttggcaaggaatttacttgcagagaggtacaaagatagatttgcaaatcagttcctggaagatgagggtgacatagatgatgaagactataatgacagtatttcgccaggcacaaggatttactgaatctttttaatagaatggagagttctataaggttgctacgcttacggaagaggatggctacatttaataatattgccacccaggtggaaatactcgcaaaaaggaagttatcgtactgtcatttggcccaaatgaagtatttgtttccagaagcaatccagattaagagggtacttctacatgacgagaaaagcctatgcatgtatgctgatatggaaatcatacttgtaatggatgttgtggaatacacaagtactgatcactctccatccatgacaatttgcgatgctttttactcgaagcttttgacatttttggatgctcatcataagggtacagacattccagaggcaatcttaccagaaccctttaacttgaggtcaaggggccagttaaatcttgaggcatcacataatggacatgctgctgagccacatctgcaaggcaccactaaggatggattctcaaatgcttcccacttcccacaatcttttcgaaagctaatgtcccagaaagtcattactgatggagctgaaaggactcaattgctacttgatccaacaaaactgagctctgtgagtgcttatgatacagaaggaacaaacagaagccctaaaaagcaagacaaacatgcttcagttacagtgaactctgaaatttctgctactccaagccgtcatttgatctctcgttgtcaagagggtacgccaaaacaagagaccttagaatcaccactgttggctcaaacaccagcaactcagacacccaaaaggcaattgcccactccacttgagaaacttgaggccacatgtggacacatttctgaaccacgttcagctagttctgcccgcagatcactaaatacatctttaaaatttgaagggggaagcccttcttatcatgatagaatggaacatgtggctacatctaaaattggaattctctcggaagattcatctagtttcaacaagtcattagaggagaatggtcctgtcttctttactgatagagacaaaatcaatctggcagacccagtgggtgtccaggaaaagatggcttcgttacgttccacatttggcatcgtctgcgatatttctcattctatcaagaattcgctaattacaaaacaggagcttttccataatattcttgccaacaacttggagatagaacagatgggagagatagaagagcagctacatattttagaggatctggctcccaattggatatctaagaaggtgataaatggagaagaaatactttacagctttgaaactatagcagatcagaattcagtgtgggaaaggcttgtagaagctgtgtgaggtgtggaatagctgggattggtttaaagctaaagaatcagccgcatagtactatgtatgtaacgctaacggaacccatcaaacagccacattttctcatcatggaatcctcaggattgctcgtcttattcaattttaattttttcttctgttgcattgctaatgtgctaattacatgcttaatactgaaatttctacaagacataaatttgcctgggtctaattctgcttaatatttcacagcactgacatgctctgtgagctttccttggatattttcagtcctaagaaatagaatttgtgtggaattg

SEQ ID NO: 4179 - DNA, 2248 bp, Zea Mays
gttcctaatctggcatgagtatatgatccctactccctagtctgtatgaacaggaaatgtttgttggagagggcagggaaaacatctaggtcataggtttccgaacgggttggctttgatggagcaatagaacaagtgggctgaaagcttgaagtaatgaacggctcgagttgtgcagctttgccccgcatttttttttgaaaagtgcagcgttcctccgtttcgcttctcccgctcccttccgcaacggcgtactccctccgccgcccgccgaccgccgactcccgccgcaaaatcctgcgtcagaagcgccgattctcggacgtcctccggatctgagacaccgagcgcactacgagctgtagcttgacctaaaaatgagtgagggggatgctactcagcttgcccttgagaaaggattaccgcaagtgtctaatgatgatggttcgagtagtcctgcaactatgcacaagttgaaagttgacacagaagatgctggaagcaaaattgaatcacccactccagagaagcttgaatctagaagcaaaggggttgttgtgagttcgttggcaaggaatttacttgcagagaggcacaaggatttactgaatctttttaatagaatggagagttctataaggttgctacgcttacggaagaggatggctacatttaataatattgccacccaggtggaaatactcgcaaaaaggaagttatcgtactgtcatttggcccaaatgaagtatttgtttccagaagcaatccagattaagagggtacttctacatgacgagaaaagcctatgcatgtatgctgatatggaaatcatacttgtaatggatgttgtggaatacacaagtactgatcactctccatccatgacaatttgcgatgctttttactcgaagcttttgacatttttggatgctcatcataagggtacagacattccagaggcaatcttaccagaaccctttaacttgaggtcaaggggccagttaaatcttgaggcatcacataatggacatgctgctgagccacatctgcaaggcaccactaaggatggattctcaaatgcttcccacttcccacaatcttttcgaaagctaatgtcccagaaagtcattactgatggagctgaaaggactcaattgctacttgatccaacaaaactgagctctgtgagtgcttatgatacagaaggaacaaacagaagccctaaaaagcaagacaaacatgcttcagttacagtgaactctgaaatttctgctactccaagccgtcatttgatctctcgttgtcaagagggtacgccaaaacaagagaccttagaatcaccactgttggctcaaacaccagcaactcagacacccaaaaggcaattgcccactccacttgagaaacttgaggccacatgtggacacatttctgaaccacgttcagctagttctgcccgcagatcactaaatacatctttaaaatttgaagggggaagcccttcttatcatgatagaatggaacatgtggctacatctaaaattggaattctctcggaagattcatctagtttcaacaagtcattagaggagaatggtcctgtcttctttactgatagagacaaaatcaatctggcagacccagtgggtgtccaggaaaagatggcttcgttacgttccacatttggcatcgtctgcgatatttctcattctatcaagaattcgctaattacaaaacaggagcttttccataatattcttgccaacaacttggagatagaacagatgggagagatagaagagcagctacatattttagaggatctggctcccaattggatatctaagaaggtgataaatggagaagaaatactttacagctttgaaactatagcagatcagaattcagtgtgggaaaggcttgtagaagctgtgtgaggtgtggaatagctgggattggtttaaagctaaagaatcagccgcatagtactatgtatgtaacgctaacggaacccatcaaacagccacattttctcatcatggaatcctcaggattgctcgtcttattcaattttaattttttcttctgttgcattgctaatgtgctaattacatgcttaatactgaaatttctacaagacataaatttgcctgggtctaattctgcttaatatttcacagcactgacatgctctgtgagctttccttggatattttcagtcctaagaaatagaatttgtgtggaattg

SEQ ID NO: 4180 - DNA, 2328 bp, Zea Mays
gttcctaatctggcatgagtatatgatccctactccctagtctgtatgaacaggaaatgtttgttggagagggcagggaaaacatctaggtcataggtttccgaacgggttggctttgatggagcaatagaacaagtgggctgaaagcttgaagtaatgaacggctcgagttgtgcagctttgccccgcatttttttttgaaaagtgcagcgttcctccgtttcgcttctcccgctcccttccgcaacggcgtactccctccgccgcccgccgaccgccgactcccgccgcaaaatcctgcgtcagaagcgccgattctcggacgtcctccggatctgagacaccgagcgcactacgagctgtagcttgacctaaaaatgagtgagggggatgctactcagcttgcccttgagaaaggattaccgcaagtgtctaatgatgatggttcgagtagtcctgcaactatgcacaagttgaaagttgacacagaagatgctggaagcaaaattgaatcacccactccagagaagcttgaatctagaagcaaaggggttgttgtgagttcgttggcaaggaatttacttgcagagaggtacaaagatagatttgcaaatcagttcctggaagatgagggtgacatagatgatgaagactataatgacagtatttcgccaggcatgagccgatctcagagatcaagaagcattgaacttctggagaagcacaaggatttactgaatctttttaatagaatggagagttctataaggttgctacgcttacggaagaggatggctacatttaataatattgccacccaggtggaaatactcgcaaaaaggaagttatcgtactgtcatttggcccaaatgaagtatttgtttccagaagcaatccagattaagagggtacttctacatgacgagaaaagcctatgcatgtatgctgatatggaaatcatacttgtaatggatgttgtggaatacacaagtactgatcactctccatccatgacaatttgcgatgctttttactcgaagcttttgacatttttggatgctcatcataagggtacagacattccagaggcaatcttaccagaaccctttaacttgaggtcaaggggccagttaaatcttgaggcatcacataatggacatgctgctgagccacatctgcaaggcaccactaaggatggattctcaaatgcttcccacttcccacaatcttttcgaaagctaatgtcccagaaagtcattactgatggagctgaaaggactcaattgctacttgatccaacaaaactgagctctgtgagtgcttatgatacagaaggaacaaacagaagccctaaaaagcaagacaaacatgcttcagttacagtgaactctgaaatttctgctactccaagccgtcatttgatctctcgttgtcaagagggtacgccaaaacaagagaccttagaatcaccactgttggctcaaacaccagcaactcagacacccaaaaggcaattgcccactccacttgagaaacttgaggccacatgtggacacatttctgaaccacgttcagctagttctgcccgcagatcactaaatacatctttaaaatttgaagggggaagcccttcttatcatgatagaatggaacatgtggctacatctaaaattggaattctctcggaagattcatctagtttcaacaagtcattagagacccagtgggtgtccaggaaaagatggcttcgttacgttccacatttggcatcgtctgcgatatttctcattctatcaagaattcgctaattacaaaacaggagcttttccataatattcttgccaacaacttggagatagaacagatgggagagatagaagagcagctacatattttagaggatctggctcccaattggatatctaagaaggtgataaatggagaagaaatactttacagctttgaaactatagcagatcagaattcagtgtgggaaaggcttgtagaagctgtgtgaggtgtggaatagctgggattggtttaaagctaaagaatcagccgcatagtactatgtatgtaacgctaacggaacccatcaaacagccacattttctcatcatggaatcctcaggattgctcgtcttattcaattttaattttttcttctgttgcattgctaatgtgctaattacatgcttaatactgaaatttctacaagacataaatttgcctgggtctaattctgcttaatatttcacagcactgacatgctctgtgagctttccttggatattttcagtcctaagaaatagaatttgtgtggaattg

SEQ ID NO: 4181 - DNA, 2017 bp, Zea Mays
ggtgtaattttttattattctaatttttattataatttctatcatgcgtgtatatgttctaataaatagaaaagtgtgaacatgtggcagagtctaagtaatgccttgtacgctatgtcgtggacctatgattgaattagagaaataaagtccaaccctagaaaactctcgcatcgtcactccaaatcagccgctagggctgcattcatccacctcgtgcttatcgcctactccaacgccgactcctgctcgtcggtcgtcgcctcgtccagctctctccgcccctccagcctagcctagcccctcctgctcactgcgtcgtctccagaatccggcctacgaccgttggcggctggtgcccccaccggcaatcggtggtcatggtctgtccctgctcactccattcagatccgctatgcgcgaggcgcaactggatctatcgtattcctggttgctctctccctctccgcgggcgatgcgcctctctaggttctaccggcgtccgtccaaccggtgttcagcgtgccttcgcaggcccccttctctgccttcgatgagtgcatttgatcagtattgggaggctgcacttgatgtgactatatgttggaagaaatcctttcttgtcattgctcgaggttgttaaagaagagcagatgtgctattttggttggtctaaaatcaggggtggaccaacagggggtccaggggggccacggcacaccctaggccagcccagcaaggaccccacccctttgtcgcccagccgctagcacgtagctaccacgactagtgcccaggtcaccaccgccatgcctagcgccaagccaccactcacccgcacccaacaccaagtcgccgcaatcctagtgcccattgtacatgtgaacatataaagctaccatgatcatggaggtagcaggtgcagagacacccatcaaggtttcttcgtctctagtcatttgttacgcaaattcaaatacaggtaaaagtagcattgtataaggtgcagattgatttgtacagatgaggttgcttctgaaaattgacaggaaaattccttggtatacttgtatgcaggcttttggaaagttgaggcctatttgtgcacaatagtatactaaccattgaagattattactctcatctattgcaggtacattattctgaaactcagttcatgaaatggaatgagttcagtttcaatatagcagaatagcatgctagcagcaaacatgcacgtgcccagacttcattcagtaacatgtggtggtgacatggcacaacaagaacttgaagaagtagacatgttgctgctgcctgcagggtgacgtctatggtgttgtgctgcgggcaaggcccacacaatgtgatcgggctgcacgccaatgttcaacatgtgccccaaccagaatgtgtatgctactactaatataacattcgtcattggttggttcaccccaagaggtttgctgcatgttcatggagctggtggataataaattttagttgttctttttgtggtttattagatgacatcaattagtgttcaattgagccttagagtaggatgaatacaactgtcttaagtttctttgttccagcagattgtttgggggcaaggttacctatgaacttcaagaattggtcttatgatattgttagtttgtacaacttagtgttaggttgctcgacttcttcatgaatgaggtgttagacattggtcgatcatgcagggttgaaggtgcttcatataactaaatctaccatgactttctaggaaaagatggaatggaactcaatttttggtggccgtacaagtgtggaaacttgaattcatatatacttacaatcaacattagcgcaaacagttgaccaagtttttcaattagtattttagtttgaatttagtgtgcaataatgtatgagttatttaacaatgcttattcatgacatattgaatgatacttatatttattatatcaattatgatgttattaaatatatgtgtgcatgtata

SEQ ID NO: 4182 - DNA, 3313 bp, Zea Mays
ggtgtaattttttattattctaatttttattataatttctatcatgcgtgtatatgttctaataaatagaaaagtgtgaacatgtggcagagtctaagtaatgccttgtacgctatgtcgtggacctatgattgaattagagaaataaagtccaaccctagaaaactctcgcatcgtcactccaaatcagccgctagggctgcattcatccacctcgtgcttatcgcctactccaacgccgactcctgctcgtcggtcgtcgcctcgtccagctctctccgcccctccagcctagcctagcccctcctgctcactgcgtcgtctccagaatccggcctacgaccgttggcggctggtgcccccaccggcaatcggtggtcatggtctgtccctgctcactccattcagatccgctatgcgcgaggcgcaactggatctatcgtattcctggttgctctctccctctccgcgggcgatgcgcctctctaggttctaccggcgtccgtccaaccggtgttcagcgtgccttcgcaggcccccttctctgccttcgatgagtgcatttggtgagtggtgacacaactgggcggagtggtgaactagtgattgatgcgcttgccggcgacttgcaaactaagtcagaatcggcttctcatcttcctatccctttgtgtgatactactactctgtatgtggaaaaaataattattccctggtttaatattatttgttcttaagtctgaaaattcactcatatagttcatttgtgcagtgttttttagtccttagctattagagaatgatgcctggtaatacctgaatcggccactgcattttattatcctgttgttattaaatttggctattagataatgccagcgttttttattatcctgaatcggccactgcattttttagtccttagctattagagaatgatgtctgaaaattcactcgtatagataaggaacgttgtctagcaacaagagagatcatgtcacaaaaaatcctcaagctaaaacaagaacatgttacactatattttattatcctgttgttattaaatttggctcggggcttcggtaatacctgaatcggccactgcatagagtagtaaacctaaaaaaaatcagactcttattgttatataatttccatggtttcttcctctatgaataggagagaaaaattgatcctagattgcagtctactaagatgcatgcaatgcgttatctccttatacagttactgttacaagttcttctccatccagatcagtattgggaggctgcacttgatgtgactatatgttggaagaaatcctttcttgtcattgctcgaggtgataactccagtgactatattgtcgaccttcacttctcgctacaacaaagatgcggtccttcttaccatccttttactatctgatttccctaaaataattttgtttgactattcaaatcatgcttggagaggatcatggcgtgggatcagaaagagcaccaacaattttctacatgttgtacaatggggttatgattacttgaattttgtcatttgttttagtaattatgtgatctgcaattgatctagcacaagcacattcaaattgaccaatttctactagtgctataactttattccgaatggatggcttccttccggaaagactaaactgaataattatgtcaaagttgtttcactagtttggcctaataggtattgatctatggtatctagactacatattgtactatatggttgattgttctgatttcgggcttggttaatctgacgtttctagcatccaaacatatagatatatgtcagctacctgtgtaccatgcacgaataatcctataaattcaggttgaatattttctgcatgtaacctaaaacttctacgctatggtctttcacttacaggttgttaaagaagagcagatgtgctattttggttggtctaaaatcaggggtggaccaacagggggtccaggggggccacggcacaccctaggccagcccagcaaggaccccacccctttgtcgcccagccgctagcacgtagctaccacgactagtgcccaggtcaccaccgccatgcctagcgccaagccaccactcacccgcacccaacaccaagtcgccgcaatcctagtgcccattgtacatgtgaacatataaagctaccatgatcatggaggtagcaggtgcagagacacccatcaaggtttcttcgtctctagtcatttgttacgcaaattcaaatacaggcttttggaaagttgaggcctatttgtgcacaatagtatactaaccattgaagattattactctcatctattgcaggtacattattctgaaactcagttcatgaaatggaatgagttcagtttcaatatagcagaatagcatgctagcagcaaacatgcacgtgcccagacttcattcagtgcttcatggtgggcttagttgcatgaagggttctcagctttgagattaattaccaatgcaccttttgagagctcaaaagatggtcttcgcattgagctataacatgtggtggtgacatggcacaacaagaacttgaagaagtagacatgttgctgctgcctgcagggtgacgtctatggtgttgtgctgcgggcaaggcccacacaatgtgatcgggctgcacgccaatgttcaacatgtgccccaaccagaatgtgtatgctactactaatataacattcgtcattggttggttcaccccaagaggtttgctgcatgttcatggagctggtggataataaattttagttgttctttttgtggtttattagatgacatcaattagtgttcaattgagccttagagtaggatgaatacaactgtcttaagtttctttgttccagcagattgtttgggggcaaggttacctatgaacttcaagaattggtcttatgatattgttagtttgtacaacttagtgttaggttgctcgacttcttcatgaatgaggtgttagacattggtcgatcatgcagggttgaaggtgcttcatataactaaatctaccatgactttctaggaaaagatggaatggaactcaatttttggtggccgtacaagtgtggaaacttgaattcatatatacttacaatcaacattagcgcaaacagttgaccaagtttttcaattagtattttagtttgaatttagtgtgcaataatgtatgagttatttaacaatgcttattcatgacatattgaatgatacttatatttattatatcaattatgatgttattaaatatatgtgtgcatgtata

SEQ ID NO: 4183 - DNA, 3330 bp, Zea Mays
ggtgtaattttttattattctaatttttattataatttctatcatgcgtgtatatgttctaataaatagaaaagtgtgaacatgtggcagagtctaagtaatgccttgtacgctatgtcgtggacctatgattgaattagagaaataaagtccaaccctagaaaactctcgcatcgtcactccaaatcagccgctagggctgcattcatccacctcgtgcttatcgcctactccaacgccgactcctgctcgtcggtcgtcgcctcgtccagctctctccgcccctccagcctagcctagcccctcctgctcactgcgtcgtctccagaatccggcctacgaccgttggcggctggtgcccccaccggcaatcggtggtcatggtctgtccctgctcactccattcagatccgctatgcgcgaggcgcaactggatctatcgtattcctggttgctctctccctctccgcgggcgatgcgcctctctaggttctaccggcgtccgtccaaccggtgttcagcgtgccttcgcaggcccccttctctgccttcgatgagtgcatttggtgagtggtgacacaactgggcggagtggtgaactagtgattgatgcgcttgccggcgacttgcaaactaagtcagaatcggcttctcatcttcctatccctttgtgtgatactactactctgtatgtggaaaaaataattattccctggtttaatattatttgttcttaagtctgaaaattcactcatatagttcatttgtgcagtgttttttagtccttagctattagagaatgatgcctggtaatacctgaatcggccactgcattttattatcctgttgttattaaatttggctattagataatgccagcgttttttattatcctgaatcggccactgcattttttagtccttagctattagagaatgatgtctgaaaattcactcgtatagataaggaacgttgtctagcaacaagagagatcatgtcacaaaaaatcctcaagctaaaacaagaacatgttacactatattttattatcctgttgttattaaatttggctcggggcttcggtaatacctgaatcggccactgcatagagtagtaaacctaaaaaaaatcagactcttattgttatataatttccatggtttcttcctctatgaataggagagaaaaattgatcctagattgcagtctactaagatgcatgcaatgcgttatctccttatacagttactgttacaagttcttctccatccagatcagtattgggaggctgcacttgatgtgactatatgttggaagaaatcctttcttgtcattgctcgaggtgataactccagtgactatattgtcgaccttcacttctcgctacaacaaagatgcggtccttcttaccatccttttactatctgatttccctaaaataattttgtttgactattcaaatcatgcttggagaggatcatggcgtgggatcagaaagagcaccaacaattttctacatgttgtacaatggggttatgattacttgaattttgtcatttgttttagtaattatgtgatctgcaattgatctagcacaagcacattcaaattgaccaatttctactagtgctataactttattccgaatggatggcttccttccggaaagactaaactgaataattatgtcaaagttgtttcactagtttggcctaataggtattgatctatggtatctagactacatattgtactatatggttgattgttctgatttcgggcttggttaatctgacgtttctagcatccaaacatatagatatatgtcagctacctgtgtaccatgcacgaataatcctataaattcaggttgaatattttctgcatgtaacctaaaacttctacgctatggtctttcacttacaggttgttaaagaagagcagatgtgctattttggttggtctaaaatcaggggtggaccaacagggggtccaggggggccacggcacaccctaggccagcccagcaaggaccccacccctttgtcgcccagccgctagcacgtagctaccacgactagtgcccaggtcaccaccgccatgcctagcgccaagccaccactcacccgcacccaacaccaagtcgccgcaatcctagtgcccattgtacatgtgaacatataaagctaccatgatcatggaggtagcaggtgcagagacacccatcaaggtttcttcgtctctagtcatttgttacgcaaattcaaatacaggcttttggaaagttgaggcctatttgtgcacaatagtatactaaccattgaagattattactctcatctattgcaggtacattattctgaaactcagttcatgaaatggaatgagttcagtttcaatatagcagaatagcatgctagcagcaaacatgcacgtgcccagacttcattcaggtgacatctttcattgtctcttctcaatcatttatagtgtcatttcgagttttcatggcttgtattgtgctatgagtttttagtgcttcatggtgggcttagttgcatgaagggttctcagctttgagattaattaccaatgcaccttttgagagctcaaaagatggtcttcgcattgagctaggtgacgtctatggtgttgtgctgcgggcaaggcccacacaatgtgatcgggctgcacgccaatgttcaacatgtgccccaaccagaatgtgtatgctactactaatataacattcgtcattggttggttcaccccaagaggtttgctgcatgttcatggagctggtggataataaattttagttgttctttttgtggtttattagatgacatcaattagtgttcaattgagccttagagtaggatgaatacaactgtcttaagtttctttgttccagcagattgtttgggggcaaggttacctatgaacttcaagaattggtcttatgatattgttagtttgtacaacttagtgttaggttgctcgacttcttcatgaatgaggtgttagacattggtcgatcatgcagggttgaaggtgcttcatataactaaatctaccatgactttctaggaaaagatggaatggaactcaatttttggtggccgtacaagtgtggaaacttgaattcatatatacttacaatcaacattagcgcaaacagttgaccaagtttttcaattagtattttagtttgaatttagtgtgcaataatgtatgagttatttaacaatgcttattcatgacatattgaatgatacttatatttattatatcaattatgatgttattaaatatatgtgtgcatgtata

SEQ ID NO: 4184 - DNA, 3308 bp, Zea Mays
ggtgtaattttttattattctaatttttattataatttctatcatgcgtgtatatgttctaataaatagaaaagtgtgaacatgtggcagagtctaagtaatgccttgtacgctatgtcgtggacctatgattgaattagagaaataaagtccaaccctagaaaactctcgcatcgtcactccaaatcagccgctagggctgcattcatccacctcgtgcttatcgcctactccaacgccgactcctgctcgtcggtcgtcgcctcgtccagctctctccgcccctccagcctagcctagcccctcctgctcactgcgtcgtctccagaatccggcctacgaccgttggcggctggtgcccccaccggcaatcggtggtcatggtctgtccctgctcactccattcagatccgctatgcgcgaggcgcaactggatctatcgtattcctggttgctctctccctctccgcgggcgatgcgcctctctaggttctaccggcgtccgtccaaccggtgttcagcgtgccttcgcaggcccccttctctgccttcgatgagtgcatttggtgagtggtgacacaactgggcggagtggtgaactagtgattgatgcgcttgccggcgacttgcaaactaagtcagaatcggcttctcatcttcctatccctttgtgtgatactactactctgtatgtggaaaaaataattattccctggtttaatattatttgttcttaagtctgaaaattcactcatatagttcatttgtgcagtgttttttagtccttagctattagagaatgatgcctggtaatacctgaatcggccactgcattttattatcctgttgttattaaatttggctattagataatgccagcgttttttattatcctgaatcggccactgcattttttagtccttagctattagagaatgatgtctgaaaattcactcgtatagataaggaacgttgtctagcaacaagagagatcatgtcacaaaaaatcctcaagctaaaacaagaacatgttacactatattttattatcctgttgttattaaatttggctcggggcttcggtaatacctgaatcggccactgcatagagtagtaaacctaaaaaaaatcagactcttattgttatataatttccatggtttcttcctctatgaataggagagaaaaattgatcctagattgcagtctactaagatgcatgcaatgcgttatctccttatacagttactgttacaagttcttctccatccagatcagtattgggaggctgcacttgatgtgactatatgttggaagaaatcctttcttgtcattgctcgaggtgataactccagtgactatattgtcgaccttcacttctcgctacaacaaagatgcggtccttcttaccatccttttactatctgatttccctaaaataattttgtttgactattcaaatcatgcttggagaggatcatggcgtgggatcagaaagagcaccaacaattttctacatgttgtacaatggggttatgattacttgaattttgtcatttgttttagtaattatgtgatctgcaattgatctagcacaagcacattcaaattgaccaatttctactagtgctataactttattccgaatggatggcttccttccggaaagactaaactgaataattatgtcaaagttgtttcactagtttggcctaataggtattgatctatggtatctagactacatattgtactatatggttgattgttctgatttcgggcttggttaatctgacgtttctagcatccaaacatatagatatatgtcagctacctgtgtaccatgcacgaataatcctataaattcaggttgaatattttctgcatgtaacctaaaacttctacgctatggtctttcacttacaggttgttaaagaagagcagatgtgctattttggttggtctaaaatcaggggtggaccaacagggggtccaggggggccacggcacaccctaggccagcccagcaaggaccccacccctttgtcgcccagccgctagcacgtagctaccacgactagtgcccaggtcaccaccgccatgcctagcgccaagccaccactcacccgcacccaacaccaagtcgccgcaatcctagtgcccattgtacatgtgaacatataaagctaccatgatcatggaggtagcaggtgcagagacacccatcaaggtttcttcgtctctagtcatttgttacgcaaattcaaatacaggtaaaagtagcattgtataaggtgcagattgatttgtacagatgaggttgcttctgaaaattgacaggaaaattccttggtatacttgtatgcaggcttttggaaagttgaggcctatttgtgcacaatagtatactaaccattgaagattattactctcatctattgcaggtacattattctgaaactcagttcatgaaatggaatgagttcagtttcaatatagcagaatagcatgctagcagcaaacatgcacgtgcccagacttcattcagtaacatgtggtggtgacatggcacaacaagaacttgaagaagtagacatgttgctgctgcctgcagggtgacgtctatggtgttgtgctgcgggcaaggcccacacaatgtgatcgggctgcacgccaatgttcaacatgtgccccaaccagaatgtgtatgctactactaatataacattcgtcattggttggttcaccccaagaggtttgctgcatgttcatggagctggtggataataaattttagttgttctttttgtggtttattagatgacatcaattagtgttcaattgagccttagagtaggatgaatacaactgtcttaagtttctttgttccagcagattgtttgggggcaaggttacctatgaacttcaagaattggtcttatgatattgttagtttgtacaacttagtgttaggttgctcgacttcttcatgaatgaggtgttagacattggtcgatcatgcagggttgaaggtgcttcatataactaaatctaccatgactttctaggaaaagatggaatggaactcaatttttggtggccgtacaagtgtggaaacttgaattcatatatacttacaatcaacattagcgcaaacagttgaccaagtttttcaattagtattttagtttgaatttagtgtgcaataatgtatgagttatttaacaatgcttattcatgacatattgaatgatacttatatttattatatcaattatgatgttattaaatatatgtgtgcatgtata

SEQ ID NO: 4185 - DNA, 3193 bp, Zea Mays
ggtgtaattttttattattctaatttttattataatttctatcatgcgtgtatatgttctaataaatagaaaagtgtgaacatgtggcagagtctaagtaatgccttgtacgctatgtcgtggacctatgattgaattagagaaataaagtccaaccctagaaaactctcgcatcgtcactccaaatcagccgctagggctgcattcatccacctcgtgcttatcgcctactccaacgccgactcctgctcgtcggtcgtcgcctcgtccagctctctccgcccctccagcctagcctagcccctcctgctcactgcgtcgtctccagaatccggcctacgaccgttggcggctggtgcccccaccggcaatcggtggtcatggtctgtccctgctcactccattcagatccgctatgcgcgaggcgcaactggatctatcgtattcctggttgctctctccctctccgcgggcgatgcgcctctctaggttctaccggcgtccgtccaaccggtgttcagcgtgccttcgcaggcccccttctctgccttcgatgagtgcatttggtgagtggtgacacaactgggcggagtggtgaactagtgattgatgcgcttgccggcgacttgcaaactaagtcagaatcggcttctcatcttcctatccctttgtgtgatactactactctgtatgtggaaaaaataattattccctggtttaatattatttgttcttaagtctgaaaattcactcatatagttcatttgtgcagtgttttttagtccttagctattagagaatgatgcctggtaatacctgaatcggccactgcattttattatcctgttgttattaaatttggctattagataatgccagcgttttttattatcctgaatcggccactgcattttttagtccttagctattagagaatgatgtctgaaaattcactcgtatagataaggaacgttgtctagcaacaagagagatcatgtcacaaaaaatcctcaagctaaaacaagaacatgttacactatattttattatcctgttgttattaaatttggctcggggcttcggtaatacctgaatcggccactgcatagagtagtaaacctaaaaaaaatcagactcttattgttatataatttccatggtttcttcctctatgaataggagagaaaaattgatcctagattgcagtctactaagatgcatgcaatgcgttatctccttatacagttactgttacaagttcttctccatccagatcagtattgggaggctgcacttgatgtgactatatgttggaagaaatcctttcttgtcattgctcgaggttgttaaagaagagcagatgtgctattttggttggtctaaaatcaggggtggaccaacagggggtccaggggggccacggcacaccctaggccagcccagcaaggaccccacccctttgtcgcccagccgctagcacgtagctaccacgactagtgcccaggtcaccaccgccatgcctagcgccaagccaccactcacccgcacccaacaccaagtcgccgcaatcctagtgcccattgtacatgtgaacatataaagctaccatgatcatggaggtagcaggtgcagagacacccatcaaggtttcttcgtctctagtcatttgttacgcaaattcaaatacaggtaaaagtagcattgtataaggtgcagattgatttgtacagatgaggttgcttctgaaaattgacaggaaaattccttggtatacttgtatgcaggcttttggaaagttgaggcctatttgtgcacaatagtatactaaccattgaagattattactctcatctattgcaggtacattattctgaaactcagttcatgaaatggaatgagttcagtttcaatatagcagaatagcatgctagcagcaaacatgcacgtgcccagacttcattcaggtgacatctttcattgtctcttctcaatcatttatagtgtcatttcgagttttcatggcttgtattgtgctatgagtttttagtgcttcatggtgggcttagttgcatgaagggttctcagctttgagattaattaccaatgcaccttttgagagctcaaaagatggtcttcgcattgagctagtaagttagaattttgttaaaatttgcagatttagtaaagttattatttattggttttttaaaaaaatttgactcggcgaggataaaatagccctgggcatcatatatatagagatgaccttcttgtagtatcttatataaaaaatttgttacggcataccctatataaaaaacctaggtccgccactgcctaaaatcatatagaaaagagtgttgctttggtctacaagtctgaatctatattattgctatatggatgagcttcttactgctaattaaattacagtaacatgtggtggtgacatggcacaacaagaacttgaagaagtagacatgttgctgctgcctgcagggtgacgtctatggtgttgtgctgcgggcaaggcccacacaatgtgatcgggctgcacgccaatgttcaacatgtgccccaaccagaatgtgtatgctactactaatataacattcgtcattggttggttcaccccaagaggtttgctgcatgttcatggagctggtggataataaattttagttgttctttttgtggtttattagatgacatcaattagtgttcaattgagccttagagtaggatgaatacaactgtcttaagtttctttgttccagcagattgtttgggggcaaggttacctatgaacttcaagaattggtcttatgatattgttagtttgtacaacttagtgttaggttgctcgacttcttcatgaatgaggtgttagacattggtcgatcatgcagggttgaaggtgcttcatataactaaatctaccatgactttctaggaaaagatggaatggaactcaatttttggtggccgtacaagtgtggaaacttgaattcatatatacttacaatcaacattagcgcaaacagttgaccaagtttttcaattagtattttagtttgaatttagtgtgcaataatgtatgagttatttaacaatgcttattcatgacatattgaatgatacttatatttattatatcaattatgatgttattaaatatatgtgtgcatgtata

SEQ ID NO: 4186 - DNA, 3065 bp, Zea Mays
ggtgtaattttttattattctaatttttattataatttctatcatgcgtgtatatgttctaataaatagaaaagtgtgaacatgtggcagagtctaagtaatgccttgtacgctatgtcgtggacctatgattgaattagagaaataaagtccaaccctagaaaactctcgcatcgtcactccaaatcagccgctagggctgcattcatccacctcgtgcttatcgcctactccaacgccgactcctgctcgtcggtcgtcgcctcgtccagctctctccgcccctccagcctagcctagcccctcctgctcactgcgtcgtctccagaatccggcctacgaccgttggcggctggtgcccccaccggcaatcggtggtcatggtctgtccctgctcactccattcagatccgctatgcgcgaggcgcaactggatctatcgtattcctggttgctctctccctctccgcgggcgatgcgcctctctaggttctaccggcgtccgtccaaccggtgttcagcgtgccttcgcaggcccccttctctgccttcgatgagtgcatttgtattgggaggctgcacttgatgtgactatatgttggaagaaatcctttcttgtcattgctcgaggtgataactccagtgactatattgtcgaccttcacttctcgctacaacaaagatgcggtccttcttaccatccttttactatctgatttccctaaaataattttgtttgactattcaaatcatgcttggagaggatcatggcgtgggatcagaaagagcaccaacaattttctacatgttgtacaatggggttatgattacttgaattttgtcatttgttttagtaattatgtgatctgcaattgatctagcacaagcacattcaaattgaccaatttctactagtgctataactttattccgaatggatggcttccttccggaaagactaaactgaataattatgtcaaagttgtttcactagtttggcctaataggtattgatctatggtatctagactacatattgtactatatggttgattgttctgatttcgggcttggttaatctgacgtttctagcatccaaacatatagatatatgtcagctacctgtgtaccatgcacgaataatcctataaattcaggttgaatattttctgcatgtaacctaaaacttctacgctatggtctttcacttacaggttgttaaagaagagcagatgtgctattttggttggtctaaaatcaggggtggaccaacagggggtccaggggggccacggcacaccctaggccagcccagcaaggaccccacccctttgtcgcccagccgctagcacgtagctaccacgactagtgcccaggtcaccaccgccatgcctagcgccaagccaccactcacccgcacccaacaccaagtcgccgcaatcctagtgcccattgtacatgtgaacatataaagctaccatgatcatggaggtagcaggtgcagagacacccatcaaggtttcttcgtctctagtcatttgttacgcaaattcaaatacaggtaaaagtagcattgtataaggtgcagattgatttgtacagatgaggttgcttctgaaaattgacaggaaaattccttggtatacttgtatgcaggcttttggaaagttgaggcctatttgtgcacaatagtatactaaccattgaagattattactctcatctattgcaggtacattattctgaaactcagttcatgaaatggaatgagttcagtttcaatatagcagaatagcatgctagcagcaaacatgcacgtgcccagacttcattcaggtgacatctttcattgtctcttctcaatcatttatagtgtcatttcgagttttcatggcttgtattgtgctatgagtttttagtgcttcatggtgggcttagttgcatgaagggttctcagctttgagattaattaccaatgcaccttttgagagctcaaaagatggtcttcgcattgagctagtaagttagaattttgttaaaatttgcagatttagtaaagttattatttattggttttttaaaaaaatttgactcggcgaggataaaatagccctgggcatcatatatatagagatgaccttcttgtagtatcttatataaaaaatttgttacggcataccctatataaaaaacctaggtccgccactgcctaaaatcatatagaaaagagtgttgctttggtctacaagtctgaatctatattattgctatatggatgagcttcttactgctaattaaattacagtaacatgtggtggtgacatggcacaacaagaacttgaagaagtagacatgttgctgctgcctgcagggtgacgtctatggtgttgtgctgcgggcaaggcccacacaatgtgatcgggctgcacgccaatgttcaacatgtgccccaaccagaatgtgtatgctactactaatataacattcgtcattggttggttcaccccaagaggtttgctgcatgttcatggagctggtggataataaattttagttgttctttttgtggtttattagatgacatcaattagtgttcaattgagccttagagtaggatgaatacaactgtcttaagtttctttgttccagcagattgtttgggggcaaggttacctatgaacttcaagaattggtcttatgatattgttagtttgtacaacttagtgttaggttgctcgacttcttcatgaatgaggtgttagacattggtcgatcatgcagggttgaaggtgcttcatataactaaatctaccatgactttctaggaaaagatggaatggaactcaatttttggtggccgtacaagtgtggaaacttgaattcatatatacttacaatcaacattagcgcaaacagttgaccaagtttttcaattagtattttagtttgaatttagtgtgcaataatgtatgagttatttaacaatgcttattcatgacatattgaatgatacttatatttattatatcaattatgatgttattaaatatatgtgtgcatgtata

SEQ ID NO: 4187 - DNA, 3599 bp, Zea Mays
ggtgtaattttttattattctaatttttattataatttctatcatgcgtgtatatgttctaataaatagaaaagtgtgaacatgtggcagagtctaagtaatgccttgtacgctatgtcgtggacctatgattgaattagagaaataaagtccaaccctagaaaactctcgcatcgtcactccaaatcagccgctagggctgcattcatccacctcgtgcttatcgcctactccaacgccgactcctgctcgtcggtcgtcgcctcgtccagctctctccgcccctccagcctagcctagcccctcctgctcactgcgtcgtctccagaatccggcctacgaccgttggcggctggtgcccccaccggcaatcggtggtcatggtctgtccctgctcactccattcagatccgctatgcgcgaggcgcaactggatctatcgtattcctggttgctctctccctctccgcgggcgatgcgcctctctaggttctaccggcgtccgtccaaccggtgttcagcgtgccttcgcaggcccccttctctgccttcgatgagtgcatttggtgagtggtgacacaactgggcggagtggtgaactagtgattgatgcgcttgccggcgacttgcaaactaagtcagaatcggcttctcatcttcctatccctttgtgtgatactactactctgtatgtggaaaaaataattattccctggtttaatattatttgttcttaagtctgaaaattcactcatatagttcatttgtgcagtgttttttagtccttagctattagagaatgatgcctggtaatacctgaatcggccactgcattttattatcctgttgttattaaatttggctattagataatgccagcgttttttattatcctgaatcggccactgcattttttagtccttagctattagagaatgatgtctgaaaattcactcgtatagataaggaacgttgtctagcaacaagagagatcatgtcacaaaaaatcctcaagctaaaacaagaacatgttacactatattttattatcctgttgttattaaatttggctcggggcttcggtaatacctgaatcggccactgcatagagtagtaaacctaaaaaaaatcagactcttattgttatataatttccatggtttcttcctctatgaataggagagaaaaattgatcctagattgcagtctactaagatgcatgcaatgcgttatctccttatacagttactgttacaagttcttctccatccagatcagtattgggaggctgcacttgatgtgactatatgttggaagaaatcctttcttgtcattgctcgaggtgataactccagtgactatattgtcgaccttcacttctcgctacaacaaagatgcggtccttcttaccatccttttactatctgatttccctaaaataattttgtttgactattcaaatcatgcttggagaggatcatggcgtgggatcagaaagagcaccaacaattttctacatgttgtacaatggggttatgattacttgaattttgtcatttgttttagtaattatgtgatctgcaattgatctagcacaagcacattcaaattgaccaatttctactagtgctataactttattccgaatggatggcttccttccggaaagactaaactgaataattatgtcaaagttgtttcactagtttggcctaataggtattgatctatggtatctagactacatattgtactatatggttgattgttctgatttcgggcttggttaatctgacgtttctagcatccaaacatatagatatatgtcagctacctgtgtaccatgcacgaataatcctataaattcaggttgaatattttctgcatgtaacctaaaacttctacgctatggtctttcacttacaggttgttaaagaagagcagatgtgctattttggttggtctaaaatcaggggtggaccaacagggggtccaggggggccacggcacaccctaggccagcccagcaaggaccccacccctttgtcgcccagccgctagcacgtagctaccacgactagtgcccaggtcaccaccgccatgcctagcgccaagccaccactcacccgcacccaacaccaagtcgccgcaatcctagtgcccattgtacatgtgaacatataaagctaccatgatcatggaggtagcaggtgcagagacacccatcaaggtttcttcgtctctagtcatttgttacgcaaattcaaatacaggcttttggaaagttgaggcctatttgtgcacaatagtatactaaccattgaagattattactctcatctattgcaggtacattattctgaaactcagttcatgaaatggaatgagttcagtttcaatatagcagaatagcatgctagcagcaaacatgcacgtgcccagacttcattcagtgcttcatggtgggcttagttgcatgaagggttctcagctttgagattaattaccaatgcaccttttgagagctcaaaagatggtcttcgcattgagctagtaagttagaattttgttaaaatttgcagatttagtaaagttattatttattggttttttaaaaaaatttgactcggcgaggataaaatagccctgggcatcatatatatagagatgaccttcttgtagtatcttatataaaaaatttgttacggcataccctatataaaaaacctaggtccgccactgcctaaaatcatatagaaaagagtgttgctttggtctacaagtctgaatctatattattgctatatggatgagcttcttactgctaattaaattacagtaacatgtggtggtgacatggcacaacaagaacttgaagaagtagacatgttgctgctgcctgcagggtgacgtctatggtgttgtgctgcgggcaaggcccacacaatgtgatcgggctgcacgccaatgttcaacatgtgccccaaccagaatgtgtatgctactactaatataacattcgtcattggttggttcaccccaagaggtttgctgcatgttcatggagctggtggataataaattttagttgttctttttgtggtttattagatgacatcaattagtgttcaattgagccttagagtaggatgaatacaactgtcttaagtttctttgttccagcagattgtttgggggcaaggttacctatgaacttcaagaattggtcttatgatattgttagtttgtacaacttagtgttaggttgctcgacttcttcatgaatgaggtgttagacattggtcgatcatgcagggttgaaggtgcttcatataactaaatctaccatgactttctaggaaaagatggaatggaactcaatttttggtggccgtacaagtgtggaaacttgaattcatatatacttacaatcaacattagcgcaaacagttgaccaagtttttcaattagtattttagtttgaatttagtgtgcaataatgtatgagttatttaacaatgcttattcatgacatattgaatgatacttatatttattatatcaattatgatgttattaaatatatgtgtgcatgtata

SEQ ID NO: 4188 - DNA, 2975 bp, Zea Mays
ggtgtaattttttattattctaatttttattataatttctatcatgcgtgtatatgttctaataaatagaaaagtgtgaacatgtggcagagtctaagtaatgccttgtacgctatgtcgtggacctatgattgaattagagaaataaagtccaaccctagaaaactctcgcatcgtcactccaaatcagccgctagggctgcattcatccacctcgtgcttatcgcctactccaacgccgactcctgctcgtcggtcgtcgcctcgtccagctctctccgcccctccagcctagcctagcccctcctgctcactgcgtcgtctccagaatccggcctacgaccgttggcggctggtgcccccaccggcaatcggtggtcatggtctgtccctgctcactccattcagatccgctatgcgcgaggcgcaactggatctatcgtattcctggttgctctctccctctccgcgggcgatgcgcctctctaggttctaccggcgtccgtccaaccggtgttcagcgtgccttcgcaggcccccttctctgccttcgatgagtgcatttgatcagtattgggaggctgcacttgatgtgactatatgttggaagaaatcctttcttgtcattgctcgaggtgataactccagtgactatattgtcgaccttcacttctcgctacaacaaagatgcggtccttcttaccatccttttactatctgatttccctaaaataattttgtttgactattcaaatcatgcttggagaggatcatggcgtgggatcagaaagagcaccaacaattttctacatgttgtacaatggggttatgattacttgaattttgtcatttgttttagtaattatgtgatctgcaattgatctagcacaagcacattcaaattgaccaatttctactagtgctataactttattccgaatggatggcttccttccggaaagactaaactgaataattatgtcaaagttgtttcactagtttggcctaataggtattgatctatggtatctagactacatattgtactatatggttgattgttctgatttcgggcttggttaatctgacgtttctagcatccaaacatatagatatatgtcagctacctgtgtaccatgcacgaataatcctataaattcaggttgaatattttctgcatgtaacctaaaacttctacgctatggtctttcacttacaggttgttaaagaagagcagatgtgctattttggttggtctaaaatcaggggtggaccaacagggggtccaggggggccacggcacaccctaggccagcccagcaaggaccccacccctttgtcgcccagccgctagcacgtagctaccacgactagtgcccaggtcaccaccgccatgcctagcgccaagccaccactcacccgcacccaacaccaagtcgccgcaatcctagtgcccattgtacatgtgaacatataaagctaccatgatcatggaggtagcaggtgcagagacacccatcaaggtttcttcgtctctagtcatttgttacgcaaattcaaatacaggcttttggaaagttgaggcctatttgtgcacaatagtatactaaccattgaagattattactctcatctattgcaggtacattattctgaaactcagttcatgaaatggaatgagttcagtttcaatatagcagaatagcatgctagcagcaaacatgcacgtgcccagacttcattcaggtgacatctttcattgtctcttctcaatcatttatagtgtcatttcgagttttcatggcttgtattgtgctatgagtttttagtgcttcatggtgggcttagttgcatgaagggttctcagctttgagattaattaccaatgcaccttttgagagctcaaaagatggtcttcgcattgagctagtaagttagaattttgttaaaatttgcagatttagtaaagttattatttattggttttttaaaaaaatttgactcggcgaggataaaatagccctgggcatcatatatatagagatgaccttcttgtagtatcttatataaaaaatttgttacggcataccctatataaaaaacctaggtccgccactgcctaaaatcatatagaaaagagtgttgctttggtctacaagtctgaatctatattattgctatatggatgagcttcttactgctaattaaattacagtaacatgtggtggtgacatggcacaacaagaacttgaagaagtagacatgttgctgctgcctgcagggtgacgtctatggtgttgtgctgcgggcaaggcccacacaatgtgatcgggctgcacgccaatgttcaacatgtgccccaaccagaatgtgtatgctactactaatataacattcgtcattggttggttcaccccaagaggtttgctgcatgttcatggagctggtggataataaattttagttgttctttttgtggtttattagatgacatcaattagtgttcaattgagccttagagtaggatgaatacaactgtcttaagtttctttgttccagcagattgtttgggggcaaggttacctatgaacttcaagaattggtcttatgatattgttagtttgtacaacttagtgttaggttgctcgacttcttcatgaatgaggtgttagacattggtcgatcatgcagggttgaaggtgcttcatataactaaatctaccatgactttctaggaaaagatggaatggaactcaatttttggtggccgtacaagtgtggaaacttgaattcatatatacttacaatcaacattagcgcaaacagttgaccaagtttttcaattagtattttagtttgaatttagtgtgcaataatgtatgagttatttaacaatgcttattcatgacatattgaatgatacttatatttattatatcaattatgatgttattaaatatatgtgtgcatgtata

SEQ ID NO: 4189 - DNA, 2134 bp, Zea Mays
ggtgtaattttttattattctaatttttattataatttctatcatgcgtgtatatgttctaataaatagaaaagtgtgaacatgtggcagagtctaagtaatgccttgtacgctatgtcgtggacctatgattgaattagagaaataaagtccaaccctagaaaactctcgcatcgtcactccaaatcagccgctagggctgcattcatccacctcgtgcttatcgcctactccaacgccgactcctgctcgtcggtcgtcgcctcgtccagctctctccgcccctccagcctagcctagcccctcctgctcactgcgtcgtctccagaatccggcctacgaccgttggcggctggtgcccccaccggcaatcggtggtcatggtctgtccctgctcactccattcagatccgctatgcgcgaggcgcaactggatctatcgtattcctggttgctctctccctctccgcgggcgatgcgcctctctaggttctaccggcgtccgtccaaccggtgttcagcgtgccttcgcaggcccccttctctgccttcgatgagtgcatttgatcagtattgggaggctgcacttgatgtgactatatgttggaagaaatcctttcttgtcattgctcgaggttgttaaagaagagcagatgtgctattttggttggtctaaaatcaggggtggaccaacagggggtccaggggggccacggcacaccctaggccagcccagcaaggaccccacccctttgtcgcccagccgctagcacgtagctaccacgactagtgcccaggtcaccaccgccatgcctagcgccaagccaccactcacccgcacccaacaccaagtcgccgcaatcctagtgcccattgtacatgtgaacatataaagctaccatgatcatggaggtagcaggtgcagagacacccatcaaggtttcttcgtctctagtcatttgttacgcaaattcaaatacaggtaaaagtagcattgtataaggtgcagattgatttgtacagatgaggttgcttctgaaaattgacaggaaaattccttggtatacttgtatgcaggcttttggaaagttgaggcctatttgtgcacaatagtatactaaccattgaagattattactctcatctattgcaggtacattattctgaaactcagttcatgaaatggaatgagttcagtttcaatatagcagaatagcatgctagcagcaaacatgcacgtgcccagacttcattcaggtgacatctttcattgtctcttctcaatcatttatagtgtcatttcgagttttcatggcttgtattgtgctatgagtttttagtgcttcatggtgggcttagttgcatgaagggttctcagctttgagattaattaccaatgcaccttttgagagctcaaaagatggtcttcgcattgagctaggtgacgtctatggtgttgtgctgcgggcaaggcccacacaatgtgatcgggctgcacgccaatgttcaacatgtgccccaaccagaatgtgtatgctactactaatataacattcgtcattggttggttcaccccaagaggtttgctgcatgttcatggagctggtggataataaattttagttgttctttttgtggtttattagatgacatcaattagtgttcaattgagccttagagtaggatgaatacaactgtcttaagtttctttgttccagcagattgtttgggggcaaggttacctatgaacttcaagaattggtcttatgatattgttagtttgtacaacttagtgttaggttgctcgacttcttcatgaatgaggtgttagacattggtcgatcatgcagggttgaaggtgcttcatataactaaatctaccatgactttctaggaaaagatggaatggaactcaatttttggtggccgtacaagtgtggaaacttgaattcatatatacttacaatcaacattagcgcaaacagttgaccaagtttttcaattagtattttagtttgaatttagtgtgcaataatgtatgagttatttaacaatgcttattcatgacatattgaatgatacttatatttattatatcaattatgatgttattaaatatatgtgtgcatgtata

SEQ ID NO: 4190 - DNA, 2200 bp, Zea Mays
ggtgtaattttttattattctaatttttattataatttctatcatgcgtgtatatgttctaataaatagaaaagtgtgaacatgtggcagagtctaagtaatgccttgtacgctatgtcgtggacctatgattgaattagagaaataaagtccaaccctagaaaactctcgcatcgtcactccaaatcagccgctagggctgcattcatccacctcgtgcttatcgcctactccaacgccgactcctgctcgtcggtcgtcgcctcgtccagctctctccgcccctccagcctagcctagcccctcctgctcactgcgtcgtctccagaatccggcctacgaccgttggcggctggtgcccccaccggcaatcggtggtcatggtctgtccctgctcactccattcagatccgctatgcgcgaggcgcaactggatctatcgtattcctggttgctctctccctctccgcgggcgatgcgcctctctaggttctaccggcgtccgtccaaccggtgttcagcgtgccttcgcaggcccccttctctgccttcgatgagtgcatttgatcagtattgggaggctgcacttgatgtgactatatgttggaagaaatcctttcttgtcattgctcgaggttgttaaagaagagcagatgtgctattttggttggtctaaaatcaggggtggaccaacagggggtccaggggggccacggcacaccctaggccagcccagcaaggaccccacccctttgtcgcccagccgctagcacgtagctaccacgactagtgcccaggtcaccaccgccatgcctagcgccaagccaccactcacccgcacccaacaccaagtcgccgcaatcctagtgcccattgtacatgtgaacatataaagctaccatgatcatggaggtagcaggtgcagagacacccatcaaggtttcttcgtctctagtcatttgttacgcaaattcaaatacaggtaaaagtagcattgtataaggtgcagattgatttgtacagatgaggttgcttctgaaaattgacaggaaaattccttggtatacttgtatgcaggcttttggaaagttgaggcctatttgtgcacaatagtatactaaccattgaagattattactctcatctattgcaggtacattattctgaaactcagttcatgaaatggaatgagttcagtttcaatatagcagaatagcatgctagcagcaaacatgcacgtgcccagacttcattcaggtgacatctttcattgtctcttctcaatcatttatagtgtcatttcgagttttcatggcttgtattgtgctatgagtttttagtgcttcatggtgggcttagttgcatgaagggttctcagctttgagattaattaccaatgcaccttttgagagctcaaaagatggtcttcgcattgagctataacatgtggtggtgacatggcacaacaagaacttgaagaagtagacatgttgctgctgcctgcagggtgacgtctatggtgttgtgctgcgggcaaggcccacacaatgtgatcgggctgcacgccaatgttcaacatgtgccccaaccagaatgtgtatgctactactaatataacattcgtcattggttggttcaccccaagaggtttgctgcatgttcatggagctggtggataataaattttagttgttctttttgtggtttattagatgacatcaattagtgttcaattgagccttagagtaggatgaatacaactgtcttaagtttctttgttccagcagattgtttgggggcaaggttacctatgaacttcaagaattggtcttatgatattgttagtttgtacaacttagtgttaggttgctcgacttcttcatgaatgaggtgttagacattggtcgatcatgcagggttgaaggtgcttcatataactaaatctaccatgactttctaggaaaagatggaatggaactcaatttttggtggccgtacaagtgtggaaacttgaattcatatatacttacaatcaacattagcgcaaacagttgaccaagtttttcaattagtattttagtttgaatttagtgtgcaataatgtatgagttatttaacaatgcttattcatgacatattgaatgatacttatatttattatatcaattatgatgttattaaatatatgtgtgcatgtata

SEQ ID NO: 4191 - DNA, 2486 bp, Zea Mays
ggtgtaattttttattattctaatttttattataatttctatcatgcgtgtatatgttctaataaatagaaaagtgtgaacatgtggcagagtctaagtaatgccttgtacgctatgtcgtggacctatgattgaattagagaaataaagtccaaccctagaaaactctcgcatcgtcactccaaatcagccgctagggctgcattcatccacctcgtgcttatcgcctactccaacgccgactcctgctcgtcggtcgtcgcctcgtccagctctctccgcccctccagcctagcctagcccctcctgctcactgcgtcgtctccagaatccggcctacgaccgttggcggctggtgcccccaccggcaatcggtggtcatggtctgtccctgctcactccattcagatccgctatgcgcgaggcgcaactggatctatcgtattcctggttgctctctccctctccgcgggcgatgcgcctctctaggttctaccggcgtccgtccaaccggtgttcagcgtgccttcgcaggcccccttctctgccttcgatgagtgcatttgatcagtattgggaggctgcacttgatgtgactatatgttggaagaaatcctttcttgtcattgctcgaggttgttaaagaagagcagatgtgctattttggttggtctaaaatcaggggtggaccaacagggggtccaggggggccacggcacaccctaggccagcccagcaaggaccccacccctttgtcgcccagccgctagcacgtagctaccacgactagtgcccaggtcaccaccgccatgcctagcgccaagccaccactcacccgcacccaacaccaagtcgccgcaatcctagtgcccattgtacatgtgaacatataaagctaccatgatcatggaggtagcaggtgcagagacacccatcaaggtttcttcgtctctagtcatttgttacgcaaattcaaatacaggtaaaagtagcattgtataaggtgcagattgatttgtacagatgaggttgcttctgaaaattgacaggaaaattccttggtatacttgtatgcaggcttttggaaagttgaggcctatttgtgcacaatagtatactaaccattgaagattattactctcatctattgcaggtacattattctgaaactcagttcatgaaatggaatgagttcagtttcaatatagcagaatagcatgctagcagcaaacatgcacgtgcccagacttcattcaggtgacatctttcattgtctcttctcaatcatttatagtgtcatttcgagttttcatggcttgtattgtgctatgagtttttagtgcttcatggtgggcttagttgcatgaagggttctcagctttgagattaattaccaatgcaccttttgagagctcaaaagatggtcttcgcattgagctagtaagttagaattttgttaaaatttgcagatttagtaaagttattatttattggttttttaaaaaaatttgactcggcgaggataaaatagccctgggcatcatatatatagagatgaccttcttgtagtatcttatataaaaaatttgttacggcataccctatataaaaaacctaggtccgccactgcctaaaatcatatagaaaagagtgttgctttggtctacaagtctgaatctatattattgctatatggatgagcttcttactgctaattaaattacagtaacatgtggtggtgacatggcacaacaagaacttgaagaagtagacatgttgctgctgcctgcagggtgacgtctatggtgttgtgctgcgggcaaggcccacacaatgtgatcgggctgcacgccaatgttcaacatgtgccccaaccagaatgtgtatgctactactaatataacattcgtcattggttggttcaccccaagaggtttgctgcatgttcatggagctggtggataataaattttagttgttctttttgtggtttattagatgacatcaattagtgttcaattgagccttagagtaggatgaatacaactgtcttaagtttctttgttccagcagattgtttgggggcaaggttacctatgaacttcaagaattggtcttatgatattgttagtttgtacaacttagtgttaggttgctcgacttcttcatgaatgaggtgttagacattggtcgatcatgcagggttgaaggtgcttcatataactaaatctaccatgactttctaggaaaagatggaatggaactcaatttttggtggccgtacaagtgtggaaacttgaattcatatatacttacaatcaacattagcgcaaacagttgaccaagtttttcaattagtattttagtttgaatttagtgtgcaataatgtatgagttatttaacaatgcttattcatgacatattgaatgatacttatatttattatatcaattatgatgttattaaatatatgtgtgcatgtata

SEQ ID NO: 4192 - DNA, 3069 bp, Zea Mays
gcctttcctccggcgggtcccgcccgcgcgcccgcctccaagactccactccaacccagcccgcccggctaaaaccctcccctgttctgacttctgatgttcgtcctcacagccaccaccagcaccaccacggccacctcacttctcctccgatgccgtccactcccctcgcctaaaactgtaacacttgccacgcctcctgctatcctccccttctgcatccgctcccgcttctccgcctccgcctccgcctctgcatcctccgtctctccccaaagccgtgcgaccgcggcagccgctgcaggcaaatccagggagaagaagccgccgaccgcgagggcgaagcgggccgacgcagtacctgcagcggcggcgcctggaatgtcggcctccggtggcggctccgctgggaagcgcacggtggcggacgtgctgatggggaacgcacgggccgccgccagcaaggcgaagaaagcagcgccgtctccgaagaagccgcaggcgaagaccgacggcgcagaggtcgaaccggaggctgcagcggtggcggagaaaccgccttcgccggcgaggtccaagcgggcgtcgtccccagcgaagtcccccaaattgctgcctgatgggtctacctcgtcggctaagtccaagggtccagccgcgctcgctcaattggatgcggcgaaggagaatcccccgtcgccaaagaggtccaaaaccctagccgctaaatccgacacccagccttctggtgaaggtgttgttgggcttgggcacaccgatgggaagaaggggtcaccctccccgaccaaggctaaaggccaagcttcccaatcagaggagaagaagcgggccgcttcacccaagaaggcgaaaaccacagattccccgaagacagagaagaatatcaccctagagctaaagaagaaaggcagtgagtttgacccaatggctgttgcctattggaagcctggtgaacccgtgccattcctgtttctggctcgcgcacttgatctcatctccaacgagagtggccgtattgttattacagaaatcctatcaaatgtgtttcgtacagtgatggcaacaacaccggatgatctccttgcaactgtatacctctcagccaaccggattgcgccacctcatgaggggattgagcttgggattggggatgcatcagtcatccgtgcacttgcagaggcatatggacgcaaagaggagcatgttaagaaggacctcaaggaattgggtgatttggggcttgtggcaaaagcaagcaggtcatcacagaagatgatgtttaagccaaaaccactgacaatagctcgtgtgcttagcactttccggacaatcgcaaaggaatcaggcaaagacagtcaagataaaaaaagaaaccatatgaagggacttcttgttgctgcaactgactgtgaaccccagtacatcacacgccttcttcagtcaaagatgaggattgggctagcagagaaaactgtccaaatggcgctagggcaagctgccgtatatgctgacaaaaatcctttgccaccaaaagttcaatcacctttcgaagaggctgcaaaaataattaaacaagcatattcggttcttccgatatatgataaaattgtcccagcgatactcgaagtaggagtttggaagcttccagagacatgcaaattttccataggtgtccctgttggccctatgttagcaaaagcaacaaaatctgtctcagagatcatcgacaagtttcagggtcttgaatacacttgcgagtacaagtatgatggtgaaagggctcagatacattgcatggaggatggttcagtagagatttatagtcgcaatgctgaaagaaacaccggaaagtatccagatgttgttgatgcagtttctagattccgtaaggctacagtcaaatcatttgtcttggactgtgaaattgttgcctatgatcgtgaaaaacagaaaattttgccttttcagatacttagcacaagggctcgcaagggtgtcaccataaatgacatcaaagtttcagtctgtacttttggcttcgatattctttacataaacgggaaacctcttctccaggaacaactcaaaattcgtcgagagcatctttacaactccttcgaagaagtgccaggtgtttttaaattggctactgcaattacatcaaatgacctggaggagatacagaaatttcttgacacagctgtcaactcgagttgtgaagggttgattatcaagacattggataaagacgcaacatatgagccagcaaaacgttcaaacaattggttgaaactgaagaaggattacatggatagcattggagactctttggacttggtacctattgctgccttctacggtagaggaaaacgaacaggtgtctttggatcattcctcctcgcatgctatgatgagcagaacgaagaatatcaaacaatatgcaacataggtactggattttctgagcaacagcttgaagaacgttctgcgagccttcgaagtaaagtgatagaaaaaccaaaggcatactatagatttggcgacacaatgaaccccgatgtgtggtttgagccatcagaggtctgggaggtcaaagctgccgatctgagcataagccctgtacatcgtgctgccaatggtatagtcgatccaaataagggtatctctctaagattccctcgcctattgagattacgtgacgataaaagcccagaacaagccaccacgtctgaccaagtcgctgacatgtaccggtctcaaaagatcaaccacggttataaccaggaggatgaggacgatgactgatgttgacttaattcttgttgctggatgggatggttcactgtcagaggcgatcttcatgcgttggcgcttggcggtgcgttctggggctgcttggattcggatacatctggcattttgagcgcaaacctgcaggcagggacgtcgggtctggggtttcattagcgtcattgcagagatcacaggcaccatttttctccaaagaaagatcactagctagacaacatcatcagcacagcaatgttc

SEQ ID NO: 4193 - DNA, 3187 bp, Zea Mays
cccgcccgcgcgcccgcctccaagactccactccaacccagcccgcccggctaaaaccctcccctgttctgacttctgatgttcgtcctcacagccaccaccagcaccaccacggccacctcacttctcctccgatgccgtccactcccctcgcctaaaactgtaacacttgccacgcctcctgctatcctccccttctgcatccgctcccgcttctccgcctccgcctccgcctctgcatcctccgtctctccccaaagccgtgcgaccgcggcagccgctgcaggcaaatccagggagaagaagccgccgaccgcgagggcgaagcgggccgacgcagtacctgcagcggcggcgcctggaatgtcggcctccggtggcggctccgctgggaagcgcacggtggcggacgtgctgatggggaacgcacgggccgccgccagcaaggcgaagaaagcagcgccgtctccgaagaagccgcaggcgaagaccgacggcgcagaggtcgaaccggaggctgcagcggtggcggagaaaccgccttcgccggcgaggtccaagcgggcgtcgtccccagcgaagtcccccaaattgctgcctgatgggtctacctcgtcggctaagtccaagggtccagccgcgctcgctcaattggatgcggcgaaggagaatcccccgtcgccaaagaggtccaaaaccctagccgctaaatccgacacccagccttctggtgaaggtgttgttgggcttgggcacaccgatgggaagaaggggtcaccctccccgaccaaggctaaaggccaagcttcccaatcagaggagaagaagcgggccgcttcacccaagaaggcgaaaaccacagattccccgaagacagagaagaatatcaccctagagctaaagaagaaaggcagtgagtttgacccaatggctgttgcctattggaagcctggtgaacccgtgccattcctgtttctggctcgcgcacttgatctcatctccaacgagagtggccgtattgttattacagaaatcctatcaaatgtgtttcgtacagtgatggcaacaacaccggatgatctccttgcaactgtatacctctcagccaaccggattgcgccacctcatgaggggattgagcttgggattggggatgcatcagtcatccgtgcacttgcagaggcatatggacgcaaagaggagcatgttaagaaggacctcaaggaattgggtgatttggggcttgtggcaaaagcaagcaggtcatcacagaagatgatgtttaagccaaaaccactgacaatagctcgtgtgcttagcactttccggacaatcgcaaaggaatcaggcaaagacagtcaagataaaaaaagaaaccatatgaagggacttcttgttgctgcaactgactgtgaaccccagtacatcacacgccttcttcagtcaaagatgaggattgggctagcagagaaaactgtccaaatggcgctagggcaagctgccgtatatgctgacaaaaatcctttgccaccaaaagttcaatcacctttcgaagaggctgcaaaaataattaaacaagcatattcggttcttccgatatatgataaaattgtcccagcgatactcgaagtaggagtttggaagcttccagagacatgcaaattttccataggtgtccctgttggccctatgttagcaaaagcaacaaaatctgtctcagagatcatcgacaagtttcagggtcttgaatacacttgcgagtacaagtatgatggtgaaagggctcagatacattgcatggaggatggttcagtagagatttatagtcgcaatgctgaaagaaacaccggaaagtatccagatgttgttgatgcagtttctagattccgtaaggctacagtcaaatcatttgtcttggactgtgaaattgttgcctatgatcgtgaaaaacagaaaattttgccttttcagatacttagcacaagggctcgcaagggtgtcaccataaatgacatcaaagtttcagtctgtacttttggcttcgatattctttacataaacgggaaacctcttctccaggaacaactcaaaattcgtcgagagcatctttacaactccttcgaagaagtgccaggtgtttttaaattggctactgcaattacatcaaatgacctggaggagatacagaaatttcttgacacagctgtcaactcgagttgtgaagggttgattatcaagacattggataaagacgcaacatatgagccagcaaaacgttcaaacaattggttgaaactgaagaaggattacatggatagcattggagactctttggacttggtacctattgctgccttctacggtagaggaaaacgaacaggtgtctttggatcattcctcctcgcatgctatgatgagcagaacgaagaatatcaaacaatatgcaacataggtactggattttctgagcaacagcttgaagaacgttctgcgagccttcgaagtaaagtgatagaaaaaccaaaggcatactatagatttggcgacacaatgaaccccgatgtgtggtttgagccatcagaggtctgggaggtcaaagctgccgatctgagcataagccctgtacatcgtgctgccaatggtatagtcgatccaaataagggtatctctctaagattccctcgcctattgagattacgtgacgataaaagcccagaacaagccaccacgtctgaccaagtcgctgacatgtaccggtctcaaaagatcaaccacggttataaccaggaggatgaggacgatgactgatgttgacttaattcttgttgctggatgggatggttcactgtgtattgaccggagattgcattttcagttgtttggttcgtcctgattcgaacggcttagggtatactccgatttgtgcatttgctttgcgcacaacttatccccacgaacccgcacgctgtctttatgaaccagcagcagaggcgatcttcatgcgttggcgcttggcggtgcgttctggggctgcttggattcggatacatctggcattttgagcgcaaacctgcaggcagggacgtcgggtctggggtttcattagcgtcattgcagagatcacaggcaccatttttctccaaagaaagatcactagctagacaacatcatcagcacagcaatgttc

SEQ ID NO: 4194 - DNA, 3199 bp, Zea Mays
aaaaccctcccctgttctgacttctgatgttcgtcctcacagccaccaccagcaccaccacggccacctcacttctcctccgatgccgtccactcccctcgcctaaaactgtaacacttgccacgcctcctgctatcctccccttctgcatccgctcccgcttctccgcctccgcctccgcctctgcatcctccgtctctccccaaagccgtgcgaccgcggcagccgctgcaggcaaatccagggagaagaagccgccgaccgcgagggcgaagcgggccgacgcagtacctgcagcggcggcgcctggaatgtcggcctccggtggcggctccgctgggaagcgcacggtggcggacgtgctgatggggaacgcacgggccgccgccagcaaggcgaagaaagcagcgccgtctccgaagaagccgcaggcgaagaccgacggcgcagaggtcgaaccggaggctgcagcggtggcggagaaaccgccttcgccggcgaggtccaagcgggcgtcgtccccagcgaagtcccccaaattgctgcctgatgggtctacctcgtcggctaagtccaagggtccagccgcgctcgctcaattggatgcggcgaaggagaatcccccgtcgccaaagaggtccaaaaccctagccgctaaatccgacacccagccttctggtgaaggtgttgttgggcttgggcacaccgatgggaagaaggggtcaccctccccgaccaaggctaaaggccaagcttcccaatcagaggagaagaagcgggccgcttcacccaagaaggcgaaaaccacagattccccgaagacagagaagaatatcaccctagagctaaagaagaaaggcagtgagtttgacccaatggctgttgcctattggaagcctggtgaacccgtgccattcctgtttctggctcgcgcacttgatctcatctccaacgagagtggccgtattgttattacagaaatcctatcaaatgtgtttcgtacagtgatggcaacaacaccggatgatctccttgcaactgtatacctctcagccaaccggattgcgccacctcatgaggggattgagcttgggattggggatgcatcagtcatccgtgcacttgcagaggcatatggacgcaaagaggagcatgttaagaaggacctcaaggaattgggtgatttggggcttgtggcaaaagcaagcaggtcatcacagaagatgatgtttaagccaaaaccactgacaatagctcgtgtgcttagcactttccggacaatcgcaaaggaatcaggcaaagacagtcaagataaaaaaagaaaccatatgaagggacttcttgttgctgcaactgactgtgaaccccagtacatcacacgccttcttcagtcaaagatgaggattgggctagcagagaaaactgtccaaatggcgctagggcaagctgccgtatatgctgacaaaaatcctttgccaccaaaagttcaatcacctttcgaagaggctgcaaaaataattaaacaagcatattcggttcttccgatatatgataaaattgtcccagcgatactcgaagtaggagtttggaagcttccagagacatgcaaattttccataggtgtccctgttggccctatgttagcaaaagcaacaaaatctgtctcagagatcatcgacaagtttcagggtcttgaatacacttgcgagtacaagtatgatggtgaaagggctcagatacattgcatggaggatggttcagtagagatttatagtcgcaatgctgaaagaaacaccggaaagtatccagatgttgttgatgcagtttctagattccgtaaggctacagtcaaatcatttgtcttggactgtgaaattgttgcctatgatcgtgaaaaacagaaaattttgccttttcagatacttagcacaagggctcgcaagggtgtcaccataaatgacatcaaagtttcagtctgtacttttggcttcgatattctttacataaacgggaaacctcttctccaggaacaactcaaaattcgtcgagagcatctttacaactccttcgaagaagtgccaggtgtttttaaattggctactgcaattacatcaaatgacctggaggagatacagaaatttcttgacacagctgtcaactcgagttgtgaagggttgattatcaagacattggataaagacgcaacatatgagccagcaaaacgttcaaacaattggttgaaactgaagaaggattacatggatagcattggagactctttggacttggtacctattgctgccttctacggtagaggaaaacgaacaggtgtctttggatcattcctcctcgcatgctatgatgagcagaacgaagaatatcaaacaatatgcaacatagcttgaagaacgttctgcgagccttcgaagtaaagtgatagaaaaaccaaaggcatactatagatttggcgacacaatgaaccccgatgtgtggtttgagccatcagaggtctgggaggtcaaagctgccgatctgagcataagccctgtacatcgtgctgccaatggtatagtcgatccaaataagggtatctctctaagattccctcgcctattgagattacgtgacgataaaagcccagaacaagccaccacgtctgaccaagtcgctgacatgtaccggtctcaaaagatcaaccacggttataaccaggaggatgaggacgatgactgatgttgacttaattcttgttgctggatgggatggttcactgtgtaaacactagtcttcgcagtttccagcttgttctcaaccgtaacctgttgatttaccggttcctgtttctatgatcaaatgaacaggtattgaccggagattgcattttcagttgtttggttcgtcctgattcgaacggcttagggtatactccgatttgtgcatttgctttgcgcacaacttatccccacgaacccgcacgctgtctttatgaaccagcagcagaggcgatcttcatgcgttggcgcttggcggtgcgttctggggctgcttggattcggatacatctggcattttgagcgcaaacctgcaggcagggacgtcgggtctggggtttcattagcgtcattgcagagatcacaggcaccatttttctccaaagaaagatcactagctagacaacatcatcagcacagcaatgttc

SEQ ID NO: 4195 - DNA, 3214 bp, Zea Mays
aaaaccctcccctgttctgacttctgatgttcgtcctcacagccaccaccagcaccaccacggccacctcacttctcctccgatgccgtccactcccctcgcctaaaactgtaacacttgccacgcctcctgctatcctccccttctgcatccgctcccgcttctccgcctccgcctccgcctctgcatcctccgtctctccccaaagccgtgcgaccgcggcagccgctgcaggcaaatccagggagaagaagccgccgaccgcgagggcgaagcgggccgacgcagtacctgcagcggcggcgcctggaatgtcggcctccggtggcggctccgctgggaagcgcacggtggcggacgtgctgatggggaacgcacgggccgccgccagcaaggcgaagaaagcagcgccgtctccgaagaagccgcaggcgaagaccgacggcgcagaggtcgaaccggaggctgcagcggtggcggagaaaccgccttcgccggcgaggtccaagcgggcgtcgtccccagcgaagtcccccaaattgctgcctgatgggtctacctcgtcggctaagtccaagggtccagccgcgctcgctcaattggatgcggcgaaggagaatcccccgtcgccaaagaggtccaaaaccctagccgctaaatccgacacccagccttctggtgaaggtgttgttgggcttgggcacaccgatgggaagaaggggtcaccctccccgaccaaggctaaaggccaagcttcccaatcagaggagaagaagcgggccgcttcacccaagaaggcgaaaaccacagattccccgaagacagagaagaatatcaccctagagctaaagaagaaaggcagtgagtttgacccaatggctgttgcctattggaagcctggtgaacccgtgccattcctgtttctggctcgcgcacttgatctcatctccaacgagagtggccgtattgttattacagaaatcctatcaaatgtgtttcgtacagtgatggcaacaacaccggatgatctccttgcaactgtatacctctcagccaaccggattgcgccacctcatgaggggattgagcttgggattggggatgcatcagtcatccgtgcacttgcagaggcatatggacgcaaagaggagcatgttaagaaggacctcaaggaattgggtgatttggggcttgtggcaaaagcaagcaggtcatcacagaagatgatgtttaagccaaaaccactgacaatagctcgtgtgcttagcactttccggacaatcgcaaaggaatcaggcaaagacagtcaagataaaaaaagaaaccatatgaagggacttcttgttgctgcaactgactgtgaaccccagtacatcacacgccttcttcagtcaaagatgaggattgggctagcagagaaaactgtccaaatggcgctagggcaagctgccgtatatgctgacaaaaatcctttgccaccaaaagttcaatcacctttcgaagaggctgcaaaaataattaaacaagcatattcggttcttccgatatatgataaaattgtcccagcgatactcgaagtaggagtttggaagcttccagagacatgcaaattttccataggtgtccctgttggccctatgttagcaaaagcaacaaaatctgtctcagagatcatcgacaagtttcagggtcttgaatacacttgcgagtacaagtatgatggtgaaagggctcagatacattgcatggaggatggttcagtagagatttatagtcgcaatgctgaaagaaacaccggaaagtatccagatgttgttgatgcagtttctagattccgtaaggctacagtcaaatcatttgtcttggactgtgaaattgttgcctatgatcgtgaaaaacagaaaattttgccttttcagatacttagcacaagggctcgcaagggtgtcaccataaatgacatcaaagtttcagtctgtacttttggcttcgatattctttacataaacgggaaacctcttctccaggaacaactcaaaattcgtcgagagcatctttacaactccttcgaagaagtgccaggtgtttttaaattggctactgcaattacatcaaatgacctggaggagatacagaaatttcttgacacagctgtcaactcgagggttgattatcaagacattggataaagacgcaacatatgagccagcaaaacgttcaaacaattggttgaaactgaagaaggattacatggatagcattggagactctttggacttggtacctattgctgccttctacggtagaggaaaacgaacaggtgtctttggatcattcctcctcgcatgctatgatgagcagaacgaagaatatcaaacaatatgcaacataggtactggattttctgagcaacagcttgaagaacgttctgcgagccttcgaagtaaagtgatagaaaaaccaaaggcatactatagatttggcgacacaatgaaccccgatgtgtggtttgagccatcagaggtctgggaggtcaaagctgccgatctgagcataagccctgtacatcgtgctgccaatggtatagtcgatccaaataagggtatctctctaagattccctcgcctattgagattacgtgacgataaaagcccagaacaagccaccacgtctgaccaagtcgctgacatgtaccggtctcaaaagatcaaccacggttataaccaggaggatgaggacgatgactgatgttgacttaattcttgttgctggatgggatggttcactgtgtaaacactagtcttcgcagtttccagcttgttctcaaccgtaacctgttgatttaccggttcctgtttctatgatcaaatgaacaggtattgaccggagattgcattttcagttgtttggttcgtcctgattcgaacggcttagggtatactccgatttgtgcatttgctttgcgcacaacttatccccacgaacccgcacgctgtctttatgaaccagcagcagaggcgatcttcatgcgttggcgcttggcggtgcgttctggggctgcttggattcggatacatctggcattttgagcgcaaacctgcaggcagggacgtcgggtctggggtttcattagcgtcattgcagagatcacaggcaccatttttctccaaagaaagatcactagctagacaacatcatcagcacagcaatgttc

SEQ ID NO: 4196 - DNA, 3126 bp, Zea Mays
aaaaccctcccctgttctgacttctgatgttcgtcctcacagccaccaccagcaccaccacggccacctcacttctcctccgatgccgtccactcccctcgcctaaaactgtaacacttgccacgcctcctgctatcctccccttctgcatccgctcccgcttctccgcctccgcctccgcctctgcatcctccgtctctccccaaagccgtgcgaccgcggcagccgctgcaggcaaatccagggagaagaagccgccgaccgcgagggcgaagcgggccgacgcagtacctgcagcggcggcgcctggaatgtcggcctccggtggcggctccgctgggaagcgcacggtggcggacgtgctgatggggaacgcacgggccgccgccagcaaggcgaagaaagcagcgccgtctccgaagaagccgcaggcgaagaccgacggcgcagaggtcgaaccggaggctgcagcggtggcggagaaaccgccttcgccggcgaggtccaagcgggcgtcgtccccagcgaagtcccccaaattgctgcctgatgggtctacctcgtcggctaagtccaagggtccagccgcgctcgctcaattggatgcggcgaaggagaatcccccgtcgccaaagaggtccaaaaccctagccgctaaatccgacacccagccttctggtgaaggtgttgttgggcttgggcacaccgatgggaagaaggggtcaccctccccgaccaaggctaaaggccaagcttcccaatcagaggagaagaagcgggccgcttcacccaagaaggcgaaaaccacagattccccgaagacagagaagaatatcaccctagagctaaagaagaaaggcagtgagtttgacccaatggctgttgcctattggaagcctggtgaacccgtgccattcctgtttctggctcgcgcacttgatctcatctccaacgagagtggccgtattgttattacagaaatcctatcaaatgtgtttcgtacagtgatggcaacaacaccggatgatctccttgcaactgtatacctctcagccaaccggattgcgccacctcatgaggggattgagcttgggattggggatgcatcagtcatccgtgcacttgcagaggcatatggacgcaaagaggagcatgttaagaaggacctcaaggaattgggtgatttggggcttgtggcaaaagcaagcaggtcatcacagaagatgatgtttaagccaaaaccactgacaatagctcgtgtgcttagcactttccggacaatcgcaaaggaatcaggcaaagacagtcaagataaaaaaagaaaccatatgaagggacttcttgttgctgcaactgactgtgaaccccagtacatcacacgccttcttcagtcaaagatgaggattgggctagcagagaaaactgtccaaatggcgctagggcaagctgccgtatatgctgacaaaaatcctttgccaccaaaagttcaatcacctttcgaagaggctgcaaaaataattaaacaagcatattcggttcttccgatatatgataaaattgtcccagcgatactcgaagtaggagtttggaagcttccagagacatgcaaattttccataggtgtccctgttggccctatgttagcaaaagcaacaaaatctgtctcagagatcatcgacaagtttcagggtcttgaatacacttgcgagtacaagtatgatggtgaaagggctcagatacattgcatggaggatggttcagtagagatttatagtcgcaatgctgaaagaaacaccggaaagtatccagatgttgttgatgcagtttctagattccgtaaggctacagtcaaatcatttgtcttggactgtgaaattgttgcctatgatcgtgaaaaacagaaaattttgccttttcagatacttagcacaagggctcgcaagggtgtcaccataaatgacatcaaagtttcagtctgtacttttggcttcgatattctttacataaacgggaaacctcttctccaggaacaactcaaaattcgtcgagagcatctttacaactccttcgaagaagtgccaggtgtttttaaattggctactgcaattacatcaaatgacctggaggagatacagaaatttcttgacacagctgtcaactcgagttgtgaagggttgattatcaagacattggataaagacgcaacatatgagccagcaaaacgttcaaacaattggttgaaactgaagaaggattacatggatagcattggagactctttggacttggtacctattgctgccttctacggtagaggaaaacgaacaggtgtctttggatcattcctcctcgcatgctatgatgagcagaacgaagaatatcaaacaatatgcaacataggtactggattttctgagcaacagcttgaagaacgttctgcgagccttcgaagtaaagtgatagaaaaaccaaaggcatactatagatttggcgacacaatgaaccccgatgtgtggtttgagccatcagaggtctgggaggtcaaagctgccgatctgagcataagccctgtacatcgtgctgccaatggtatagtcgatccaaataagggtatctctctaagattccctcgcctattgagattacgtgacgataaaagcccagaacaagccaccacgtctgaccaagtcgctgacatgtaccggtctcaaaagatcaaccacggttataaccaggaggatgaggacgatgactgatgttgacttaattcttgttgctggatgggatggtattgaccggagattgcattttcagttgtttggttcgtcctgattcgaacggcttagggtatactccgatttgtgcatttgctttgcgcacaacttatccccacgaacccgcacgctgtctttatgaaccagcagcagaggcgatcttcatgcgttggcgcttggcggtgcgttctggggctgcttggattcggatacatctggcattttgagcgcaaacctgcaggcagggacgtcgggtctggggtttcattagcgtcattgcagagatcacaggcaccatttttctccaaagaaagatcactagctagacaacatcatcagcacagcaatgttc

SEQ ID NO: 4197 - DNA, 3174 bp, Zea Mays
aaaaccctcccctgttctgacttctgatgttcgtcctcacagccaccaccagcaccaccacggccacctcacttctcctccgatgccgtccactcccctcgcctaaaactgtaacacttgccacgcctcctgctatcctccccttctgcatccgctcccgcttctccgcctccgcctccgcctctgcatcctccgtctctccccaaagccgtgcgaccgcggcagccgctgcaggcaaatccagggagaagaagccgccgaccgcgagggcgaagcgggccgacgcagtacctgcagcggcggcgcctggaatgtcggcctccggtggcggctccgctgggaagcgcacggtggcggacgtgctgatggggaacgcacgggccgccgccagcaaggcgaagaaagcagcgccgtctccgaagaagccgcaggcgaagaccgacggcgcagaggtcgaaccggaggctgcagcggtggcggagaaaccgccttcgccggcgaggtccaagcgggcgtcgtccccagcgaagtcccccaaattgctgcctgatgggtctacctcgtcggctaagtccaagggtccagccgcgctcgctcaattggatgcggcgaaggagaatcccccgtcgccaaagaggtccaaaaccctagccgctaaatccgacacccagccttctggtgaaggtgttgttgggcttgggcacaccgatgggaagaaggggtcaccctccccgaccaaggctaaaggccaagcttcccaatcagaggagaagaagcgggccgcttcacccaagaaggcgaaaaccacagattccccgaagacagagaagaatatcaccctagagctaaagaagaaaggcagtgagtttgacccaatggctgttgcctattggaagcctggtgaacccgtgccattcctgtttctggctcgcgcacttgatctcatctccaacgagagtggccgtattgttattacagaaatcctatcaaatgtgtttcgtacagtgatggcaacaacaccggatgatctccttgcaactgtatacctctcagccaaccggattgcgccacctcatgaggggattgagcttgggattggggatgcatcagtcatccgtgcacttgcagaggcatatggacgcaaagaggagcatgttaagaaggacctcaaggaattgggtgatttggggcttgtggcaaaagcaagcaggtcatcacagaagatgatgtttaagccaaaaccactgacaatagctcgtgtgcttagcactttccggacaatcgcaaaggaatcaggcaaagacagtcaagataaaaaaagaaaccatatgaagggacttcttgttgctgcaactgactgtgaaccccagtacatcacacgccttcttcagtcaaagatgaggattgggctagcagagaaaactgtccaaatggcgctagggcaagctgccgtatatgctgacaaaaatcctttgccaccaaaagttcaatcacctttcgaagagcgatactcgaagtaggagtttggaagcttccagagacatgcaaattttccataggtgtccctgttggccctatgttagcaaaagcaacaaaatctgtctcagagatcatcgacaagtttcagggtcttgaatacacttgcgagtacaagtatgatggtgaaagggctcagatacattgcatggaggatggttcagtagagatttatagtcgcaatgctgaaagaaacaccggaaagtatccagatgttgttgatgcagtttctagcatgtcaatgcagattccgtaaggctacagtcaaatcatttgtcttggactgtgaaattgttgcctatgatcgtgaaaaacagaaaattttgccttttcagatacttagcacaagggctcgcaagggtgtcaccataaatgacatcaaagtttcagtctgtacttttggcttcgatattctttacataaacgggaaacctcttctccaggaacaactcaaaattcgtcgagagcatctttacaactccttcgaagaagtgccaggtgtttttaaattggctactgcaattacatcaaatgacctggaggagatacagaaatttcttgacacagctgtcaactcgagttgtgaagggttgattatcaagacattggataaagacgcaacatatgagccagcaaaacgttcaaacaattggttgaaactgaagaaggattacatggatagcattggagactctttggacttggtacctattgctgccttctacggtagaggaaaacgaacaggtgtctttggatcattcctcctcgcatgctatgatgagcagaacgaagaatatcaaacaatatgcaacataggtactggattttctgagcaacagcttgaagaacgttctgcgagccttcgaagtaaagtgatagaaaaaccaaaggcatactatagatttggcgacacaatgaaccccgatgtgtggtttgagccatcagaggtctgggaggtcaaagctgccgatctgagcataagccctgtacatcgtgctgccaatggtatagtcgatccaaataagggtatctctctaagattccctcgcctattgagattacgtgacgataaaagcccagaacaagccaccacgtctgaccaagtcgctgacatgtaccggtctcaaaagatcaaccacggttataaccaggaggatgaggacgatgactgatgttgacttaattcttgttgctggatgggatggttcactgtgtaaacactagtcttcgcagtttccagcttgttctcaaccgtaacctgttgatttaccggttcctgtttctatgatcaaatgaacaggtattgaccggagattgcattttcagttgtttggttcgtcctgattcgaacggcttagggtatactccgatttgtgcatttgctttgcgcacaacttatccccacgaacccgcacgctgtctttatgaaccagcagcagaggcgatcttcatgcgttggcgcttggcggtgcgttctggggctgcttggattcggatacatctggcattttgagcgcaaacctgcaggcagggacgtcgggtctggggtttcattagcgtcattgcagagatcacaggcaccatttttctccaaagaaagatcactagctagacaacatcatcagcacagcaatgttc

SEQ ID NO: 4198 - DNA, 692 bp, Zea Mays
gttaggtttatttcttgcaagccagcacttctctttagactatgtgtataatcggatttcatatgaacatttcagttaacagctttggacactcagcttcctgttaaacaagcatttaaaaaaatgcatgatgaggggtcttgctctggttcctctttgggatgaccgccggggcccagggaacaataacaggcatgctcactgcatcagattttgttttaatcttgagaaagagaaacattcaagttattggcaacaaagagcccatttctgcttggaaagaagcaaagctacagttctatggtgtgcctgatggtgctgctatgcagagaaggccattaatccatgtacttctccatatatttgctaattcaatgtgtaagcagttgcaagatcagcactttcataatataaatatattacctatatgaaattctagatatggtctccaatacaacattaagcttaatgtcgtttgtgttaaaaaattacaaatcatcttatgtcttgaaataaggagaaattgtttgggtttctcctccccaactttcagaattacctatttctattgtatgtttgatcatttggacttccactccatccacaattttggtttattcggtgaggaactatgtttttaaccactttgtagtttgtacagacatgcaacattgatctcagggccaagaaag

SEQ ID NO: 4199 - DNA, 809 bp, Zea Mays
gtgtcttgggaaaaaaagatcgatttggattttgaaaactggatccaaacaggtccgaaatgactaggaagttgcgattctggaatttaaaattataatcagaaatgaagactagaaaaccaaaaaataaaatatgcccccatgcaggatcgaactacagaccttcagtttacaagactgacgctctaccactgagctataggggcaattgtgatttacgtctttgtgtaggatatatatgtatttttcagattttttactatagtgtacaacccaccgcccgcgtctctctcgttactcctccgtcctccctccgcgtttacacccgccgccactcctgccttggcgccgtagctagcaaaggcgatatccatggcgagccctgcacggatcgagctggacaagctgagcgtggagcagctcaaggggctcaaggagcagacggatctggaggtcaacctcctccaggacagcctcaccaagatccgcaccgccgccacccgactcgagaacgcctccgccgcgctccaggacctatccctccgcccccaagggaagaagatgctcgtgccgcttacggcgtccctctacgttcccggttcactggacgacgcggagaaggtcctcgtcgatgtcggcaccggttacttcatcgagaaaaccatggctcaggggaaagaatactgtgaaaggaaaattaatttattgaagtcaaattttgatgaattggttgagattacccattgcatgtagaccgcactgttcgcagagtctgaaataggagatgagatggaagaaggatttgtaag

SEQ ID NO: 4200 - DNA, 1363 bp, Zea Mays
gtgtcttgggaaaaaaagatcgatttggattttgaaaactggatccaaacaggtccgaaatgactaggaagttgcgattctggaatttaaaattataatcagaaatgaagactagaaaaccaaaaaataaaatatgcccccatgcaggatcgaactacagaccttcagtttacaagactgacgctctaccactgagctataggggcaattgtgatttacgtctttgtgtaggatatatatgtatttttcagattttttactatagtgtacaacccaccgcccgcgtctctctcgttactcctccgtcctccctccgcgtttacacccgccgccactcctgccttggcgccgtagctagcaaaggcgatatccatggcgagccctgcacggatcgagctggacaagctgagcgtggagcagctcaaggggctcaaggagcagacggatctggaggtcaacctcctccaggacagcctcaccaagatccgcaccgccgccacccgactcgagaacgcctccgccgcgctccaggacctatccctccgcccccaagggaagaagatgctcgtgccgcttacggcgtccctctacgttcccggttcactggacgacgcggagaaggtcctcgtcgatgtcggcaccggttacttcatcgagaaaaccatggctcaggggaaagaatactgtgaaaggaaaattaatttattgaagtcaaattttgatgaattggttgagattcacatttactgaacctatcccctgtccttgagacagaatgataccacacataactcctcgggtgcctcgatatattttgggttaacgaagcagtgcttatgggtgatactgacaagtggctacgaaaaagaaagccatagcagacgatatgggtttgctactacaagccaagctgaggcaagcgtcaccgggcccaagttcatgagagctggatgcacacctcgtctcttctacctatgttgtatcaaacatcatttagtaattttgaagttggagtcacgcagcagcgtagattgtattctttggcatcttctgtcgcacagcacactctttgaatggtttaattttgttcctactgctagcagcccgtggaactttcatgagcttgtatgggtgggaccaatcatcgttccatacttccattgtaggtctggccgatgggggtggtaccattgtaccaagcattgctctattatagtaggtgcaggctgttgcatttcgtgtgaaattagcacgggttgtttcaggtgatttttggatggtgacgctctatgagtactacaacgttcggcggtattgttgtcagatgcacgagagctcttgcctgtatggttccctgatagca

SEQ ID NO: 4201 - DNA, 1702 bp, Zea Mays
ctacgtgccaaggccctgagttgcagtcatgatccccacaagcaacaccgcgttcgcgtgcgcctgtagaaaactgtggccagcggcctcttctaaactcgatcgagcaggtgacgcacatagctagctagcctagctgaagttctttatccggtcaattcaagccgccagatacgatcacaagaacacagttaagaagcttccaagcctctgattgcttccggcgcggtgacatgtcatgtctccagtctcctgggcgccggccgtcgtcgtcgttgcggctctagctggctagcgtggcgaggaccatgcctgctgtgcttaacgagaacgaggatggcgccgccgctgccgatctcgagaggcagcagtgctggtgctcctgctcctgctcctgcctgccgttatgcctctggccgggcgcgtccgggtcccggggtcccaggaaacccggcggcacgggagcgaagaggaggcggtggcgtcgcaggctcaagctgtcatggctggtgtggccgtggtctccgaagagcggcaagggggatgcgggcggcggcggcgatgacagcagcaaggaggggatgaagaagcggaggaggaaggacgggcggcgcaggctcaagctgtcatggctggcgtggccgtggtcacggagaagcgacaagggggacgcgggcggcgacggggacgacagcagcaaggaggggaagaagcggaggaggaagggagggcgacgccggctgctgctgctgctgacgacgacgacgtcgctgcagctcaagaaggcgctcgcgtcggtcgtctccggggagagcgccctactgcctgcgccggccaaggtgagcagtttcggcgacgccaagaagcaaagcaaccgcaggccacgacggccaacggcagaggacgcggcacgcggaagccgacaaccgcaaccctcggcaactgctgcgaccgcgagcaccggatcgaccacggcggtgcctgctggttctcggccggagacgacgagccagccgagccctaaaccaaccgaagggtccgctgcctccggccgcacctggcgggcgccgtcgaggcgccagcgccactcgcttcatcagcccgactgctcctgctccagcagcggcctgtggacggcggcgacgacgctgggcgtgatcgtgctcctcggccgcgtcatcgccgtggtcttcctatgctcgtgcctgtacggcgcgcgcttcgtccgggcctgggctgccggcgacgccggtgccagcgccaaggcccagctgagcggcgaaggcggcgtcgttggcgttggtagcagtagccggtgcttcagtgatccggtggcggtggccggcgacgaggtcgcggcggagatgtgcaccacggaggagcgcaagaagaaggtggtcatggcagggttgctcgacagggccggcaaggcaccctcgtcgcgctttcgtaggtgattacaagcggacgctgtaaatgatgccgtttagttagggcttcaactggtgataggctggttatcttttactttcattttttcgccatggtggagaattggcaatttgacatgaagagctgcttacacgctcaatcgctggtatatatgagattgttaggacgacattttgtgatttgcgtgggcacgtactaattggttttgaggtggaaattttcataccaatgcaaaatgttttgctcggcc

SEQ ID NO: 4202 - DNA, 1412 bp, Zea Mays
atgcatagatctagtggagattagtgtctcgaatgcgctcaggggcggagggcccaatatggcccaacctaggcaatatcttggaccggcccaaatagagattagttcttccatctcactgtctcagcccgtcagccgccatcgcgagtcaattgtccgcgaccgtaagcgctaagccgtccgccgcccgtcgccgcgtcccgcaggccgcactcccgctcggccgcgcctggcctgccggcgcgcagcggcagcgtgctgcaggctctgcagcagcttgggcgctcagttgcgggctgctccgctgctgcctgctcgcttgctggctgctccagcctggccgcctccctgctcgcctgctgcctgctcgcttgctggctgcttccgcctggccgcctccctgctcgcctactgcctgctggctgctcctgtgcttggctgcttggtgctcgctcgtgctgcagcctccagctcaagtgctcgcccattttattcgctatatgacatttggttgtaaatggatggtaatcaagatgactattaaataaggtgagcagtttcggcgacgccaagaagcaaagcaaccgcaggccacgacggccaacggcagaggacgcggcacgcggaagccgacaaccgcaaccctcggcaactgctgcgaccgcgagcaccggatcgaccacggcggtgcctgctggttctcggccggagacgacgagccagccgagccctaaaccaaccgaagggtccgctgcctccggccgcacctggcgggcgccgtcgaggcgccagcgccactcgcttcatcagcccgactgctcctgctccagcagcggcctgtggacggcggcgacgacgctgggcgtgatcgtgctcctcggccgcgtcatcgccgtggtcttcctatgctcgtgcctgtacggcgcgcgcttcgtccgggcctgggctgccggcgacgccggtgccagcgccaaggcccagctgagcggcgaaggcggcgtcgttggcgttggtagcagtagccggtgcttcagtgatccggtggcggtggccggcgacgaggtcgcggcggagatgtgcaccacggaggagcgcaagaagaaggtggtcatggcagggttgctcgacagggccggcaaggcaccctcgtcgcgctttcgtaggtgattacaagcggacgctgtaaatgatgccgtttagttagggcttcaactggtgataggctggttatcttttactttcattttttcgccatggtggagaattggcaatttgacatgaagagctgcttacacgctcaatcgctggtatatatgagattgttaggacgacattttgtgatttgcgtgggcacgtactaattggttttgaggtggaaattttcataccaatgcaaaatgttttgctcggcc

SEQ ID NO: 4203 - DNA, 935 bp, Zea Mays
ctagcttctccgtggacgcttgggcaaagatctagatagcgctgcacgccgctgcttctccttccccgcgagtgtccgctccgtacgccggcgactacgatcctgtttctggtgaaagggagtgtcgcattccccatcagcactgttactgacggctgccgcgtggtgttcccgacgtgtgctaccatctccagtacacccaatcctcaacgtgccgacgatccacgcaggtccatgtctcaagaaaatggtctttccatggtgccactgaaaatggtcccttgcagcacatcgacatggtcctatcagattgcaagggtaatagtatgtatgctgaaataccagcaaatcttgccgaagaaaagggagcactcatcgaaacaaatcagatctacgacatcagtcgttttagagttactgcagcaaaaacagcctacaaacccattgatggtgacaagatgatacaatttacgatttacacaattatcaagcctgcaagtaacccaccacctacatttcctttatatatctatcaattaactccatttgatgagattgaatctcaaattcagcacaagaccaaattcctagatgttcttggaactataaccgaggtaactgctttgaagatagtacacatagaaggacagctcagccccactattattagagacgtaatgatagaagatctaagccgcaaaactcacaaaatcactctttgggcaaaacgagcaacatcatttacaatacaaaatgtgtatgacccaattagcaaaaagccaattcttgctctttttgttggttgcctacctaaattctacaaaggtaaatacctactgcaactacaaatttttatcacaatatacacttcacacatcacacaaagaaaagatattagagattacaattctaaacaataccaggtgtttacttaa

SEQ ID NO: 4204 - DNA, 772 bp, Zea Mays
atgacttctctcagattgatggactacacacttctaccagatttaacaacgtataaaaaacatgcgataatccaggtccatgtctcaagaaaatggtctttccatggtgccactgaaaatggtcccttgcagcacatcgacatggtcctatcagattgcaagtatgtatgctgaaataccagcaaatcttgccgaagaaaagggagcactcatcgaaacaaatcagatctacgacatcagtcgttttagagttactgcagcaaaaacagcctacaaacccattgatggtgacaagatgatacaatttacgatttacacaattatcaagcctgcaagtaacccaccacctacatttcctttatatatctatcaattaactccatttgatgagattgaatctcaaattcagcacaagaccaaattcctagatgttcttggaactataaccgaggtaactgctttgaagatagtacacatagaaggacagctcagccccactattattagagacgtaatgatagaagatctaagccgcaaaactcacaaaatcactctttgggcaaaacgagcaacatcatttacaatacaaaatgtgtatgacccaattagcaaaaagccaattcttgctctttttgttggttgcctacctaaattctacaaaggtaaatacctactgcaactacaaatttttatcacaatatacacttcacacatcacacaaagaaaagatattagagattacaattctaaacaataccaggtgtttacttaa

SEQ ID NO: 4205 - DNA, 1520 bp, Zea Mays
atggcgtccctcctcctacaccgccgccacggtgcgcacccacgcgccgccgccgcggcctgcgctcgcctcctccgcgccttctccgcgctccccgacatcgatccctcggcgtcctccaccgcaagccctagcccggccgcgcccacctccacctccgcccgcgcctccgtgctcgacctccagctcgccgtccgcgccgagtctgacccagcccgcatccactccctcgtcgcctccgcgctctccagccatgacatgccgcgcctccacacctcgcgccagctcttttccctggccacttcccgcttgatccgcctccggcgcgccgacctcgccgcctcgctcctcgacctcctccttgcctccaccccgccctccccgggtctcctagcgcgggcactctccctctacccgggacccgacgacgcgctccgggccttctcctcgtctccccccgccgcccgctccgacgtctccctctcggcgctcctttcggcgttcctccgcgccggccgcctcgatgacatcaagtccaccattaccctggcggaatcctcccacggggtcgcgcccggccgcgcctcccacaatgtgctgctccatgcattggtcaagaattctgagcttgctgctgcccggaagctgctcgacgaaatggccaacaagaagttgaagcaccgccctgccccagacatcatatcctacaacactgtcctcgctggttactccgtgcaggatgatgaggatgagtttgggaagcttttgaaggagatcagcttgagcaacctggagccaaatgttgtcacttacaactgccggatacagtggttctccaagaaaggcgagacagtcaagggggaggagctgcttgatgtgatggaatcaaaggagatagcgccaaattacgttacctacaatgctctcgtgcaggggtactgcaaggagggaaatgttggggcagctatgcgtgtgttcaagaggatgaaagtgatgaagaggcgggagggaaggagtgacttgggtgtttctgcacattcacaggtatatgtggtgctgtttaggagtttggtggagaaagagaagcttaatgacgcgctgtggatttgtaagagctgctttgcaatgaaggcagcaccaccgtttgaggctgttaaaggtttggttgagggtttggtgaaggcaggcaggtcaacagaggccaaggatgttgttgccaagatggagtttcttgtgaaaggcgatgccaaacttgcttgggggaaggttgttggtgagctttcttttgaagagggatcaccgaatttgaatccatgatttgctagaggcatctgtgttacttctcattaattcatgcattttggagtttgaatgatgatggtgaagaagataagcgttcaacgtgggatccaatgttgccttcttgttgtcactggactgcattttgcaagtcccaggtaggaactcctgcgtggagaactcaagctccaagaaaggattttctgctggtgtcatgggac

SEQ ID NO: 4206 - DNA, 2424 bp, Zea Mays
cccgcgtgcgctctctccctccgccgctagccgctaggtgccgaggccttcatcggtcttccgctggcgacggttcgcctcgcgcgtgcgacgcctgggtggacaaccgccgcggcggcctcaggtgccgaggcattcgtcggtgtcttagctggcgacgaacaccaccaggtggccgacgaatttgcaacgtctttataagacggctgtaaatctgtgacagttaatattttgcagttgaagctctgtgattttgctgtgggcacattctgtttattgtcttatgatatggcagaatcacggactgtttcgaattctgagaataagcgcactctcccagcatggatgttgaaagcaacctcaggtaatcaaacagcaaagaccgcagatcagaataagcaggcactggaatctgctgacattggggctcttgatcagagcaaacccatcaaaaggaacaacagacggccgctaaaaaacttggattcagtagctgctggtgaactgggagttttgcagcgatgtgagggtagaggaaaggccagaaggaagagcaaggatgctgtcaaagatgaagttgaagaaattgtggaattaaagagtaagaatgcaagaaaaacgagtggaagaggtgctgcaaagaatagcaagaaacggaagttggataatgtcgaatcaggaccatcatcgccagtatcaactgatgatgacatagagcttactgttgaggatcttgtgagcatagctgaagagtttgttaatgctgataaacagaagcaatgtgaactacaaactgtggaggttaccaggcataaagagcatcatctgtgccctaaaatttccactgaggtagatagagggcagtcagtagtaaatgctcaatcagtgaaaggatcgatgcagtgcgcaacagccacaagtaatacaggtgcaatcaagtatacagaagatgagagcactagccatcaagaagtgcaattttcaagtttcaaaacgacagaagatgttgctcaggatatgataaacctgttattcggtcacctattgagtaaacctgttgccaacacagagaagtctgatcctgtagaatcaacgactagaactgtaaatcaggtgccagaggggagaggctggcacagcgaagtaccaaggcaggaggaacctgtgaagaaaccagagcctgtagtagaatcaatgcctacgactataaatcatgtgccagagaagaaagactggcgtagcgagttaacaaagctgggcgaacctgtggcaaagaagaagagcagcctcagggacaaggtggccttgtttctttgactgcatcagatgagatttgggcagtagattgtgattcgtatgggaccgtgtctgctggttctgagcgtgtcccagtcccacggcattgtttttgcatatagttatacctttggttaataagctgtcctctttaaatctagcaagccagccctcactgttgctagatggtattcctgtgtataaaggatgcatggtgcattttctgttggttgaagtacgactgtatgaagtatcggtgttcctcaacgcgacaactacactagagggaagcggtttaaacatcgtagagttattaggcatggaggagcccagctatctccttactcgccatggagcctttgcagaagttgctggagactgacacagctgagagtgtcctgttcccaatcatttacagtgctgcaaaactatggatcagtatgggcgctgatgatgcagccatcttcgtaaaagtggtaatggatcgttgtctatctttgggaggatcagaagaggtttcctttggacaagctctggcgatcggcagatgcaaaaatttgggggcattgagtgtcagacctggatgtgcacagattgccactcccggtaatgctgttgacaggcagttcatcaaggccaacaccatcctcactcttggggatgaggaataccaatggacatgggtgtcgaacttctacgccgcatgcaacaagaacagaacggtcagggacgttttgcacggagtatgtttcttgaatacgaaaacagtgacagagatggcagaattgttatgctatgggactttctcagtaacagaaagacctgacgagaatgaaaccggttagctctggcaccacaaccggaagagccgcgacaaaagccgtgggcggggcttgtgccttgtggggaggagtcctgtcaaacgagtttggctccggagcggggctcctgtctttatgtactcccctgttccaaaatagttgttttagccttttaacaaattcattcaataattaatatatttgttttgtatatgtgtctagatttattatcatattttaaatatagacataaaaatgaagctaaaacgatactaggggagtacacaatctagttatgacacttagg

SEQ ID NO: 4207 - DNA, 2425 bp, Zea Mays
cgctagccgctaggtgccgaggccttcatcggtcttccgctggcgacggttcgcctcgcgcgtgcgacgcctgggtggacaaccgccgcggcggcctcaggtgccgaggcattcgtcggtgtcttagctggcgacgaacaccaccagaatcacggactgtttcgaattctgagaataagcgcactctcccagcatggatgttgaaagcaacctcaggtaatcaaacagcaaagaccgcagatcagaataagcaggcactggaatctgctgacattggggctcttgatcagagcaaacccatcaaaaggaacaacagacggccgctaaaaaacttggattcagtagctgctggtgaactgggagttttgcagcgatgtgagggtagaggaaaggccagaaggaagagcaaggatgctgtcaaagatgaagttgaagaaattgtggaattaaagagtaagaatgcaagaaaaacgagtggaagaggtgctgcaaagaatagcaagaaacggaagttggataatgtcgaatcaggaccatcatcgccagtatcaactgatgatgacatagagcttactgttgaggatcttgtgagcatagctgaagagtttgttaatgctgataaacagaagcaatgtgaactacaaactgtggaggttaccaggcataaagagcatcatctgtgccctaaaatttccactgaggtagatagagggcagtcagtagtaaatgctcaatcagtgaaaggatcgatgcagtgcgcaacagccacaagtaatacaggtgcaatcaagtatacagaagatgagagcactagccatcaagaagtgcaattttcaagtttcaaaacgacagaagatgttgctcaggatatgataaacctgttattcggtcacctattgagtaaacctgttgccaacacagagaagtctgatcctgtagaatcaacgactagaactgtaaatcaggtgccagaggggagaggctggcacagcgaagtaccaaggcaggaggaacctgtgaagaaaccagagcctgtagtagaatcaatgcctacgactataaatcatgtgccagagaagaaagactggcgtagcgagttaacaaagctgggcgaacctgtggcaaagaagaagagcagcctcagggacaaggtggccttgtttctttgactgcatcagatgagatttgggcagtagattgtgattcgtatgggaccgtgtctgctggttctgagcgtgtcccagtcccacggcattgtttttgcatatagttatacctttggttaataagctgtcctctttaaatctagcaagccagccctcactgttgctagatggtattcctgtgtataaaggatgcatggtgcattttctgttggttgaagtacgactgtatgaagtatcggtgttcctcaacgcgacaactacactagagggaagcggtttaaacatcgtagagttattaggcatggaggagcccagctatctccttactcgccatggagcctttgcagaagttgctggagactgacacagctgagagtgtcctgttcccaatcatttacagtgctgcaaaactatggatcagtatgggcgctgatgatgcagccatcttcgtaaaagtggtaatggatcgttgtctatctttgggaggtttggttgctaataaacaagcagaagtccaatctaatgtgatgaccttaacacgattgatattatgaagtggttaatgtccaattaagtggtaatgtgaagcttctcaacaaagctggctgagtgaaactgctaaactaagtgtataggatcagaagaggtttcctttggacaagctctggcgatcggcagatgcaaaaatttgggggcattgagtgtcagacctggatgtgcacagattgccactcccggtaatgctgttgacaggcagttcatcaaggccaacaccatcctcactcttggggatgaggaataccaatggacatgggtgtcgaacttctacgccgcatgcaacaagaacagaacggtcagggacgttttgcacggagtatgtttcttgaatacgaaaacagtgacagagatggcagaattgttatgctatgggactttctcagtaacagaaagacctgacgagaatgaaaccggttagctctggcaccacaaccggaagagccgcgacaaaagccgtgggcggggcttgtgccttgtggggaggagtcctgtcaaacgagtttggctccggagcggggctcctgtctttatgtactcccctgttccaaaatagttgttttagccttttaacaaattcattcaataattaatatatttgttttgtatatgtgtctagatttattatcatattttaaatatagacataaaaatgaagctaaaacgatactaggggagtacacaatctagttatgacacttagg

SEQ ID NO: 4208 - DNA, 2459 bp, Zea Mays
cttcatcggtcttccgctggcgacggttcgcctcgcgcgtgcgacgcctgggtggacaaccgccgcggcggcctcaggtgccgaggcattcgtcggtgtcttagctggcgacgaacaccaccagatccctactaacttcgaaccttttgcaaaagttatcgagtgtgcatgtgtacatccatgcccctttattggctccgccccaggtggccgacgaatttgcaacgtctttataagacggctgtaaatctgtgacagttaatattttgcagttgaagctctgtgattttgctgtgggcacattctgtttattgtcttatgatatggcagaatcacggactgtttcgaattctgagaataagcgcactctcccagcatggatgttgaaagcaacctcaggtaatcaaacagcaaagaccgcagatcagaataagcaggcactggaatctgctgacattggggctcttgatcagagcaaacccatcaaaaggaacaacagacggccgctaaaaaacttggattcagtagctgctggtgaactgggagttttgcagcgatgtgagggtagaggaaaggccagaaggaagagcaaggatgctgtcaaagatgaagttgaagaaattgtggaattaaagagtaagaatgcaagaaaaacgagtggaagaggtgctgcaaagaatagcaagaaacggaagttggataatgtcgaatcaggaccatcatcgccagtatcaactgatgatgacatagagcttactgttgaggatcttgtgagcatagctgaagagtttgttaatgctgataaacagaagcaatgtgaactacaaactgtggaggttaccaggcataaagagcatcatctgtgccctaaaatttccactgaggtagatagagggcagtcagtagtaaatgctcaatcagtgaaaggatcgatgcagtgcgcaacagccacaagtaatacaggtgcaatcaagtatacagaagatgagagcactagccatcaagaagtgcaattttcaagtttcaaaacgacagaagatgttgctcaggatatgataaacctgttattcggtcacctattgagtaaacctgttgccaacacagagaagtctgatcctgtagaatcaacgactagaactgtaaatcaggtgccagaggggagaggctggcacagcgaagtaccaaggcaggaggaacctgtgaagaaaccagagcctgtagtagaatcaatgcctacgactataaatcatgtgccagagaagaaagactggcgtagcgagttaacaaagctgggcgaacctgtggcaaagaagaagagcagcctcagggacaaggtggccttgtttctttgactgcatcagatgagatttgggcagtagattgtgattcgtatgggaccgtgtctgctggttctgagcgtgtcccagtcccacggcattgtttttgcatatagttatacctttggttaataagctgtcctctttaaatctagcaagccagccctcactgttgctagatggtattcctgtgtataaaggatgcatggtgcattttctgttggttgaagtacgactgtatgaagtatcggtgttcctcaacgcgacaactacactagagggaagcggtttaaacatcgtagagttattaggcatggaggagcccagctatctccttactcgccatggagcctttgcagaagttgctggagactgacacagctgagagtgtcctgttcccaatcatttacagtgctgcaaaactatggatcagtatgggcgctgatgatgcagccatcttcgtaaaagtggtaatggatcgttgtctatctttgggaggatcagaagaggtttcctttggacaagctctggcgatcggcagatgcaaaaatttgggggcattgagtgtcagacctggatgtgcacagattgccactcccggtaatgctgttgacaggcagttcatcaaggccaacaccatcctcactcttggggatgaggaataccaatggacatgggtgtcgaacttctacgccgcatgcaacaagaacagaacggtcagggacgttttgcacggagtatgtttcttgaatacgaaaacagtgacagagatggcagaattgttatgctatgggactttctcagtaacagaaagacctgacgagaatgaaaccggttagctctggcaccacaaccggaagagccgcgacaaaagccgtgggcggggcttgtgccttgtggggaggagtcctgtcaaacgagtttggctccggagcggggctcctgtctttatgtactcccctgttccaaaatagttgttttagccttttaacaaattcattcaataattaatatatttgttttgtatatgtgtctagatttattatcatattttaaatatagacataaaaatgaagctaaaacgatactaggggagtacacaatctagttatgacacttagg

SEQ ID NO: 4209 - DNA, 3008 bp, Zea Mays
ctactctctcctcgccgcttgagaccaaatcccaaatccagttacccggtgcccccctcccgttccgtcgcgctcgggtccctctcctcctctcccctcctcctccttcgcttcgtagtaatcgtaaacccggaccgccccggcaggcccccgccccacgcgtgcgagagagagagagagagagagcgcgcgcgcgccatgggagaagagaccctcgttgccatgccgcccgcgctcccccaccaccacgcccccacgccgccacagccaccgtcggggccagttgctgcggataagggggaggaaggggaccatcgtcgtcccgcagagggcgtcgccgggccgccgcaagtccagccgcggtcggtgaccccgcacgggctcggcggcgaggagggggacgtatactacgcgcgcaagatgctccagggcgcggtgctgcggccgccgccgcacctcccgcagccagaggcgccgccggggctggccagggcgcggtccacgccggcggcgccgcacgagtacgcggcacaaggggatggcgaggacgaggagcgggagagcaagaggcccgtcgagcggtcggcctccgcgaactcggcctccacggcggtcgtggacgtggagtccatcgggcggttcttccgcgaccgccgcgacgtgctgtcgtcggccataacccgccgcatctcgtcgctcaaggagtcgacctcggcggcgaaggccggcgcctacggcgtgcaggagatccacctgcccaacgtcaaggtcacggtgcgcctcaaggacgcgatcgccgccgccgacgacaccgacaccgacacctacgacgtcgggtacaccttctcgggcggccgcatcaaaggccgggtcagcttcttctcccgctcgggctgccgcgactgcgccgccgtgcgcgcattcttccggcagtccggcctgccctacgtggaggtcaacctggacgtgttcccggagcgcgaggccgagctgggctcccgcgcgggcgccgcggcccgcgtgccccagatcttcctcaacgagaagctgctgggcggcctcgtggtgctcaactccctgcgcaacggcggcgagttcgagcgccgcgtgcgcgacctcgcgggccgccggtgccccgactcggcgccgcgcgtgcccgtgtacgggttcgacgacgacgccggcaaggcggacgaggaggccgaggacgccatggtgggcatcgtcagggtgctccgccaccgcctgccgatccaggacaggttcgtcagggtgaagctcgtcaagaactgcttctccggaaccgacatggtggacggcatcgtgaaccacctggactgcagcaggaagaaggctgtggagatcggcaaggagctggcaaggaagcacttcatccaccatgtcttcagggagaacgacttcgaggacgggaaccagaacctgtaccgcttcttggagcacgaccccgctgtacccaagtactacaacttccggggctccaccaacgacggcgagcccaggcccgccgcggccatcgggcagaggatgaccaggatcatgctcgccatcctcgaggcctacgcctccgacgaccgccgccacctcgactacggccgcatcgccgccagcgaggagttcagaaggtgtggagcactgcacggccgctcaggcaacacacaccaccgtcacaacttctccgctcacgcacagctcagagaactgcagcgggcggacatgacccagctccccgcggaggagcggctgcccttcttcctgaacctgcacaacgccatggccatccacgccgtggtccgggtcggccagccgggcgccgtcgatcgacggcctttcttctcggacttccagtacgtcgtgggaggccacccctactccctcgcggcgatcaggaacggtatcctcaggggtaaccggcggcagccttacacgctggccaagccgttcggctccagtgacaggaggctggagctggcacagcggcgcgcgaacccgctggtgcacttcgcgctgtgcgacgcgacgcggtcgagcccgaccgtgcggttctacacggcgcagggcgtggagccggagctccggcacgcggccagggagttctttctccacggcggcgtggagatcgacttggagagccggacagtgcacctcaccaggatcatcaaatggtacagcgctgattttgggcaggacagggacatcctccggtggctcctcaactacctcgacccgaccaaagccgggctcctgtcgcatctcctgaacgagggcggcccgatcagcatctcctacatgaactacgactggtctctgaacgtctgagcagaatccgtccgggatacgtacagcagtgtaacatgcattggggtggtggtggcacgatacattgagaggttcatggccacgatacattcagcatgctgagcttattcggcagagagaagtctagatatgtatatagaattttgagtgttgattttgcactcaaaaaggatatgccccgcgtgcaacagcatccctgtcggagaaatctctcccggtgatgccatatgccgtcgtcgttaagggcaagttttctgtattccagttgctccaacagggaagaaagagtagatgtatatcatttatgtatgctgggaaaatacactgttctggtcgccgtgaaatttccgcagtggagattgtgtgtatgcgtcctggtgatgaggtagagttggatggcatatgtgcttttctgttcttagttgagacgagttcttccgtatgcactccatctcctagctgcagactaattactttcatgcggtgggtgtttgacggaatgcttcactagcaatctgtagaaacatatgcttcatgggatgatgtatcataagtttatcctataaattttggtgaaattaattgattcatcatttatatactaattattagtaatgtggaatgagatgacgacagatcaacttattctattgtataaaacaaataaaaaa

SEQ ID NO: 4210 - DNA, 1724 bp, Zea Mays
catctctctgacgctccgagtgagaattttgtgcccaccatgttgttccaccggccggactcacgccgcggcggcgagggttcaacgcaaccgtcgtgtgtgccgcgatgccccccctgaccggctgtggagatcggcaaggagctggcaaggaagcacttcatccaccatgtcttcagggagaacgacttcgaggacgggaaccagaacctgtaccgcttcttggagcacgaccccgctgtacccaagtactacaacttccggggctccaccaacgacggcgagcccaggcccgccgcggccatcgggcagaggatgaccaggatcatgctcgccatcctcgaggcctacgcctccgacgaccgccgccacctcgactacggccgcatcgccgccagcgaggagttcagaaggtacgccaacctggtccaggaactgcagcgggcggacatgacccagctccccgcggaggagcggctgcccttcttcctgaacctgcacaacgccatggccatccacgccgtggtccgggtcggccagccgggcgccgtcgatcgacggcctttcttctcggacttccagtacgtcgtgggaggccacccctactccctcgcggcgatcaggaacggtatcctcaggggtaaccggcggcagccttacacgctggccaagccgttcggctccagtgacaggaggctggagctggcacagcggcgcgcgaacccgctggtgcacttcgcgctgtgcgacgcgacgcggtcgagcccgaccgtgcggttctacacggcgcagggcgtggagccggagctccggcacgcggccagggagttctttctccacggcggcgtggagatcgacttggagagccggacagtgcacctcaccaggatcatcaaatggtacagcgctgattttgggcaggacagggacatcctccggtggctcctcaactacctcgacccgaccaaagccgggctcctgtcgcatctcctgaacgagggcggcccgatcagcatctcctacatgaactacgactggtctctgaacgtctgagcagaatccgtccgggatacgtacagcagtgtaacatgcattggggtggtggtggcacgatacattgagaggttcatggccacgatacattcagcatgctgagcttattcggcagagagaagtctagatatgtatatagaattttgagtgttgattttgcactcaaaaaggatatgccccgcgtgcaacagcatccctgtcggagaaatctctcccggtgatgccatatgccgtcgtcgttaagggcaagttttctgtattccagttgctccaacagggaagaaagagtagatgtatatcatttatgtatgctgggaaaatacactgttctggtcgccgtgaaatttccgcagtggagattgtgtgtatgcgtcctggtgatgaggtagagttggatggcatatgtgcttttctgttcttagttgagacgagttcttccgtatgcactccatctcctagctgcagactaattactttcatgcggtgggtgtttgacggaatgcttcactagcaatctgtagaaacatatgcttcatgggatgatgtatcataagtttatcctataaattttggtgaaattaattgattcatcatttatatactaattattagtaatgtggaatgagatgacgacagatcaacttattctattgtataaaacaaataaaaaa

SEQ ID NO: 4211 - DNA, 5759 bp, Zea Mays
gaaaaactggaggtcatttcggcctggtcggcccagcctagacgtggcctttcggcctactagaggaaggggcgcacgcactaggccgcaacctgggcccaggccgcgtttttggcccacgcggcctccccctcccctccaattgatctcagccatcggtggcgatccgacggtccagatccacccgtgtactgtagcaagatctataaatgccgtgggtttcggagaggctgtaaaccctaatgctcatttcttctcaatctccccagccgccacagtaaaaaaaacacagccgccagggagcttcgacggatggcctctggccgatcgagcctttttttttttattctcatttcttcatttctattacgtgctctcttttccttctgtttttgtacaccgcggtgagctgctctctgtgtattatcttcactagtaaagtgagaagctaagtgcctgtgctgtattcttgccaccgtgatgcacaagaacgagaacggttcttggtctctatttcttctctcttatccttcgtttggccgaacgtctgtttttttttttttttttttcggccggctcaccttcacacgaccgccaggaagcactggtggctggcctctggccgaccgcgccgccctgcacagagccgcacagccgcccatctctttgctgtttttctgtttcttgttgaagctcagggctccctctccactcagcagactgccaggacacaacggctgacctcttggtgtccggctcggccggcactgtgcacggcgaaacgggccccgcaggctctctcgccggcggtcgcgaccccacgggtgggcgctcggccgtcggtagaatcgttcgtcggtggtctgttgagccagtgacgttggccgttcttttcttttgaaccagtcagtgcatctgtgcacagatctgcgtgttcctgtttcttattcgttgattcttggtcgtggatcgttggatcctgagccctgtgcgccgtctctgttgacggatgaactggttagggttaggttattaaactctaaccctgaaatatcggtctgtttaccctaaaatatcggtctgttttgttctcgggcgatgaactatgattaaaaaaatgagttcaaccactgattcgagacctttctgtgtctcaaaaaaaaaaacggaatgtggattaggagatctagggttcttaggtccctctgataccattgttagaatctatactgtctaggatcgattcctaagttcctagaatactgatccgtaactgaaagtaaaatcttgatgacgtgtagatctgatctactgatctactgagaggaacggggaaacacacctttgttgctgttgctatcttcatatcgtcgccctgcagagaagcagcaggcattgggatccgagccgctgtaggttgtcgcatttccaaacactccgacgcctaggcgatgggggcctctgaggactagggttttggggcgaggtactagcgttagtctttcctgcgaccccttagtcctatatatagcgtcgtgtgtctgggggctccaaccgaggttagcgtgggccctcccgatcaagggcccgattaaaggaacgatagttgggttaagcccaatccagtctctattgaccggctgtagaggacacacccaacactccaatctcaggggatggtggtgggggtggaggtcaccacggcgagatggatcaatggattagggggaacggagatctgaggagaaaaccaaaacactgccgagtaggaatacctgcgagaggaaatgcacaggggtcagcaagatctcgatgacggaggatgaagaagaagaacagaggatccacgtaagcaccggagtctgggtcgaagcacaccgacggcgacagtgcacggctatgccatcggcaacaactggcgaaagaaagaaatgaagaacaacccgagtcaacaacgggagaaggtgctaatggatttgaagtcaagctactaacgagaaatctcacgcgaaacggaggcagaggcacgaaggggaaccaaaagttgttaatggcgatcagcaaaagctgttgccatatctttaaagagctcggttcggttataataccacgaatgcaattatgtgcttcgtgttgctatttctacgatgccgcatccataccggatgccaaattgccaacaggaaatattgtaattgtaacgtcaaactttccatgctcgttcgactacaacgtgctgcggttgacataagggtcccacgtgttgaagccccaccgatcagccgcaccagcttccccgcacagccgtcgtcgttatccccagtccacaccggccgcgccgcagcggcccatcccacccgtcagcgtcggcgtaggcccccgccggctccttcctctcgccgtcgcgagaccgagcagccagtagcagcaggagtgggtgctccgtgccccgccatccaacaccaaaagtggaacccctcacacccacgcgaggtggtcgacactcgacggagagccgcaaaggaggaggagctggcggtggcgggatccagcaggccgcccatgtcgagcggcgcggacggatcggatccgatcacgggccttggcccgtcgacgatcccagagccgccggaccgtgagccgcctcatctacagtctccgtcgccggcggcgcagcaggaggtggcggcgtcgcaagccgagacgccggtgccagcggtgaccatcgtgatctcgcggccaggggaggaggttcagacgcctgatgcaatgggtggctccccggcgtgctccacgcaggccggtgacggcaaggctacagccacctcggtttcgttgaccgcttcggcggctgccaaggaggccgagttggcaaggtccgacagcttcgacgactacgagcaatgcaggtattcagtcggtgtgggattccctgcgcgcaagctcagggtattttagtgaattgcgagttggaaaggggacgagggtgtgttctgcttgggagtgttccaattttgtatgggtaccttgttaggtttagtagttgcgcgttttatccatctatgaatcacctgctatggctttgggtgctccctatcttgggggcgttgcttcctcatgcggtgtagtgattgtaggtgtatcaacaaatttccatttatgatgtactgattcatttcttgaagtcaccctagaacatggatcatgtcaactggactgtttactttagctgcccttttctgtctgtaactacaccaatagatttttgcctgcagttgggtggatgttgttcatcacatataacatgcgagcaataagtttgtgaacacgttcattgtcagtttatctgcatcttcattagtattgactttgccggtgcttgtgacatgtgcttatttagaggccatatattagtgcaattaggctgtcacagagtgcaaatgggactacatagcattcctgttagctatgatattttagggtctcgagggtatttaggcgttgatgagaatgtaggttatgcttccaatgcagttgggttgaccttgatccttgaatgtagaagcaaaagatattcgcaataagtttgctgatggtaagatcatttgtgtgtagaattattaaagattgggacttcatagattcaataattcaatgaataaatatgatatttgattcttggttatgaaaggctaactggcagctatgagctgcaggtgaaaaacaatacgaggaagaatgctggaaactgataatcaacttctggctgagtatttcttgtaccacaaatgtgctgtgagcatgaactgcatgcaccgttgctttgccatgtattgatgttcttgtgttgatctttttttatatactcattgcaagtaataacatatccaatctgttttctgctggctctttgcaatttttgaatatagataggagcactatgtttactaatcagaacaattatctttaggagtttaattttcctaatatatgtacctgaaataataacatatccaatctgttttctgctggctctttgcaatttttgaatatagataggagcactatgtttactaatcagaacaattatctttaggagtttaattttcctaatatatgtatctgaaataaaaaaaaaactcgacctacgggggggggggggtaagacagccccggacattatattaagaagaaaaccttctcacgcaggtcgagaaaactcccgaacccctgccccacccatacacagcggcactgtagcccatgtgagaacacgaccgtgaccggaattgggccttagacctgtattttgcgtggtacagacaagtggatttttttaaccacagcctgaaattcgctcccatagggagtcgaacccaggacatgagaagtgctacttagaccaaactaaccaactcggctagagaccctttcgctatgtacctgaaatcaaatattggtcttttgtttcataggattaacacctgtactcctaataatcccagatcccattaaggtacctgaggatcatccttgttttggaacaacgtagaatgcatcggcttgtactgtttgaagttaatagagccaacattgttcttaacggaagtacattttttaactgttagacattgcaatgccatcccataattagattcagtcatcccggtccaaaaaaaaaagattcagtcatgtaaaacagacatctagaagcccttcagtacatactgccatttactttaccttcaaaattttatatattgctgactcttgccacttattaccttattttttatggaggatgaatacctttttcacttctgcagagtttgtcaacagaagacagaagaacctctggtcgaccttggatgtagatgtcgtggtgatcttgcaaaagcacatcgcacatgcattgatgtttggtttcgtactagaggttcaaacaagtgtgagatatgccagcaggttgctgccaatatcccccctccagagacgcaagcaagtacaagttattgggtttggagggttgattcgacttatggaaggggacgaggaggacgtgaaaggggatggtttagcccactttgggttgcatttgcaatcctgattggtggtctcttattggatgtgctgatatctgtttctcttggtgtttccgcacttcctgtcaatataataattggcgttcttatagttctcggattgggcaccgcccttcgtcttgctctcgagtgctgccaggaatggggctcaaggaggaacgtaggcaatatgccgaggctggagaacataccgccgactgggtaccaccctgcagtagtataatcattatgggacttgtaaatagcggtaggaacatctaaccttgtgctggctcttggattgtattagctttagctcacacgttgctcgttaatgtcgagctcaaattcaaagcttgttgattacgatcgggtccatactccactagtccaatgcaatgtaaatgcagagttactgatactcggtcttcatggactagtgctgatgccgaattgccagcatcttaattggttgtctggctaatcgttcagcatgacagcgcttggtttcttcttccttgtacggtttgctctcacaaatcacttgttgtgtttcatcttatctgtggcttgttggtataggcatttgtgaaggccatttgagcgaatgctgttttcatacgtttatgcacagagttgtgtggatatagcatttttatgtgaactaataacctgctg

SEQ ID NO: 4212 - DNA, 5696 bp, Zea Mays
gaaaaactggaggtcatttcggcctggtcggcccagcctagacgtggcctttcggcctactagaggaaggggcgcacgcactaggccgcaacctgggcccaggccgcgtttttggcccacgcggcctccccctcccctccaattgatctcagccatcggtggcgatccgacggtccagatccacccgtgtactgtagcaagatctataaatgccgtgggtttcggagaggctgtaaaccctaatgctcatttcttctcaatctccccagccgccacagtaaaaaaaacacagccgccagggagcttcgacggatggcctctggccgatcgagcctttttttttttattctcatttcttcatttctattacgtgctctcttttccttctgtttttgtacaccgcggtgagctgctctctgtgtattatcttcactagtaaagtgagaagctaagtgcctgtgctgtattcttgccaccgtgatgcacaagaacgagaacggttcttggtctctatttcttctctcttatccttcgtttggccgaacgtctgtttttttttttttttttttcggccggctcaccttcacacgaccgccaggaagcactggtggctggcctctggccgaccgcgccgccctgcacagagccgcacagccgcccatctctttgctgtttttctgtttcttgttgaagctcagggctccctctccactcagcagactgccaggacacaacggctgacctcttggtgtccggctcggccggcactgtgcacggcgaaacgggccccgcaggctctctcgccggcggtcgcgaccccacgggtgggcgctcggccgtcggtagaatcgttcgtcggtggtctgttgagccagtgacgttggccgttcttttcttttgaaccagtcagtgcatctgtgcacagatctgcgtgttcctgtttcttattcgttgattcttggtcgtggatcgttggatcctgagccctgtgcgccgtctctgttgacggatgaactggttagggttaggttattaaactctaaccctgaaatatcggtctgtttaccctaaaatatcggtctgttttgttctcgggcgatgaactatgattaaaaaaatgagttcaaccactgattcgagacctttctgtgtctcaaaaaaaaaaacggaatgtggattaggagatctagggttcttaggtccctctgataccattgttagaatctatactgtctaggatcgattcctaagttcctagaatactgatccgtaactgaaagtaaaatcttgatgacgtgtagatctgatctactgatctactgagaggaacggggaaacacacctttgttgctgttgctatcttcatatcgtcgccctgcagagaagcagcaggcattgggatccgagccgctgtaggttgtcgcatttccaaacactccgacgcctaggcgatgggggcctctgaggactagggttttggggcgaggtactagcgttagtctttcctgcgaccccttagtcctatatatagcgtcgtgtgtctgggggctccaaccgaggttagcgtgggccctcccgatcaagggcccgattaaaggaacgatagttgggttaagcccaatccagtctctattgaccggctgtagaggacacacccaacactccaatctcaggggatggtggtgggggtggaggtcaccacggcgagatggatcaatggattagggggaacggagatctgaggagaaaaccaaaacactgccgagtaggaatacctgcgagaggaaatgcacaggggtcagcaagatctcgatgacggaggatgaagaagaagaacagaggatccacgtaagcaccggagtctgggtcgaagcacaccgacggcgacagtgcacggctatgccatcggcaacaactggcgaaagaaagaaatgaagaacaacccgagtcaacaacgggagaaggtgctaatggatttgaagtcaagctactaacgagaaatctcacgcgaaacggaggcagaggcacgaaggggaaccaaaagttgttaatggcgatcagcaaaagctgttgccatatctttaaagagctcggttcggttataataccacgaatgcaattatgtgcttcgtgttgctatttctacgatgccgcatccataccggatgccaaattgccaacaggaaatattgtaattgtaacgtcaaactttccatgctcgttcgactacaacgtgctgcggttgacataagggtcccacgtgttgaagccccaccgatcagccgcaccagcttccccgcacagccgtcgtcgttatccccagtccacaccggccgcgccgcagcggcccatcccacccgtcagcgtcggcgtaggcccccgccggctccttcctctcgccgtcgcgagaccgagcagccagtagcagcaggagtgggtgctccgtgccccgccatccaacaccaaaagtggaacccctcacacccacgcgaggtggtcgacactcgacggagagccgcaaaggaggaggagctggcggtggcgggatccagcaggccgcccatgtcgagcggcgcggacggatcggatccgatcacgggccttggcccgtcgacgatcccagagccgccggaccgtgagccgcctcatctacagtctccgtcgccggcggcgcagcaggaggtggcggcgtcgcaagccgagacgccggtgccagcggtgaccatcgtgatctcgcggccaggggaggaggttcagacgcctgatgcaatgggtggctccccggcgtgctccacgcaggccggtgacggcaaggctacagccacctcggtttcgttgaccgcttcggcggctgccaaggaggccgagttggcaaggtccgacagcttcgacgactacgagcaatgcaggtattcagtcggtgtgggattccctgcgcgcaagctcagggtattttagtgaattgcgagttggaaaggggacgagggtgtgttctgcttgggagtgttccaattttgtatgggtaccttgttaggtttagtagttgcgcgttttatccatctatgaatcacctgctatggctttgggtgctccctatcttgggggcgttgcttcctcatgcggtgtagtgattgtaggtgtatcaacaaatttccatttatgatgtactgattcatttcttgaagtcaccctagaacatggatcatgtcaactggactgtttactttagctgcccttttctgtctgtaactacaccaatagatttttgcctgcagttgggtggatgttgttcatcacatataacatgcgagcaataagtttgtgaacacgttcattgtcagtttatctgcatcttcattagtattgactttgccggtgcttgtgacatgtgcttatttagaggccatatattagtgcaattaggctgtcacagagtgcaaatgggactacatagcattcctgttagctatgatattttagggtctcgagggtatttaggcgttgatgagaatgtaggttatgcttccaatgcagttgggttgaccttgatccttgaatgtagaagcaaaagatattcgcaataagtttgctgatggtaagatcatttgtgtgtagaattattaaagattgggacttcatagattcaataattcaatgaataaatatgatatttgattcttggttatgaaaggctaactggcagctatgagctgcaggtgaaaaacaatacgaggaagaatgctggaaactgataatcaacttctggctgagtatttcttgtaccacaaatgtgctgtgagcatgaactgcatgcaccgttgctttgccatgtattgatgttcttgtgttgatctttttttatatactcattgcaagtaataacatatccaatctgttttctgctggctctttgcaatttttgaatatagataggagcactatgtttactaatcagaacaattatctttaggagtttaattttcctaatatatgtacctgaaataataacatatccaatctgttttctgctggctctttgcaatttttgaatatagataggagcactatgtttactaatcagaacaattatctttaggagtttaattttcctaatatatgtatctgaaataaaaaaaaaactcgacctacgggggggggggggtaagacagccccggacattatattaagaagaaaaccttctcacgcaggtcgagaaaactcccgaacccctgccccacccatacacagcggcactgtagcccatgtgagaacacgaccgtgaccggaattgggccttagacctgtattttgcgtggtacagacaagtggatttttttaaccacagcctgaaattcgctcccatagggagtcgaacccaggacatgagaagtgctacttagaccaaactaaccaactcggctagagaccctttcgctatgtacctgaaatcaaatattggtcttttgtttcataggattaacacctgtactcctaataatcccagatcccattaaggtacctgaggatcatccttgttttggaacaacgtagaatgcatcggcttgtactgtttgaagttaatagagccaacattgttcttaacggaagtacattttttaactgttagacattgcaatgccatcccataattagattcagtcatcccggtccaaaaaaaaaagattcagtcatgtaaaacagacatctagaagcccttcagtacatactgccatttactttaccttcaaaattttatatattgctgactcttgccacttattaccttattttttatggaggatgaatacctttttcacttctgcagagtttgtcaacagaagacagaagaacctctggtcgaccttggatgtagatgtcgtggtgatcttgcaaaagcacatcgcacatgcattgatgtttggtttcgtactagaggttcaaacaagtgtgagatatgccagcaggttgctgccaatatcccccctccagagacgcaagcaagtggatggtttagcccactttgggttgcatttgcaatcctgattggtggtctcttattggatgtgctgatatctgtttctcttggtgtttccgcacttcctgtcaatataataattggcgttcttatagttctcggattgggcaccgcccttcgtcttgctctcgagtgctgccaggaatggggctcaaggaggaacgtaggcaatatgccgaggctggagaacataccgccgactgggtaccaccctgcagtagtataatcattatgggacttgtaaatagcggtaggaacatctaaccttgtgctggctcttggattgtattagctttagctcacacgttgctcgttaatgtcgagctcaaattcaaagcttgttgattacgatcgggtccatactccactagtccaatgcaatgtaaatgcagagttactgatactcggtcttcatggactagtgctgatgccgaattgccagcatcttaattggttgtctggctaatcgttcagcatgacagcgcttggtttcttcttccttgtacggtttgctctcacaaatcacttgttgtgtttcatcttatctgtggcttgttggtataggcatttgtgaaggccatttgagcgaatgctgttttcatacgtttatgcacagagttgtgtggatatagcatttttatgtgaactaataacctgctg

SEQ ID NO: 4213 - DNA, 4827 bp, Zea Mays
ctccccctcccctccaattgatctcagccatcggtggcgatccgacggtccagatccacccgtgtactgtagcaagatctataaatgccgtgggtttcggagaggctgtaaaccctaatgctcatttcttctcaatctccccagccgccacagtaaaaaaaacacagccgccagggagcttcgacggatggcctctggccgatcgagcctttttttttttattctcatttcttcatttctattacgtgctctcttttccttctgtttttgtacaccgcggtgagctgctctctgtgtattatcttcactagtaaagtgagaagctaagtgcctgtgctgtattcttgccaccgtgatgcacaagaacgagaacggttcttggtctctatttcttctctcttatccttcgtttggccgaacgtctgtttttttttttttttttttcggccggctcaccttcacacgaccgccaggaagcactggtggctggcctctggccgaccgcgccgccctgcacagagccgcacagccgcccatctctttgctgtttttctgtttcttgttgaagctcagggctccctctccactcagcagactgccaggacacaacggctgacctcttggtgtccggctcggccggcactgtgcacggcgaaacgggccccgcaggctctctcgccggcggtcgcgaccccacgggtgggcgctcggccgtcggtagaatcgttcgtcggtggtctgttgagccagtgacgttggccgttcttttcttttgaaccagtcagtgcatctgtgcacagatctgcgtgttcctgtttcttattcgttgattcttggtcgtggatcgttggatcctgagccctgtgcgccgtctctgttgacggatgaactggttagggttaggttattaaactctaaccctgaaatatcggtctgtttaccctaaaatatcggtctgttttgttctcgggcgatgaactatgattaaaaaaatgagttcaaccactgattcgagacctttctgtgtctcaaaaaaaaaaacggaatgtggattaggagatctagggttcttaggtccctctgataccattgttagaatctatactgtctaggatcgattcctaagttcctagaatactgatccgtaactgaaagtaaaatcttgatgacgtgtagatctgatctactgatctactgagaggaacggggaaacacacctttgttgctgttgctatcttcatatcgtcgccctgcagagaagcagcaggcattgggatccgagccgctgtaggttgtcgcatttccaaacactccgacgcctaggcgatgggggcctctgaggactagggttttggggcgaggtactagcgttagtctttcctgcgaccccttagtcctatatatagcgtcgtgtgtctgggggctccaaccgaggttagcgtgggccctcccgatcaagggcccgattaaaggaacgatagttgggttaagcccaatccagtctctattgaccggctgtagaggacacacccaacactccaatctcaggggatggtggtgggggtggaggtcaccacggcgagatggatcaatggattagggggaacggagatctgaggagaaaaccaaaacactgccgagtaggaatacctgcgagaggaaatgcacaggggtcagcaagatctcgatgacggaggatgaagaagaagaacagaggatccacgtaagcaccggagtctgggtcgaagcacaccgacggcgacagtgcacggctatgccatcggcaacaactggcgaaagaaagaaatgaagaacaacccgagtcaacaacgggagaaggtgctaatggatttgaagtcaagctactaacgagaaatctcacgcgaaacggaggcagaggcacgaaggggaaccaaaagttgttaatggcgatcagcaaaagctgttgccatatctttaaagagctcggttcggttataataccacgaatgcaattatgtgcttcgtgttgctatttctacgatgccgcatccataccggatgccaaattgccaacaggaaatattgtaattgtaacgtcaaactttccatgctcgttcgactacaacgtgctgcggttgacataagggtcccacgtgttgaagccccaccgatcagccgcaccagcttccccgcacagccgtcgtcgttatccccagtccacaccggccgcgccgcagcggcccatcccacccgtcagcgtcggcgtaggcccccgccggctccttcctctcgccgtcgcgagaccgagcagccagtagcagcaggagtgggtgctccgtgccccgccatccaacaccaaaagtggaacccctcacacccacgcgaggtggtcgacactcgacggagagccgcaaaggaggaggagctggcggtggcgggatccagcaggccgcccatgtcgagcggcgcggacggatcggatccgatcacgggccttggcccgtcgacgatcccagagccgccggaccgtgagccgcctcatctacagtctccgtcgccggcggcgcagcaggaggtggcggcgtcgcaagccgagacgccggtgccagcggtgaccatcgtgatctcgcggccaggggaggaggttcagacgcctgatgcaatgggtggctccccggcgtgctccacgcaggccggtgacggcaaggctacagccacctcggtttcgttgaccgcttcggcggctgccaaggaggccgagttggcaaggtccgacagcttcgacgactacgagcaatgcaggtgaaaaacaatacgaggaagaatgctggaaactgataatcaacttctggctgagtatttcttgtaccacaaatgtgctgtgagcatgaactgcatgcaccgttgctttgccatgtattgatgttcttgtgttgatctttttttatatactcattgcaagtaataacatatccaatctgttttctgctggctctttgcaatttttgaatatagataggagcactatgtttactaatcagaacaattatctttaggagtttaattttcctaatatatgtacctgaaataataacatatccaatctgttttctgctggctctttgcaatttttgaatatagataggagcactatgtttactaatcagaacaattatctttaggagtttaattttcctaatatatgtatctgaaataaaaaaaaaactcgacctacgggggggggggggtaagacagccccggacattatattaagaagaaaaccttctcacgcaggtcgagaaaactcccgaacccctgccccacccatacacagcggcactgtagcccatgtgagaacacgaccgtgaccggaattgggccttagacctgtattttgcgtggtacagacaagtggatttttttaaccacagcctgaaattcgctcccatagggagtcgaacccaggacatgagaagtgctacttagaccaaactaaccaactcggctagagaccctttcgctatgtacctgaaatcaaatattggtcttttgtttcataggattaacacctgtactcctaataatcccagatcccattaaggtacctgaggatcatccttgttttggaacaacgtagaatgcatcggcttgtactgtttgaagttaatagagccaacattgttcttaacggaagtacattttttaactgttagacattgcaatgccatcccataattagattcagtcatcccggtccaaaaaaaaaagattcagtcatgtaaaacagacatctagaagcccttcagtacatactgccatttactttaccttcaaaattttatatattgctgactcttgccacttattaccttattttttatggaggatgaatacctttttcacttctgcagagtttgtcaacagaagacagaagaacctctggtcgaccttggatgtagatgtcgtggtgatcttgcaaaagcacatcgcacatgcattgatgtttggtttcgtactagaggttcaaacaagtgtgagatatgccagcaggttgctgccaatatcccccctccagagacgcaagcaagtacaagttattgggtttggagggttgattcgacttatggaaggggacgaggaggacgtgaaaggggatggtttagcccactttgggttgcatttgcaatcctgattggtggtctcttattggatgtgctgatatctgtttctcttggtgtttccgcacttcctgtcaatataataattggcgttcttatagttctcggattgggcaccgcccttcgtcttgctctcgagtgctgccaggaatggggctcaaggaggaacgtaggcaatatgccgaggctggagaacataccgccgactgggtaccaccctgcagtagtataatcattatgggacttgtaaatagcggtaggaacatctaaccttgtgctggctcttggattgtattagctttagctcacacgttgctcgttaatgtcgagctcaaattcaaagcttgttgattacgatcgggtccatactccactagtccaatgcaatgtaaatgcagagttactgatactcggtcttcatggactagtgctgatgccgaattgccagcatcttaattggttgtctggctaatcgttcagcatgacagcgcttggtttcttcttccttgtacggtttgctctcacaaatcacttgttgtgtttcatcttatctgtggcttgttggtataggcatttgtgaaggccatttgagcgaatgctgttttcatacgtttatgcacagagttgtgtggatatagcatttttatgtgaactaataacctgctg

SEQ ID NO: 4214 - DNA, 3838 bp, Zea Mays
cgacggtccagatccacccgtgtactgtagcaagatctataaatgccgtgggtttcggagaggctgtaaaccctaatgctcatttcttctcaatctccccagccgccacagtaaaaaaaacacagccgccagggagcttcgacggatggcctctggccgatcgagcctttttttttttattctcatttcttcatttctattacgtgctctcttttccttctgtttttgtacaccgcggtgagctgctctctgtgtattatcttcactagtaaagtgagaagctaagtgcctgtgctgtattcttgccaccgtgatgcacaagaacgagaacggttcttggtctctatttcttctctcttatccttcgtttggccgaacgtctgtttttttttttttttttttcggccggctcaccttcacacgaccgccaggaagcactggtggctggcctctggccgaccgcgccgccctgcacagagccgcacagccgcccatctctttgctgtttttctgtttcttgttgaagctcagggctccctctccactcagcagactgccaggacacaacggctgacctcttggtgtccggctcggccggcactgtgcacggcgaaacgggccccgcaggctctctcgccggcggtcgcgaccccacgggtgggcgctcggccgtcggtagaatcgttcgtcggtggtctgttgagccagtgacgttggccgttcttttcttttgaaccagtcagtgcatctgtgcacagatctgcgtgttcctgtttcttattcgttgattcttggtcgtggatcgttggatcctgagccctgtgcgccgtctctgttgacggatgaactggttagggttaggttattaaactctaaccctgaaatatcggtctgtttaccctaaaatatcggtctgttttgttctcgggcgatgaactatgattaaaaaaatgagttcaaccactgattcgagacctttctgtgtctcaaaaaaaaaaacggaatgtggattaggagatctagggttcttaggtccctctgataccattgttagaatctatactgtctaggatcgattcctaagttcctagaatactgatccgtaactgaaagtaaaatcttgatgacgtgtagatctgatctactgatctactgagaggaacggggaaacacacctttgttgctgttgctatcttcatatcgtcgccctgcagagaagcagcaggcattgggatccgagccgctgtaggttgtcgcatttccaaacactccgacgcctaggcgatgggggcctctgaggactagggttttggggcgaggtactagcgttagtctttcctgcgaccccttagtcctatatatagcgtcgtgtgtctgggggctccaaccgaggttagcgtgggccctcccgatcaagggcccgattaaaggaacgatagttgggttaagcccaatccagtctctattgaccggctgtagaggacacacccaacactccaatctcaggggatggtggtgggggtggaggtcaccacggcgagatggatcaatggattagggggaacggagatctgaggagaaaaccaaaacactgccgagtaggaatacctgcgagaggaaatgcacaggggtcagcaagatctcgatgacggaggatgaagaagaagaacagaggatccacgtaagcaccggagtctgggtcgaagcacaccgacggcgacagtgcacggctatgccatcggcaacaactggcgaaagaaagaaatgaagaacaacccgagtcaacaacgggagaaggtgctaatggatttgaagtcaagctactaacgagaaatctcacgcgaaacggaggcagaggcacgaaggggaaccaaaagttgttaatggcgatcagcaaaagctgttgccatatctttaaagagctcggttcggttataataccacgaatgcaattatgtgcttcgtgttgctatttctacgatgccgcatccataccggatgccaaattgccaacaggaaatattgtaattgtaacgtcaaactttccatgctcgttcgactacaacgtgctgcggttgacataagggtcccacgtgttgaagccccaccgatcagccgcaccagcttccccgcacagccgtcgtcgttatccccagtccacaccggccgcgccgcagcggcccatcccacccgtcagcgtcggcgtaggcccccgccggctccttcctctcgccgtcgcgagaccgagcagccagtagcagcaggagtgggtgctccgtgccccgccatccaacaccaaaagtggaacccctcacacccacgcgaggtggtcgacactcgacggagagccgcaaaggaggaggagctggcggtggcgggatccagcaggccgcccatgtcgagcggcgcggacggatcggatccgatcacgggccttggcccgtcgacgatcccagagccgccggaccgtgagccgcctcatctacagtctccgtcgccggcggcgcagcaggaggtggcggcgtcgcaagccgagacgccggtgccagcggtgaccatcgtgatctcgcggccaggggaggaggttcagacgcctgatgcaatgggtggctccccggcgtgctccacgcaggccggtgacggcaaggctacagccacctcggtttcgttgaccgcttcggcggctgccaaggaggccgagttggcaaggtccgacagcttcgacgactacgagcaatgcagagtttgtcaacagaagacagaagaacctctggtcgaccttggatgtagatgtcgtggtgatcttgcaaaagcacatcgcacatgcattgatgtttggtttcgtactagaggttcaaacaagtgtgagatatgccagttgctgccaatatcccccctccagagacgcaagcaagtacaagttattgggtttggagggttgattcgacttatggaaggggacgaggaggacgtgaaagggtatttttatcactggatatgataaataagaaacagatgcattaacctgactctttctctgaaaaaatgaataatgatcatgtaaccctgtgcaagttttattttttattgaacctgcattgttcattctgcttcatattttattttgtttctctttttttgtgtagggatggtttagcccactttgggttgcatttgcaatcctgattggtggtctcttattggatgtgctgatatctgtttctcttggtgtttccgcacttcctgtcaatataataattggcgttcttatagttctcggattgggcaccgcccttcgtcttgctctcgagtgctgccaggaatggggctcaaggaggaacgtaggcaatatgccgaggctggagaacataccgccgactgggtaccaccctgcagtagtataatcattatgggacttgtaaatagcggtaggaacatctaaccttgtgctggctcttggattgtattagctttagctcacacgttgctcgttaatgtcgagctcaaattcaaagcttgttgattacgatcgggtccatactccactagtccaatgcaatgtaaatgcagagttactgatactcggtcttcatggactagtgctgatgccgaattgccagcatcttaattggttgtctggctaatcgttcagcatgacagcgcttggtttcttcttccttgtacggtttgctctcacaaatcacttgttgtgtttcatcttatctgtggcttgttggtataggcatttgtgaaggccatttgagcgaatgctgttttcatacgtttatgcacagagttgtgtggatatagcatttttatgtgaactaataacctgctg

SEQ ID NO: 4215 - DNA, 5137 bp, Zea Mays
cgacggtccagatccacccgtgtactgtagcaagatctataaatgccgtgggtttcggagaggctgtaaaccctaatgctcatttcttctcaatctccccagccgccacagtaaaaaaaacacagccgccagggagcttcgacggatggcctctggccgatcgagcctttttttttttattctcatttcttcatttctattacgtgctctcttttccttctgtttttgtacaccgcggtgagctgctctctgtgtattatcttcactagtaaagtgagaagctaagtgcctgtgctgtattcttgccaccgtgatgcacaagaacgagaacggttcttggtctctatttcttctctcttatccttcgtttggccgaacgtctgtttttttttttttttttttcggccggctcaccttcacacgaccgccaggaagcactggtggctggcctctggccgaccgcgccgccctgcacagagccgcacagccgcccatctctttgctgtttttctgtttcttgttgaagctcagggctccctctccactcagcagactgccaggacacaacggctgacctcttggtgtccggctcggccggcactgtgcacggcgaaacgggccccgcaggctctctcgccggcggtcgcgaccccacgggtgggcgctcggccgtcggtagaatcgttcgtcggtggtctgttgagccagtgacgttggccgttcttttcttttgaaccagtcagtgcatctgtgcacagatctgcgtgttcctgtttcttattcgttgattcttggtcgtggatcgttggatcctgagccctgtgcgccgtctctgttgacggatgaactggttagggttaggttattaaactctaaccctgaaatatcggtctgtttaccctaaaatatcggtctgttttgttctcgggcgatgaactatgattaaaaaaatgagttcaaccactgattcgagacctttctgtgtctcaaaaaaaaaaacggaatgtggattaggagatctagggttcttaggtccctctgataccattgttagaatctatactgtctaggatcgattcctaagttcctagaatactgatccgtaactgaaagtaaaatcttgatgacgtgtagatctgatctactgatctactgagaggaacggggaaacacacctttgttgctgttgctatcttcatatcgtcgccctgcagagaagcagcaggcattgggatccgagccgctgtaggttgtcgcatttccaaacactccgacgcctaggcgatgggggcctctgaggactagggttttggggcgaggtactagcgttagtctttcctgcgaccccttagtcctatatatagcgtcgtgtgtctgggggctccaaccgaggttagcgtgggccctcccgatcaagggcccgattaaaggaacgatagttgggttaagcccaatccagtctctattgaccggctgtagaggacacacccaacactccaatctcaggggatggtggtgggggtggaggtcaccacggcgagatggatcaatggattagggggaacggagatctgaggagaaaaccaaaacactgccgagtaggaatacctgcgagaggaaatgcacaggggtcagcaagatctcgatgacggaggatgaagaagaagaacagaggatccacgtaagcaccggagtctgggtcgaagcacaccgacggcgacagtgcacggctatgccatcggcaacaactggcgaaagaaagaaatgaagaacaacccgagtcaacaacgggagaaggtgctaatggatttgaagtcaagctactaacgagaaatctcacgcgaaacggaggcagaggcacgaaggggaaccaaaagttgttaatggcgatcagcaaaagctgttgccatatctttaaagagctcggttcggttataataccacgaatgcaattatgtgcttcgtgttgctatttctacgatgccgcatccataccggatgccaaattgccaacaggaaatattgtaattgtaacgtcaaactttccatgctcgttcgactacaacgtgctgcggttgacataagggtcccacgtgttgaagccccaccgatcagccgcaccagcttccccgcacagccgtcgtcgttatccccagtccacaccggccgcgccgcagcggcccatcccacccgtcagcgtcggcgtaggcccccgccggctccttcctctcgccgtcgcgagaccgagcagccagtagcagcaggagtgggtgctccgtgccccgccatccaacaccaaaagtggaacccctcacacccacgcgaggtggtcgacactcgacggagagccgcaaaggaggaggagctggcggtggcgggatccagcaggccgcccatgtcgagcggcgcggacggatcggatccgatcacgggccttggcccgtcgacgatcccagagccgccggaccgtgagccgcctcatctacagtctccgtcgccggcggcgcagcaggaggtggcggcgtcgcaagccgagacgccggtgccagcggtgaccatcgtgatctcgcggccaggggaggaggttcagacgcctgatgcaatgggtggctccccggcgtgctccacgcaggccggtgacggcaaggctacagccacctcggtttcgttgaccgcttcggcggctgccaaggaggccgagttggcaaggtccgacagcttcgacgactacgagcaatgcaggtgaaaaacaatacgaggaagaatgctggaaactgataatcaacttctggctgagtatttcttgtaccacaaatgtgctgtgagcatgaactgcatgcaccgttgctttgccatgtattgatgttcttgtgttgatctttttttatatactcattgcaagtaataacatatccaatctgttttctgctggctctttgcaatttttgaatatagataggagcactatgtttactaatcagaacaattatctttaggagtttaattttcctaatatatgtacctgaaataataacatatccaatctgttttctgctggctctttgcaatttttgaatatagataggagcactatgtttactaatcagaacaattatctttaggagtttaattttcctaatatatgtatctgaaataaaaaaaaaactcgacctacgggggggggggggtaagacagccccggacattatattaagaagaaaaccttctcacgcaggtcgagaaaactcccgaacccctgccccacccatacacagcggcactgtagcccatgtgagaacacgaccgtgaccggaattgggccttagacctgtattttgcgtggtacagacaagtggatttttttaaccacagcctgaaattcgctcccatagggagtcgaacccaggacatgagaagtgctacttagaccaaactaaccaactcggctagagaccctttcgctatgtacctgaaatcaaatattggtcttttgtttcataggattaacacctgtactcctaataatcccagatcccattaaggtacctgaggatcatccttgttttggaacaacgtagaatgcatcggcttgtactgtttgaagttaatagagccaacattgttcttaacggaagtacattttttaactgttagacattgcaatgccatcccataattagattcagtcatcccggtccaaaaaaaaaagattcagtcatgtaaaacagacatctagaagcccttcagtacatactgccatttactttaccttcaaaattttatatattgctgactcttgccacttattaccttattttttatggaggatgaatacctttttcacttctgcagagtttgtcaacagaagacagaagaacctctggtcgaccttggatgtagatgtcgtggtgatcttgcaaaagcacatcgcacatgcattgatgtttggtttcgtactagaggttcaaacaagtgtgagatatgccagcaggttgctgccaatatcccccctccagagacgcaagcaagtgtatgtttactattttgcacttcatatctttcaatctgtattggatcatttggagaatgtatgcctctagttcatatgtatatccattgtcgtttatgctcgaactaacaaactggtctatgtttatgtttagccaaattaacctacctatcgcccgttagtatctgtttgtagttttatgaacacctcattaaatataataacaactttaattggctttgttctggaagacttgtgttccacaattacataaatgaaggtcattctgaaaattgaggaggcagaatattgttaaaagtacaagtcgaattcctgtttctagtagtgaaatttacttgttttcattcaacagacaagttattgggtttggagggttgattcgacttatggaaggggacgaggaggacgtgaaaggggatggtttagcccactttgggttgcatttgcaatcctgattggtggtctcttattggatgtgctgatatctgtttctcttggtgtttccgcacttcctgtcaatataataattggcgttcttatagttctcggattgggcaccgcccttcgtcttgctctcgagtgctgccaggaatggggctcaaggaggaacgtaggcaatatgccgaggctggagaacataccgccgactgggtaccaccctgcagtagtataatcattatgggacttgtaaatagcggtaggaacatctaaccttgtgctggctcttggattgtattagctttagctcacacgttgctcgttaatgtcgagctcaaattcaaagcttgttgattacgatcgggtccatactccactagtccaatgcaatgtaaatgcagagttactgatactcggtcttcatggactagtgctgatgccgaattgccagcatcttaattggttgtctggctaatcgttcagcatgacagcgcttggtttcttcttccttgtacggtttgctctcacaaatcacttgttgtgtttcatcttatctgtggcttgttggtataggcatttgtgaaggccatttgagcgaatgctgttttcatacgtttatgcacagagttgtgtggatatagcatttttatgtgaactaataacctgctg

SEQ ID NO: 4216 - DNA, 5673 bp, Zea Mays
cgacggtccagatccacccgtgtactgtagcaagatctataaatgccgtgggtttcggagaggctgtaaaccctaatgctcatttcttctcaatctccccagccgccacagtaaaaaaaacacagccgccagggagcttcgacggatggcctctggccgatcgagcctttttttttttattctcatttcttcatttctattacgtgctctcttttccttctgtttttgtacaccgcggtgagctgctctctgtgtattatcttcactagtaaagtgagaagctaagtgcctgtgctgtattcttgccaccgtgatgcacaagaacgagaacggttcttggtctctatttcttctctcttatccttcgtttggccgaacgtctgtttttttttttttttttttcggccggctcaccttcacacgaccgccaggaagcactggtggctggcctctggccgaccgcgccgccctgcacagagccgcacagccgcccatctctttgctgtttttctgtttcttgttgaagctcagggctccctctccactcagcagactgccaggacacaacggctgacctcttggtgtccggctcggccggcactgtgcacggcgaaacgggccccgcaggctctctcgccggcggtcgcgaccccacgggtgggcgctcggccgtcggtagaatcgttcgtcggtggtctgttgagccagtgacgttggccgttcttttcttttgaaccagtcagtgcatctgtgcacagatctgcgtgttcctgtttcttattcgttgattcttggtcgtggatcgttggatcctgagccctgtgcgccgtctctgttgacggatgaactggttagggttaggttattaaactctaaccctgaaatatcggtctgtttaccctaaaatatcggtctgttttgttctcgggcgatgaactatgattaaaaaaatgagttcaaccactgattcgagacctttctgtgtctcaaaaaaaaaaacggaatgtggattaggagatctagggttcttaggtccctctgataccattgttagaatctatactgtctaggatcgattcctaagttcctagaatactgatccgtaactgaaagtaaaatcttgatgacgtgtagatctgatctactgatctactgagaggaacggggaaacacacctttgttgctgttgctatcttcatatcgtcgccctgcagagaagcagcaggcattgggatccgagccgctgtaggttgtcgcatttccaaacactccgacgcctaggcgatgggggcctctgaggactagggttttggggcgaggtactagcgttagtctttcctgcgaccccttagtcctatatatagcgtcgtgtgtctgggggctccaaccgaggttagcgtgggccctcccgatcaagggcccgattaaaggaacgatagttgggttaagcccaatccagtctctattgaccggctgtagaggacacacccaacactccaatctcaggggatggtggtgggggtggaggtcaccacggcgagatggatcaatggattagggggaacggagatctgaggagaaaaccaaaacactgccgagtaggaatacctgcgagaggaaatgcacaggggtcagcaagatctcgatgacggaggatgaagaagaagaacagaggatccacgtaagcaccggagtctgggtcgaagcacaccgacggcgacagtgcacggctatgccatcggcaacaactggcgaaagaaagaaatgaagaacaacccgagtcaacaacgggagaaggtgctaatggatttgaagtcaagctactaacgagaaatctcacgcgaaacggaggcagaggcacgaaggggaaccaaaagttgttaatggcgatcagcaaaagctgttgccatatctttaaagagctcggttcggttataataccacgaatgcaattatgtgcttcgtgttgctatttctacgatgccgcatccataccggatgccaaattgccaacaggaaatattgtaattgtaacgtcaaactttccatgctcgttcgactacaacgtgctgcggttgacataagggtcccacgtgttgaagccccaccgatcagccgcaccagcttccccgcacagccgtcgtcgttatccccagtccacaccggccgcgccgcagcggcccatcccacccgtcagcgtcggcgtaggcccccgccggctccttcctctcgccgtcgcgagaccgagcagccagtagcagcaggagtgggtgctccgtgccccgccatccaacaccaaaagtggaacccctcacacccacgcgaggtggtcgacactcgacggagagccgcaaaggaggaggagctggcggtggcgggatccagcaggccgcccatgtcgagcggcgcggacggatcggatccgatcacgggccttggcccgtcgacgatcccagagccgccggaccgtgagccgcctcatctacagtctccgtcgccggcggcgcagcaggaggtggcggcgtcgcaagccgagacgccggtgccagcggtgaccatcgtgatctcgcggccaggggaggaggttcagacgcctgatgcaatgggtggctccccggcgtgctccacgcaggccggtgacggcaaggctacagccacctcggtttcgttgaccgcttcggcggctgccaaggaggccgagttggcaaggtccgacagcttcgacgactacgagcaatgcaggtattcagtcggtgtgggattccctgcgcgcaagctcagggtattttagtgaattgcgagttggaaaggggacgagggtgtgttctgcttgggagtgttccaattttgtatgggtaccttgttaggtttagtagttgcgcgttttatccatctatgaatcacctgctatggctttgggtgctccctatcttgggggcgttgcttcctcatgcggtgtagtgattgtaggtgtatcaacaaatttccatttatgatgtactgattcatttcttgaagtcaccctagaacatggatcatgtcaactggactgtttactttagctgcccttttctgtctgtaactacaccaatagatttttgcctgcagttgggtggatgttgttcatcacatataacatgcgagcaataagtttgtgaacacgttcattgtcagtttatctgcatcttcattagtattgactttgccggtgcttgtgacatgtgcttatttagaggccatatattagtgcaattaggctgtcacagagtgcaaatgggactacatagcattcctgttagctatgatattttagggtctcgagggtatttaggcgttgatgagaatgtaggttatgcttccaatgcagttgggttgaccttgatccttgaatgtagaagcaaaagatattcgcaataagtttgctgatggtaagatcatttgtgtgtagaattattaaagattgggacttcatagattcaataattcaatgaataaatatgatatttgattcttggttatgaaaggctaactggcagctatgagctgcaggtgaaaaacaatacgaggaagaatgctggaaactgataatcaacttctggctgagtatttcttgtaccacaaatgtgctgtgagcatgaactgcatgcaccgttgctttgccatgtattgatgttcttgtgttgatctttttttatatactcattgcaagtaataacatatccaatctgttttctgctggctctttgcaatttttgaatatagataggagcactatgtttactaatcagaacaattatctttaggagtttaattttcctaatatatgtacctgaaataataacatatccaatctgttttctgctggctctttgcaatttttgaatatagataggagcactatgtttactaatcagaacaattatctttaggagtttaattttcctaatatatgtatctgaaataaaaaaaaaactcgacctacgggggggggggggtaagacagccccggacattatattaagaagaaaaccttctcacgcaggtcgagaaaactcccgaacccctgccccacccatacacagcggcactgtagcccatgtgagaacacgaccgtgaccggaattgggccttagacctgtattttgcgtggtacagacaagtggatttttttaaccacagcctgaaattcgctcccatagggagtcgaacccaggacatgagaagtgctacttagaccaaactaaccaactcggctagagaccctttcgctatgtacctgaaatcaaatattggtcttttgtttcataggattaacacctgtactcctaataatcccagatcccattaaggtacctgaggatcatccttgttttggaacaacgtagaatgcatcggcttgtactgtttgaagttaatagagccaacattgttcttaacggaagtacattttttaactgttagacattgcaatgccatcccataattagattcagtcatcccggtccaaaaaaaaaagattcagtcatgtaaaacagacatctagaagcccttcagtacatactgccatttactttaccttcaaaattttatatattgctgactcttgccacttattaccttattttttatggaggatgaatacctttttcacttctgcagagtttgtcaacagaagacagaagaacctctggtcgaccttggatgtagatgtcgtggtgatcttgcaaaagcacatcgcacatgcattgatgtttggtttcgtactagaggttcaaacaagtgtgagatatgccagcaggttgctgccaatatcccccctccagagacgcaagcaagtacaagttattgggtttggagggttgattcgacttatggaaggggacgaggaggacgtgaaagggtatttttatcactggatatgataaataagaaacagatgcattaacctgactctttctctgaaaaaatgaataatgatcatggatggtttagcccactttgggttgcatttgcaatcctgattggtggtctcttattggatgtgctgatatctgtttctcttggtgtttccgcacttcctgtcaatataataattggcgttcttatagttctcggattgggcaccgcccttcgtcttgctctcgagtgctgccaggaatggggctcaaggaggaacgtaggcaatatgccgaggctggagaacataccgccgactgggtaccaccctgcagtagtataatcattatgggacttgtaaatagcggtaggaacatctaaccttgtgctggctcttggattgtattagctttagctcacacgttgctcgttaatgtcgagctcaaattcaaagcttgttgattacgatcgggtccatactccactagtccaatgcaatgtaaatgcagagttactgatactcggtcttcatggactagtgctgatgccgaattgccagcatcttaattggttgtctggctaatcgttcagcatgacagcgcttggtttcttcttccttgtacggtttgctctcacaaatcacttgttgtgtttcatcttatctgtggcttgttggtataggcatttgtgaaggccatttgagcgaatgctgttttcatacgtttatgcacagagttgtgtggatatagcatttttatgtgaactaataacctgctg

SEQ ID NO: 4217 - DNA, 4533 bp, Zea Mays
cgacggtccagatccacccgtgtactgtagcaagatctataaatgccgtgggtttcggagaggctgtaaaccctaatgctcatttcttctcaatctccccagccgccacagtaaaaaaaacacagccgccagggagcttcgacggatggcctctggccgatcgagcctttttttttttattctcatttcttcatttctattacgtgctctcttttccttctgtttttgtacaccgcggtgagctgctctctgtgtattatcttcactagtaaagtgagaagctaagtgcctgtgctgtattcttgccaccgtgatgcacaagaacgagaacggttcttggtctctatttcttctctcttatccttcgtttggccgaacgtctgtttttttttttttttttttcggccggctcaccttcacacgaccgccaggaagcactggtggctggcctctggccgaccgcgccgccctgcacagagccgcacagccgcccatctctttgctgtttttctgtttcttgttgaagctcagggctccctctccactcagcagactgccaggacacaacggctgacctcttggtgtccggctcggccggcactgtgcacggcgaaacgggccccgcaggctctctcgccggcggtcgcgaccccacgggtgggcgctcggccgtcggtagaatcgttcgtcggtggtctgttgagccagtgacgttggccgttcttttcttttgaaccagtcagtgcatctgtgcacagatctgcgtgttcctgtttcttattcgttgattcttggtcgtggatcgttggatcctgagccctgtgcgccgtctctgttgacggatgaactggttagggttaggttattaaactctaaccctgaaatatcggtctgtttaccctaaaatatcggtctgttttgttctcgggcgatgaactatgattaaaaaaatgagttcaaccactgattcgagacctttctgtgtctcaaaaaaaaaaacggaatgtggattaggagatctagggttcttaggtccctctgataccattgttagaatctatactgtctaggatcgattcctaagttcctagaatactgatccgtaactgaaagtaaaatcttgatgacgtgtagatctgatctactgatctactgagaggaacggggaaacacacctttgttgctgttgctatcttcatatcgtcgccctgcagagaagcagcaggcattgggatccgagccgctgtaggttgtcgcatttccaaacactccgacgcctaggcgatgggggcctctgaggactagggttttggggcgaggtactagcgttagtctttcctgcgaccccttagtcctatatatagcgtcgtgtgtctgggggctccaaccgaggttagcgtgggccctcccgatcaagggcccgattaaaggaacgatagttgggttaagcccaatccagtctctattgaccggctgtagaggacacacccaacactccaatctcaggggatggtggtgggggtggaggtcaccacggcgagatggatcaatggattagggggaacggagatctgaggagaaaaccaaaacactgccgagtaggaatacctgcgagaggaaatgcacaggggtcagcaagatctcgatgacggaggatgaagaagaagaacagaggatccacgtaagcaccggagtctgggtcgaagcacaccgacggcgacagtgcacggctatgccatcggcaacaactggcgaaagaaagaaatgaagaacaacccgagtcaacaacgggagaaggtgctaatggatttgaagtcaagctactaacgagaaatctcacgcgaaacggaggcagaggcacgaaggggaaccaaaagttgttaatggcgatcagcaaaagctgttgccatatctttaaagagctcggttcggttataataccacgaatgcaattatgtgcttcgtgttgctatttctacgatgccgcatccataccggatgccaaattgccaacaggaaatattgtaattgtaacgtcaaactttccatgctcgttcgactacaacgtgctgcggttgacataagggtcccacgtgttgaagccccaccgatcagccgcaccagcttccccgcacagccgtcgtcgttatccccagtccacaccggccgcgccgcagcggcccatcccacccgtcagcgtcggcgtaggcccccgccggctccttcctctcgccgtcgcgagaccgagcagccagtagcagcaggagtgggtgctccgtgccccgccatccaacaccaaaagtggaacccctcacacccacgcgaggtggtcgacactcgacggagagccgcaaaggaggaggagctggcggtggcgggatccagcaggccgcccatgtcgagcggcgcggacggatcggatccgatcacgggccttggcccgtcgacgatcccagagccgccggaccgtgagccgcctcatctacagtctccgtcgccggcggcgcagcaggaggtggcggcgtcgcaagccgagacgccggtgccagcggtgaccatcgtgatctcgcggccaggggaggaggttcagacgcctgatgcaatgggtggctccccggcgtgctccacgcaggccggtgacggcaaggctacagccacctcggtttcgttgaccgcttcggcggctgccaaggaggccgagttggcaaggtccgacagcttcgacgactacgagcaatgcaggtattcagtcggtgtgggattccctgcgcgcaagctcagggtattttagtgaattgcgagttggaaaggggacgagggtgtgttctgcttgggagtgttccaattttgtatgggtaccttgttaggtttagtagttgcgcgttttatccatctatgaatcacctgctatggctttgggtgctccctatcttgggggcgttgcttcctcatgcggtgtagtgattgtaggtgtatcaacaaatttccatttatgatgtactgattcatttcttgaagtcaccctagaacatggatcatgtcaactggactgtttactttagctgcccttttctgtctgtaactacaccaatagatttttgcctgcagttgggtggatgttgttcatcacatataacatgcgagcaataagtttgtgaacacgttcattgtcagtttatctgcatcttcattagtattgactttgccggtgcttgtgacatgtgcttatttagaggccatatattagtgcaattaggctgtcacagagtgcaaatgggactacatagcattcctgttagctatgatattttagggtctcgagggtatttaggcgttgatgagaatgtaggttatgcttccaatgcagttgggttgaccttgatccttgaatgtagaagcaaaagatattcgcaataagtttgctgatggtaagatcatttgtgtgtagaattattaaagattgggacttcatagattcaataattcaatgaataaatatgatatttgattcttggttatgaaaggctaactggcagctatgagctgcaggtgaaaaacaatacgaggaagaatgctggaaactgataatcaacttctggctgagtatttcttgtaccacaaatgtgctgtgagcatgaactgcatgcaccgttgctttgccatagtttgtcaacagaagacagaagaacctctggtcgaccttggatgtagatgtcgtggtgatcttgcaaaagcacatcgcacatgcattgatgtttggtttcgtactagaggttcaaacaagtgtgagatatgccagcaggttgctgccaatatcccccctccagagacgcaagcaagtggatggtttagcccactttgggttgcatttgcaatcctgattggtggtctcttattggatgtgctgatatctgtttctcttggtgtttccgcacttcctgtcaatataataattggcgttcttatagttctcggattgggcaccgcccttcgtcttgctctcgagtgctgccaggaatggggctcaaggaggaacgtaggcaatatgccgaggctggagaacataccgccgactgggtaccaccctgcagtagtataatcattatgggacttgtaaatagcggtaggaacatctaaccttgtgctggctcttggattgtattagctttagctcacacgttgctcgttaatgtcgagctcaaattcaaagcttgttgattacgatcgggtccatactccactagtccaatgcaatgtaaatgcagagttactgatactcggtcttcatggactagtgctgatgccgaattgccagcatcttaattggttgtctggctaatcgttcagcatgacagcgcttggtttcttcttccttgtacggtttgctctcacaaatcacttgttgtgtttcatcttatctgtggcttgttggtataggcatttgtgaaggccatttgagcgaatgctgttttcatacgtttatgcacagagttgtgtggatatagcatttttatgtgaactaataacctgctg

SEQ ID NO: 4218 - DNA, 5944 bp, Zea Mays
cgacggtccagatccacccgtgtactgtagcaagatctataaatgccgtgggtttcggagaggctgtaaaccctaatgctcatttcttctcaatctccccagccgccacagtaaaaaaaacacagccgccagggagcttcgacggatggcctctggccgatcgagcctttttttttttattctcatttcttcatttctattacgtgctctcttttccttctgtttttgtacaccgcggtgagctgctctctgtgtattatcttcactagtaaagtgagaagctaagtgcctgtgctgtattcttgccaccgtgatgcacaagaacgagaacggttcttggtctctatttcttctctcttatccttcgtttggccgaacgtctgtttttttttttttttttttcggccggctcaccttcacacgaccgccaggaagcactggtggctggcctctggccgaccgcgccgccctgcacagagccgcacagccgcccatctctttgctgtttttctgtttcttgttgaagctcagggctccctctccactcagcagactgccaggacacaacggctgacctcttggtgtccggctcggccggcactgtgcacggcgaaacgggccccgcaggctctctcgccggcggtcgcgaccccacgggtgggcgctcggccgtcggtagaatcgttcgtcggtggtctgttgagccagtgacgttggccgttcttttcttttgaaccagtcagtgcatctgtgcacagatctgcgtgttcctgtttcttattcgttgattcttggtcgtggatcgttggatcctgagccctgtgcgccgtctctgttgacggatgaactggttagggttaggttattaaactctaaccctgaaatatcggtctgtttaccctaaaatatcggtctgttttgttctcgggcgatgaactatgattaaaaaaatgagttcaaccactgattcgagacctttctgtgtctcaaaaaaaaaaacggaatgtggattaggagatctagggttcttaggtccctctgataccattgttagaatctatactgtctaggatcgattcctaagttcctagaatactgatccgtaactgaaagtaaaatcttgatgacgtgtagatctgatctactgatctactgagaggaacggggaaacacacctttgttgctgttgctatcttcatatcgtcgccctgcagagaagcagcaggcattgggatccgagccgctgtaggttgtcgcatttccaaacactccgacgcctaggcgatgggggcctctgaggactagggttttggggcgaggtactagcgttagtctttcctgcgaccccttagtcctatatatagcgtcgtgtgtctgggggctccaaccgaggttagcgtgggccctcccgatcaagggcccgattaaaggaacgatagttgggttaagcccaatccagtctctattgaccggctgtagaggacacacccaacactccaatctcaggggatggtggtgggggtggaggtcaccacggcgagatggatcaatggattagggggaacggagatctgaggagaaaaccaaaacactgccgagtaggaatacctgcgagaggaaatgcacaggggtcagcaagatctcgatgacggaggatgaagaagaagaacagaggatccacgtaagcaccggagtctgggtcgaagcacaccgacggcgacagtgcacggctatgccatcggcaacaactggcgaaagaaagaaatgaagaacaacccgagtcaacaacgggagaaggtgctaatggatttgaagtcaagctactaacgagaaatctcacgcgaaacggaggcagaggcacgaaggggaaccaaaagttgttaatggcgatcagcaaaagctgttgccatatctttaaagagctcggttcggttataataccacgaatgcaattatgtgcttcgtgttgctatttctacgatgccgcatccataccggatgccaaattgccaacaggaaatattgtaattgtaacgtcaaactttccatgctcgttcgactacaacgtgctgcggttgacataagggtcccacgtgttgaagccccaccgatcagccgcaccagcttccccgcacagccgtcgtcgttatccccagtccacaccggccgcgccgcagcggcccatcccacccgtcagcgtcggcgtaggcccccgccggctccttcctctcgccgtcgcgagaccgagcagccagtagcagcaggagtgggtgctccgtgccccgccatccaacaccaaaagtggaacccctcacacccacgcgaggtggtcgacactcgacggagagccgcaaaggaggaggagctggcggtggcgggatccagcaggccgcccatgtcgagcggcgcggacggatcggatccgatcacgggccttggcccgtcgacgatcccagagccgccggaccgtgagccgcctcatctacagtctccgtcgccggcggcgcagcaggaggtggcggcgtcgcaagccgagacgccggtgccagcggtgaccatcgtgatctcgcggccaggggaggaggttcagacgcctgatgcaatgggtggctccccggcgtgctccacgcaggccggtgacggcaaggctacagccacctcggtttcgttgaccgcttcggcggctgccaaggaggccgagttggcaaggtccgacagcttcgacgactacgagcaatgcaggtattcagtcggtgtgggattccctgcgcgcaagctcagggtattttagtgaattgcgagttggaaaggggacgagggtgtgttctgcttgggagtgttccaattttgtatgggtaccttgttaggtttagtagttgcgcgttttatccatctatgaatcacctgctatggctttgggtgctccctatcttgggggcgttgcttcctcatgcggtgtagtgattgtaggtgtatcaacaaatttccatttatgatgtactgattcatttcttgaagtcaccctagaacatggatcatgtcaactggactgtttactttagctgcccttttctgtctgtaactacaccaatagatttttgcctgcagttgggtggatgttgttcatcacatataacatgcgagcaataagtttgtgaacacgttcattgtcagtttatctgcatcttcattagtattgactttgccggtgcttgtgacatgtgcttatttagaggccatatattagtgcaattaggctgtcacagagtgcaaatgggactacatagcattcctgttagctatgatattttagggtctcgagggtatttaggcgttgatgagaatgtaggttatgcttccaatgcagttgggttgaccttgatccttgaatgtagaagcaaaagatattcgcaataagtttgctgatggtaagatcatttgtgtgtagaattattaaagattgggacttcatagattcaataattcaatgaataaatatgatatttgattcttggttatgaaaggctaactggcagctatgagctgcaggtgaaaaacaatacgaggaagaatgctggaaactgataatcaacttctggctgagtatttcttgtaccacaaatgtgctgtgagcatgaactgcatgcaccgttgctttgccatgtattgatgttcttgtgttgatctttttttatatactcattgcaagtaataacatatccaatctgttttctgctggctctttgcaatttttgaatatagataggagcactatgtttactaatcagaacaattatctttaggagtttaattttcctaatatatgtacctgaaataataacatatccaatctgttttctgctggctctttgcaatttttgaatatagataggagcactatgtttactaatcagaacaattatctttaggagtttaattttcctaatatatgtatctgaaataaaaaaaaaactcgacctacgggggggggggggtaagacagccccggacattatattaagaagaaaaccttctcacgcaggtcgagaaaactcccgaacccctgccccacccatacacagcggcactgtagcccatgtgagaacacgaccgtgaccggaattgggccttagacctgtattttgcgtggtacagacaagtggatttttttaaccacagcctgaaattcgctcccatagggagtcgaacccaggacatgagaagtgctacttagaccaaactaaccaactcggctagagaccctttcgctatgtacctgaaatcaaatattggtcttttgtttcataggattaacacctgtactcctaataatcccagatcccattaaggtacctgaggatcatccttgttttggaacaacgtagaatgcatcggcttgtactgtttgaagttaatagagccaacattgttcttaacggaagtacattttttaactgttagacattgcaatgccatcccataattagattcagtcatcccggtccaaaaaaaaaagattcagtcatgtaaaacagacatctagaagcccttcagtacatactgccatttactttaccttcaaaattttatatattgctgactcttgccacttattaccttattttttatggaggatgaatacctttttcacttctgcagagtttgtcaacagaagacagaagaacctctggtcgaccttggatgtagatgtcgtggtgatcttgcaaaagcacatcgcacatgcattgatgtttggtttcgtactagaggttcaaacaagtgtgagatatgccagcaggttgctgccaatatcccccctccagagacgcaagcaagtgtatgtttactattttgcacttcatatctttcaatctgtattggatcatttggagaatgtatgcctctagttcatatgtatatccattgtcgtttatgctcgaactaacaaactggtctatgtttatgtttagccaaattaacctacctatcgcccgttagtatctgtttgtagttttatgaacacctcattaaatataataacaactttaattggctttgttctggaagacttgtgttccacaattacataaatgaaggtcattctgaaaattgaggaggcagaatattgttaaaagtacaagtcgaattcctgtttctagtagtgaaatttacttgttttcattcaacagacaagttattgggtttggagggttgattcgacttatggaaggggacgaggaggacgtgaaaggggatggtttagcccactttgggttgcatttgcaatcctgattggtggtctcttattggatgtgctgatatctgtttctcttggtgtttccgcacttcctgtcaatataataattggcgttcttatagttctcggattgggcaccgcccttcgtcttgctctcgagtgctgccaggaatggggctcaaggaggaacgtaggcaatatgccgaggctggagaacataccgccgactgggtaccaccctgcagtagtataatcattatgggacttgtaaatagcggtaggaacatctaaccttgtgctggctcttggattgtattagctttagctcacacgttgctcgttaatgtcgagctcaaattcaaagcttgttgattacgatcgggtccatactccactagtccaatgcaatgtaaatgcagagttactgatactcggtcttcatggactagtgctgatgccgaattgccagcatcttaattggttgtctggctaatcgttcagcatgacagcgcttggtttcttcttccttgtacggtttgctctcacaaatcacttgttgtgtttcatcttatctgtggcttgttggtataggcatttgtgaaggccatttgagcgaatgctgttttcatacgtttatgcacagagttgtgtggatatagcatttttatgtgaactaataacctgctg

SEQ ID NO: 4219 - DNA, 4027 bp, Zea Mays
cgacggtccagatccacccgtgtactgtagcaagatctataaatgccgtgggtttcggagaggctgtaaaccctaatgctcatttcttctcaatctccccagccgccacagtaaaaaaaacacagccgccagggagcttcgacggatggcctctggccgatcgagcctttttttttttattctcatttcttcatttctattacgtgctctcttttccttctgtttttgtacaccgcggtgagctgctctctgtgtattatcttcactagtaaagtgagaagctaagtgcctgtgctgtattcttgccaccgtgatgcacaagaacgagaacggttcttggtctctatttcttctctcttatccttcgtttggccgaacgtctgtttttttttttttttttttcggccggctcaccttcacacgaccgccaggaagcactggtggctggcctctggccgaccgcgccgccctgcacagagccgcacagccgcccatctctttgctgtttttctgtttcttgttgaagctcagggctccctctccactcagcagactgccaggacacaacggctgacctcttggtgtccggctcggccggcactgtgcacggcgaaacgggccccgcaggctctctcgccggcggtcgcgaccccacgggtgggcgctcggccgtcggtagaatcgttcgtcggtggtctgttgagccagtgacgttggccgttcttttcttttgaaccagtcagtgcatctgtgcacagatctgcgtgttcctgtttcttattcgttgattcttggtcgtggatcgttggatcctgagccctgtgcgccgtctctgttgacggatgaactggttagggttaggttattaaactctaaccctgaaatatcggtctgtttaccctaaaatatcggtctgttttgttctcgggcgatgaactatgattaaaaaaatgagttcaaccactgattcgagacctttctgtgtctcaaaaaaaaaaacggaatgtggattaggagatctagggttcttaggtccctctgataccattgttagaatctatactgtctaggatcgattcctaagttcctagaatactgatccgtaactgaaagtaaaatcttgatgacgtgtagatctgatctactgatctactgagaggaacggggaaacacacctttgttgctgttgctatcttcatatcgtcgccctgcagagaagcagcaggcattgggatccgagccgctgtaggttgtcgcatttccaaacactccgacgcctaggcgatgggggcctctgaggactagggttttggggcgaggtactagcgttagtctttcctgcgaccccttagtcctatatatagcgtcgtgtgtctgggggctccaaccgaggttagcgtgggccctcccgatcaagggcccgattaaaggaacgatagttgggttaagcccaatccagtctctattgaccggctgtagaggacacacccaacactccaatctcaggggatggtggtgggggtggaggtcaccacggcgagatggatcaatggattagggggaacggagatctgaggagaaaaccaaaacactgccgagtaggaatacctgcgagaggaaatgcacaggggtcagcaagatctcgatgacggaggatgaagaagaagaacagaggatccacgtaagcaccggagtctgggtcgaagcacaccgacggcgacagtgcacggctatgccatcggcaacaactggcgaaagaaagaaatgaagaacaacccgagtcaacaacgggagaaggtgctaatggatttgaagtcaagctactaacgagaaatctcacgcgaaacggaggcagaggcacgaaggggaaccaaaagttgttaatggcgatcagcaaaagctgttgccatatctttaaagagctcggttcggttataataccacgaatgcaattatgtgcttcgtgttgctatttctacgatgccgcatccataccggatgccaaattgccaacaggaaatattgtaattgtaacgtcaaactttccatgctcgttcgactacaacgtgctgcggttgacataagggtcccacgtgttgaagccccaccgatcagccgcaccagcttccccgcacagccgtcgtcgttatccccagtccacaccggccgcgccgcagcggcccatcccacccgtcagcgtcggcgtaggcccccgccggctccttcctctcgccgtcgcgagaccgagcagccagtagcagcaggagtgggtgctccgtgccccgccatccaacaccaaaagtggaacccctcacacccacgcgaggtggtcgacactcgacggagagccgcaaaggaggaggagctggcggtggcgggatccagcaggccgcccatgtcgagcggcgcggacggatcggatccgatcacgggccttggcccgtcgacgatcccagagccgccggaccgtgagccgcctcatctacagtctccgtcgccggcggcgcagcaggaggtggcggcgtcgcaagccgagacgccggtgccagcggtgaccatcgtgatctcgcggccaggggaggaggttcagacgcctgatgcaatgggtggctccccggcgtgctccacgcaggccggtgacggcaaggctacagccacctcggtttcgttgaccgcttcggcggctgccaaggaggccgagttggcaaggtccgacagcttcgacgactacgagcaatgcagagtttgtcaacagaagacagaagaacctctggtcgaccttggatgtagatgtcgtggtgatcttgcaaaagcacatcgcacatgcattgatgtttggtttcgtactagaggttcaaacaagtgtgagatatgccagcaggttgctgccaatatcccccctccagagacgcaagcaagtgtatgtttactattttgcacttcatatctttcaatctgtattggatcatttggagaatgtatgcctctagttcatatgtatatccattgtcgtttatgctcgaactaacaaactggtctatgtttatgtttagccaaattaacctacctatcgcccgttagtatctgtttgtagttttatgaacacctcattaaatataataacaactttaattggctttgttctggaagacttgtgttccacaattacataaatgaaggtcattctgaaaattgaggaggcagaatattgttaaaagtacaagtcgaattcctgtttctagtagtgaaatttacttgttttcattcaacagacaagttattgggtttggagggttgattcgacttatggaaggggacgaggaggacgtgaaaggggatggtttagcccactttgggttgcatttgcaatcctgattggtggtctcttattggatgtgctgatatctgtttctcttggtgtttccgcacttcctgtcaatataataattggcgttcttatagttctcggattgggcaccgcccttcgtcttgctctcgagtgctgccaggaatggggctcaaggaggaacgtaggcaatatgccgaggctggagaacataccgccgactgggtaccaccctgcagtagtataatcattatgggacttgtaaatagcggtaggaacatctaaccttgtgctggctcttggattgtattagctttagctcacacgttgctcgttaatgtcgagctcaaattcaaagcttgttgattacgatcgggtccatactccactagtccaatgcaatgtaaatgcagagttactgatactcggtcttcatggactagtgctgatgccgaattgccagcatcttaattggttgtctggctaatcgttcagcatgacagcgcttggtttcttcttccttgtacggtttgctctcacaaatcacttgttgtgtttcatcttatctgtggcttgttggtataggcatttgtgaaggccatttgagcgaatgctgttttcatacgtttatgcacagagttgtgtggatatagcatttttatgtgaactaataacctgctg

SEQ ID NO: 4220 - DNA, 698 bp, Zea Mays
ttttgttttttttttctatcccacggcggccaagctgtggaaacgagggagacgaggaggacaagggaaagaaagcctaccggctcggcggctccggctcacctcccacacccccaaaaaaaatctcgcgtgccgccggcggccaccaccatcactgccatgatcagcatcctcgcgcaggagcgcctcctcgggttcgccctgggttccgtctccatcggcggcttcgtcctccaccagcgccgggccatctaccgttcaatcgctgaagccgacgggtcgccctacttttaccagcctggtgaaattgccagtcgaagaagctcaactgaactggctcatgtatggaacaaggcagtggacgagacccttgggcgacttgttgtgtaccttagttcgcgtgggtggtgattcaagctccatgttgaacatggtggatgttacttcgaggtcattgttgtagccctgtgaaaggcaggactcgtctaactattttttacatatatgtattggtaataaagaatgtatgttactttgctgacgttgccaacacttcaatggaaactatggtcgttctctaatggtcagtccatccctggtcaccctgagtgtcagttctgctcttccatctctaactaaggtctcagactgtcattcactatacctgtatataatctcagtctccgattcagttttac

SEQ ID NO: 4221 - DNA, 1602 bp, Zea Mays
cacttactatgctaagcagtaggttatctggcttcacttactatgctagtggaattgaaccaagtttatcttgtacagtgatgagcaggagcagatcaggattgcccgagccctcctcaactatcgcttgaaggagaagatggcgatggccaattatcctcatgtttcaccattccctaagaaatttcccatgcagccagagaggaagccttcttttggtcaatcttctcagtccagctactcaaagattctccctctattccgccctaaatctaactcaagatccagaccagagtcaccagcatctactgatggcgcatcacaaatgcctggccgggccatggatatccacactccaagcccaagatcaagatttccagctgcagaggcagccccctacgtgccagttgggcacttccgtatgccttgccacagcatggctccttcagtcacaattaggactgctgttcctgtgttctctgctccacctctcccaccgccgtctgcacgcccgcagcagcttcctccactcatgagccacccaccaccgattcggatggcatccccagttcgcatgaggccagcctctccaatgtttgcctcctcagctccagctcaagggccgaaacttgtgaggcctgttcaattgaaggatgtgcaagatcaaccaaggaaggaaacagctccatccgtgatccctgttcaggtaaaggacgtgcaataccaatcaaggaagagctcaatgtctcctgtgattcctgtcgtggtaaaggatgcacaacgccagcctctcccagttcagacgaaggatgtgcaaacccaaacccaagccccaaaggaatcacttgcagatccaattccagcaatcaggcctgcagtcaagattgatttgcctgctcaaggcaagaaggaagcttcagctggtgctaccagcgaagcgccatcttctgccactggcaataatggtgctatggaacgcggtacatcatcagacgttctcttggcaaggcgatcaagggctgctgtggacggggatggcgacaaggtggaagcaaagcacgaggccgaggctcaagcggtggcagaggcagccatcaggcagctggagatcaattgacttcagaaaatgcgcgccaccatcttctcccagattttgtaattagctgccttgcctcctgtgcacattccgttctgcttagtccgtgtatgtcttgttccggttagggctgtctgggcaagctgcattgtggtaggaacacctaggttttctgttgaggagaaaaaaacatggagtggtggtaggcggtttgcccagtgtttagttggagacggttattacttcgctggatatgcaattggtctgcttttacccccgaatgatgaggtggactgcgaggtgcctctaagggaaggattctgaattcctagttattgtcgaaccgccgtaatcctatccagcttcttttttactagtagtactacaatgcaaatgatgatgcattggtggttggtgtatgatgaaaagtggagatgggtttttatgccgcttttcgtcctggctactacagtatgatgaaaagagaaatcgttggatgaacaaaa

SEQ ID NO: 4222 - DNA, 1790 bp, Zea Mays
aaatgcctatatttctaacattaagccggtcagccttgcgggttgcggtctcgccgccgacgccgggcgccggggattgccgcctgcccgccttgctggagacgggagacgccatgtccttgctgctcctgcccctctgtcgaacctccgcggaccgcgccgttccctggttgtcgtaggacgtcggcaggagcccctccgccgtcacccgtcagacgcgccaccgcggcgccgcctccccaggctcccctgctctgctccacagcttcagtgctccgtgcaagagcaggaagactcttccagtaatcatgggtgcatgtgcctcttcatctcgtggtcgacccaaccatggcaagaaccagaaatcagcaaaggtcgcggcaattccatgtactccggcagcgcaggtaggtcgtggtgctgcctcttctgaaatggaagagaagagcagcttcatttggcaaatcgatggcttctcctcgcttcttgacaagcaagaaggatggaccaactccggatattttaagatcaaggaccttaattggtacttgcagttgaacctgaaggaccggaagagtggcgacgaaagagaatacgtctctcttatcctcgtgctgtcaaaaacttctggtctggaacccgacaccattgtcgaagcatcgttcaagctcttgatatacgatcaagcatacggacgacatagcgaacatgaatccacagattccagactacagagagcagcaggagctccgggatctcatgcatgatcctcgtctacacactcaaggaaccctcctccggtttcatcgttggtgacagctgtgtcttcggagtggagctcatcaagttcaccactgctaaagtcaaggacggttcaggaacgctgcatgttcagaagagaattggcttctgtagtgcccgggaggcctacacctggatcatcaatgacttcttaagcctgaaggggcggtgctactcaccggagtttgagatcggtggacacaaatggtacctgaccatgtacccttctggcactggcatcgacggtgataaggaaattctctccctctacctgcatatggccaagccaaacggagacgcttccctccagaactctggggtgcttgtagaagtcagtctgtccatcaaagacaaggtgaccagcaatcgcaaaacaatgacaggccggtgccagctccaagcgacggagggcgaaggctggggatggtcaaatttcatggcgacgaagtctgtgaaggactggtaccttgtgaagggcagctgcttaatcgaggcagatgttgccattcttggatcgtccaagatgaattagggatcatacgactctctacttttgtgcgtgtgccgagccaataatggaattgtgcagcgttagaccttatctgtttcatccctaaatcatagtgattaggaaggattggagaggattgaggagaattttgactgttaggaaatttaatccccttaatccctcctaacacccttgctttagggggtaacaaaaaggatttgactactatacttttagggtataatataccagtaactattttatgtgaagcatgcacaaaaacgtaagtgatttagtggtattgtgtcatttacccggtgtgtagagtggatcataggtagtgcttggttttggagtaggtagtgtttggttttagagtatggtgggatagagccactttattcataatttgttgttatttggattggttccatttggaacagagtgattctaaaaaaaaagaaaattataatcaaat

SEQ ID NO: 4223 - DNA, 1934 bp, Zea Mays
attaagccggtcagccttgcgggttgcggtctcgccgccgacgccgggcgccggggattgccgcctgcccgccttgctggagacgggagacgccatgtccttgctgctcctgcccctctgtcgaacctccgcggaccgcgccgttccctggttgtcgtaggacgtcggcaggagcccctccgccgtcacccgtcagacgcgccaccgcggcgccgcctccccaggctcccctgctctgctccacagcttcagtgctccgtgtgctaggaaatttcttgtggcgtagacctctgaactctgtccttttgcgttggccctagcggccaaaaagaagaaacctcacctcaatttccaggaatttctgaaacacttacacatagttccacatataacgtgcgatatcacctgtccatgctgaagcaagagcaggaagactcttccagtaatcatgggtgcatgtgcctcttcatctcgtggtcgacccaaccatggcaagaaccagaaatcagcaaaggtcgcggcaattccatgtactccggcagcgcaggtaggtcgtggtgctgcctcttctgaaatggaagagaagagcagcttcatttggcaaatcgatggcttctcctcgcttcttgacaagcaagaaggatggaccaactccggatattttaagatcaaggaccttaattggtacttgcagttgaacctgaaggaccggaagagtggcgacgaaagagaatacgtctctcttatcctcgtgctgtcaaaaacttctggtctggaacccgacaccattgtcgaagcatcgttcaagctcttgatatacgatcaagcatacggacgacatagcgaacatgaatttagccacagattccagactacagagagcagcaggagctccgggatctcatgcatgatcctcgtctacacactcaaggaaccctcctccggtttcatcgttggtgacagctgtgtcttcggagtggagctcatcaagttcaccactgctaaagtcaaggacggttcaggaacgctgcatgttcagaagagaattggcttctgtagtgcccgggaggcctacacctggatcatcaatgacttcttaagcctgaaggggcggtgctactcaccggagtttgagatcggtggacacaaatggtacctgaccatgtacccttctggcactggcatcgacggtgataaggaaattctctccctctacctgcatatggccaagccaaacggagacgcttccctccagaactctggggtgcttgtagaagtcagtctgtccatcaaagacaaggtgaccagcaatcgcaaaacaatgacaggccggtgccagctccaagcgacggagggcgaaggctggggatggtcaaatttcatggcgacgaagtctgtgaaggactggtaccttgtgaagggcagctgcttaatcgaggcagatgttgccattcttggatcgtccaagatgaattagggatcatacgactctctacttttgtgcgtgtgccgagccaataatggaattgtgcagcgttagaccttatctgtttcatccctaaatcatagtgattaggaaggattggagaggattgaggagaattttgactgttaggaaatttaatccccttaatccctcctaacacccttgctttagggggtaacaaaaaggatttgactactatacttttagggtataatataccagtaactattttatgtgaagcatgcacaaaaacgtaagtgatttagtggtattgtgtcatttacccggtgtgtagagtggatcataggtagtgcttggttttggagtaggtagtgtttggttttagagtatggtgggatagagccactttattcataatttgttgttatttggattggttccatttggaacagagtgattctaaaaaaaaagaaaattataatcaaat

SEQ ID NO: 4224 - DNA, 1663 bp, Zea Mays
aagccggtcagccttgcgggttgcggtctcgccgccgacgccgggcgccggggattgccgcctgcccgccttgctggagacgggagacgccatgtccttgctgctcctgcccctctgtcgaacctccgcggaccgcgccgttccctggttgtcgtaggacgtcggcaggagcccctccgccgtcacccgtcagacgcgccaccgcggcgccgcctccccaggctcccctgctctgctccacagcttcagtgctccgtgcaagagcaggaagactcttccagtaatcatgggtgcatgtgcctcttcatctcgtggtcgacccaaccatggcaagaaccagaaatcagcaaaggtcgcggcaattccatgtactccggcagcgcaggtaggtcgtggtgctgcctcttctgaaatggaagagaagagcagcttcatttggcaaatcgatggcttctcctcgcttcttgacaagcaagaaggatggaccaactccggatattttaagatcaaggaccttaattggtacttgcagttgaacctgaaggaccggaagagtggcgacgaaagagaatacgtctctcttatcctcgtgctgtcaaaaacttctggtctggaacccgacaccattgtcgaagcatcgttcaagctcttgatatacgatcaagcatacggacgacatagcgaacatgaatctgtgtcttcggagtggagctcatcaagttcaccactgctaaagtcaaggacggttcaggaacgctgcatgttcagaagagaattggcttctgtagtgcccgggaggcctacacctggatcatcaatgacttcttaagcctgaaggggcggtgctactcaccggagtttgagatcggtggacacaaatggtacctgaccatgtacccttctggcactggcatcgacggtgataaggaaattctctccctctacctgcatatggccaagccaaacggagacgcttccctccagaactctggggtgcttgtagaagtcagtctgtccatcaaagacaaggtgaccagcaatcgcaaaacaatgacaggccggtgccagctccaagcgacggagggcgaaggctggggatggtcaaatttcatggcgacgaagtctgtgaaggactggtaccttgtgaagggcagctgcttaatcgaggcagatgttgccattcttggatcgtccaagatgaattagggatcatacgactctctacttttgtgcgtgtgccgagccaataatggaattgtgcagcgttagaccttatctgtttcatccctaaatcatagtgattaggaaggattggagaggattgaggagaattttgactgttaggaaatttaatccccttaatccctcctaacacccttgctttagggggtaacaaaaaggatttgactactatacttttagggtataatataccagtaactattttatgtgaagcatgcacaaaaacgtaagtgatttagtggtattgtgtcatttacccggtgtgtagagtggatcataggtagtgcttggttttggagtaggtagtgtttggttttagagtatggtgggatagagccactttattcataatttgttgttatttggattggttccatttggaacagagtgattctaaaaaaaaagaaaattataatcaaat

SEQ ID NO: 4225 - DNA, 2529 bp, Zea Mays
aagccggtcagccttgcgggttgcggtctcgccgccgacgccgggcgccggggattgccgcctgcccgccttgctggagacgggagacgccatgtccttgctgctcctgcccctctgtcgaacctccgcggaccgcgccgttccctggttgtcgtaggacgtcggcaggagcccctccgccgtcacccgtcagacgcgccaccgcggcgccgcctccccaggctcccctgctctgctccacagcttcagtgctccgtggttttgtatcgaagtccagtagtctgatttaactaggagaaccattgatgtacttgtactccagatcggagtttgtagcccgcacaaggtagctttctttaactgcctcactctttagagccttcggttccatgtcagtatgtcaccaactcacgatgacaaactggaatttggaatgacatctgcttgtgtggaaatttcaaagccgaataaactatctcttcaggcttcatttgtcaaagattccaaagtatattaacatagccacccttcgttttccattggaatcttaacctgtaaaattacgccggtgcaaatgatgatggcatcaacacagccgtgactctcagatgactagacacatccgcacgcaaagatagacaaacatgtattgattatttgctgcttagtggttagatattgcaacttaagtactttgggaattgggaggcacagaagagttgacctggacttttaggttatttgctaatgacataaaagatttaatatgtgcaaggttgttcagttagagagatctttttttttgggccatgaagctgtataaaatttagacgtcatatacttgtaatgcttccagtgctaggaaatttcttgtggcgtagacctctgaactctgtccttttgcgttggccctagcggccaaaaagaagaaacctcacctcaatttccaggaatttctgaaacacttacacatagttccacatataacgtgcgatatcacctgtccatgctgaagcaagagcaggaagactcttccagtaatcatgggtgcatgtgcctcttcatctcgtggtcgacccaaccatggcaagaaccagaaatcagcaaaggtcgcggcaattccatgtactccggcagcgcaggtaggtcgtggtgctgcctcttctgaaatggaagagaagagcagcttcatttggcaaatcgatggcttctcctcgcttcttgacaagcaagaaggatggaccaactccggatattttaagatcaaggaccttaattggtacttgcagttgaacctgaaggaccggaagagtggcgacgaaagagaatacgtctctcttatcctcgtgctgtcaaaaacttctggtctggaacccgacaccattgtcgaagcatcgttcaagctcttgatatacgatcaagcatacggacgacatagcgaacatgaatttagccacagattccagactacagagagcagcaggagctccgggatctcatgcatgatcctcgtctacacactcaaggaaccctcctccggtttcatcgttggtgacagctgtgtcttcggagtggagctcatcaagttcaccactgctaaagtcaaggacggttcaggaacgctgcatgttcagaagagaattggcttctgtagtgcccgggaggcctacacctggatcatcaatgacttcttaagcctgaaggggcggtgctactcaccggagtttgagatcggtggacacaaatggtacctgaccatgtacccttctggcactggcatcgacggtgataaggaaattctctccctctacctgcatatggccaagccaaacggagacgcttccctccagaactctggggtgcttgtagaagtcagtctgtccatcaaagacaaggtgaccagcaatcgcaaaacaatgacaggccggtgccagctccaagcgacggagggcgaaggctggggatggtcaaatttcatggcgacgaagtctgtgaaggactggtaccttgtgaagggcagctgcttaatcgaggcagatgttgccattcttggatcgtccaagatgaattagggatcatacgactctctacttttgtgcgtgtgccgagccaataatggaattgtgcagcgttagaccttatctgtttcatccctaaatcatagtgattaggaaggattggagaggattgaggagaattttgactgttaggaaatttaatccccttaatccctcctaacacccttgctttagggggtaacaaaaaggatttgactactatacttttagggtataatataccagtaactattttatgtgaagcatgcacaaaaacgtaagtgatttagtggtattgtgtcatttacccggtgtgtagagtggatcataggtagtgcttggttttggagtaggtagtgtttggttttagagtatggtgggatagagccactttattcataatttgttgttatttggattggttccatttggaacagagtgattctaaaaaaaaagaaaattataatcaaat

SEQ ID NO: 4226 - DNA, 2810 bp, Zea Mays
aagccggtcagccttgcgggttgcggtctcgccgccgacgccgggcgccggggattgccgcctgcccgccttgctggagacgggagacgccatgtccttgctgctcctgcccctctgtcgaacctccgcggaccgcgccgttccctggttgtcgtaggacgtcggcaggagcccctccgccgtcacccgtcagacgcgccaccgcggcgccgcctccccaggctcccctgctctgctccacagcttcagtgctccgtggtaagtgtctaagtgataacagagttggtaggatagttactttgttgataaaattaattatttagtattttggtttggtcaaatatttgctaggctagttgataaaaataattcagtagcctctcgatcctggatccgccactggtgtccgtaaagattgaagcatacttctgatggcagtctttccctggatttaggcagtcgtttccactagtgatcaccaaaagttgtttcataattatactaatttttttccattgaagataaaatatttcatgtaggttttgtatcgaagtccagtagtctgatttaactaggagaaccattgatgtacttgtactccagatcggagtttgtagcccgcacaaggtagctttctttaactgcctcactctttagagccttcggttccatgtcagtatgtcaccaactcacgatgacaaactggaatttggaatgacatctgcttgtgtggaaatttcaaagccgaataaactatctcttcaggcttcatttgtcaaagattccaaagtatattaacatagccacccttcgttttccattggaatcttaacctgtaaaattacgccggtgcaaatgatgatggcatcaacacagccgtgactctcagatgactagacacatccgcacgcaaagatagacaaacatgtattgattatttgctgcttagtggttagatattgcaacttaagtactttgggaattgggaggcacagaagagttgacctggacttttaggttatttgctaatgacataaaagatttaatatgtgcaaggttgttcagttagagagatctttttttttgggccatgaagctgtataaaatttagacgtcatatacttgtaatgcttccagtgctaggaaatttcttgtggcgtagacctctgaactctgtccttttgcgttggccctagcggccaaaaagaagaaacctcacctcaatttccaggaatttctgaaacacttacacatagttccacatataacgtgcgatatcacctgtccatgctgaagcaagagcaggaagactcttccagtaatcatgggtgcatgtgcctcttcatctcgtggtcgacccaaccatggcaagaaccagaaatcagcaaaggtcgcggcaattccatgtactccggcagcgcaggtaggtcgtggtgctgcctcttctgaaatggaagagaagagcagcttcatttggcaaatcgatggcttctcctcgcttcttgacaagcaagaaggatggaccaactccggatattttaagatcaaggaccttaattggtacttgcagttgaacctgaaggaccggaagagtggcgacgaaagagaatacgtctctcttatcctcgtgctgtcaaaaacttctggtctggaacccgacaccattgtcgaagcatcgttcaagctcttgatatacgatcaagcatacggacgacatagcgaacatgaatttagccacagattccagactacagagagcagcaggagctccgggatctcatgcatgatcctcgtctacacactcaaggaaccctcctccggtttcatcgttggtgacagctgtgtcttcggagtggagctcatcaagttcaccactgctaaagtcaaggacggttcaggaacgctgcatgttcagaagagaattggcttctgtagtgcccgggaggcctacacctggatcatcaatgacttcttaagcctgaaggggcggtgctactcaccggagtttgagatcggtggacacaaatggtacctgaccatgtacccttctggcactggcatcgacggtgataaggaaattctctccctctacctgcatatggccaagccaaacggagacgcttccctccagaactctggggtgcttgtagaagtcagtctgtccatcaaagacaaggtgaccagcaatcgcaaaacaatgacaggccggtgccagctccaagcgacggagggcgaaggctggggatggtcaaatttcatggcgacgaagtctgtgaaggactggtaccttgtgaagggcagctgcttaatcgaggcagatgttgccattcttggatcgtccaagatgaattagggatcatacgactctctacttttgtgcgtgtgccgagccaataatggaattgtgcagcgttagaccttatctgtttcatccctaaatcatagtgattaggaaggattggagaggattgaggagaattttgactgttaggaaatttaatccccttaatccctcctaacacccttgctttagggggtaacaaaaaggatttgactactatacttttagggtataatataccagtaactattttatgtgaagcatgcacaaaaacgtaagtgatttagtggtattgtgtcatttacccggtgtgtagagtggatcataggtagtgcttggttttggagtaggtagtgtttggttttagagtatggtgggatagagccactttattcataatttgttgttatttggattggttccatttggaacagagtgattctaaaaaaaaagaaaattataatcaaat

SEQ ID NO: 4227 - DNA, 2816 bp, Zea Mays
aagccggtcagccttgcgggttgcggtctcgccgccgacgccgggcgccggggattgccgcctgcccgccttgctggagacgggagacgccatgtccttgctgctcctgcccctctgtcgaacctccgcggaccgcgccgttccctggttgtcgtaggacgtcggcaggagcccctccgccgtcacccgtcagacgcgccaccgcggcgccgcctccccaggctcccctgctctgctccacagcttcagtgctccgtggtaagtgtctaagtgataacagagttggtaggatagttactttgttgataaaattaattatttagtattttggtttggtcaaatatttgctaggctagttgataaaaataattcagtagcctctcgatcctggatccgccactggtgtccgtaaagattgaagcatacttctgatggcagtctttccctggatttaggcagtcgtttccactagtgatcaccaaaagttgtttcataattatactaatttttttccattgaagataaaatatttcatgtaggttttgtatcgaagtccagtagtctgatttaactaggagaaccattgatgtacttgtactccagatcggagtttgtagcccgcacaaggtagctttctttaactgcctcactctttagagccttcggttccatgtcagtatgtcaccaactcacgatgacaaactggaatttggaatgacatctgcttgtgtggaaatttcaaagccgaataaactatctcttcaggcttcatttgtcaaagattccaaagtatattaacatagccacccttcgttttccattggaatcttaacctgtaaaattacgccggtgcaaatgatgatggcatcaacacagccgtgactctcagatgactagacacatccgcacgcaaagatagacaaacatgtattgattatttgctgcttagtggttagatattgcaacttaagtactttgggaattgggaggcacagaagagttgacctggacttttaggttatttgctaatgacataaaagatttaatatgtgcaaggttgttcagttagagagatctttttttttgggccatgaagctgtataaaatttagacgtcatatacttgtaatgcttccagtgctaggaaatttcttgtggcgtagacctctgaactctgtccttttgcgttggccctagcggccaaaaagaagaaacctcacctcaatttccaggaatttctgaaacacttacacatagttccacatataacgtgcgatatcacctgtccatgctgaagcaagagcaggaagactcttccagtaatcatgggtgcatgtgcctcttcatctcgtggtaacaccgacttggttttcttttctgctgatattactctcttggtatggtcactcgctatacggattgcactttcctcccaggtcgacccaaccatggcaagaaccagaaatcagcaaaggtcgcggcaattccatgtactccggcagcgcaggtaggtcgtggtgctgcctcttctgaaatggaagagaagagcagcttcatttggcaaatcgatggcttctcctcgcttcttgacaagcaagaaggatggaccaactccggatattttaagatcaaggaccttaattggtacttgcagttgaacctgaaggaccggaagagtggcgacgaaagagaatacgtctctcttatcctcgtgctgtcaaaaacttctggtctggaacccgacaccattgtcgaagcatcgttcaagctcttgatatacgatcaagcatacggacgacatagcgaacatgaatgaaccctcctccggtttcatcgttggtgacagctgtgtcttcggagtggagctcatcaagttcaccactgctaaagtcaaggacggttcaggaacgctgcatgttcagaagagaattggcttctgtagtgcccgggaggcctacacctggatcatcaatgacttcttaagcctgaaggggcggtgctactcaccggagtttgagatcggtggacacaaatggtacctgaccatgtacccttctggcactggcatcgacggtgataaggaaattctctccctctacctgcatatggccaagccaaacggagacgcttccctccagaactctggggtgcttgtagaagtcagtctgtccatcaaagacaaggtgaccagcaatcgcaaaacaatgacaggccggtgccagctccaagcgacggagggcgaaggctggggatggtcaaatttcatggcgacgaagtctgtgaaggactggtaccttgtgaagggcagctgcttaatcgaggcagatgttgccattcttggatcgtccaagatgaattagggatcatacgactctctacttttgtgcgtgtgccgagccaataatggaattgtgcagcgttagaccttatctgtttcatccctaaatcatagtgattaggaaggattggagaggattgaggagaattttgactgttaggaaatttaatccccttaatccctcctaacacccttgctttagggggtaacaaaaaggatttgactactatacttttagggtataatataccagtaactattttatgtgaagcatgcacaaaaacgtaagtgatttagtggtattgtgtcatttacccggtgtgtagagtggatcataggtagtgcttggttttggagtaggtagtgtttggttttagagtatggtgggatagagccactttattcataatttgttgttatttggattggttccatttggaacagagtgattctaaaaaaaaagaaaattataatcaaat

SEQ ID NO: 4228 - DNA, 2883 bp, Zea Mays
aagccggtcagccttgcgggttgcggtctcgccgccgacgccgggcgccggggattgccgcctgcccgccttgctggagacgggagacgccatgtccttgctgctcctgcccctctgtcgaacctccgcggaccgcgccgttccctggttgtcgtaggacgtcggcaggagcccctccgccgtcacccgtcagacgcgccaccgcggcgccgcctccccaggctcccctgctctgctccacagcttcagtgctccgtggtaagtgtctaagtgataacagagttggtaggatagttactttgttgataaaattaattatttagtattttggtttggtcaaatatttgctaggctagttgataaaaataattcagtagcctctcgatcctggatccgccactggtgtccgtaaagattgaagcatacttctgatggcagtctttccctggatttaggcagtcgtttccactagtgatcaccaaaagttgtttcataattatactaatttttttccattgaagataaaatatttcatgtaggttttgtatcgaagtccagtagtctgatttaactaggagaaccattgatgtacttgtactccagatcggagtttgtagcccgcacaaggtagctttctttaactgcctcactctttagagccttcggttccatgtcagtatgtcaccaactcacgatgacaaactggaatttggaatgacatctgcttgtgtggaaatttcaaagccgaataaactatctcttcaggcttcatttgtcaaagattccaaagtatattaacatagccacccttcgttttccattggaatcttaacctgtaaaattacgccggtgcaaatgatgatggcatcaacacagccgtgactctcagatgactagacacatccgcacgcaaagatagacaaacatgtattgattatttgctgcttagtggttagatattgcaacttaagtactttgggaattgggaggcacagaagagttgacctggacttttaggttatttgctaatgacataaaagatttaatatgtgcaaggttgttcagttagagagatctttttttttgggccatgaagctgtataaaatttagacgtcatatacttgtaatgcttccagtgctaggaaatttcttgtggcgtagacctctgaactctgtccttttgcgttggccctagcggccaaaaagaagaaacctcacctcaatttccaggaatttctgaaacacttacacatagttccacatataacgtgcgatatcacctgtccatgctgaagcaagagcaggaagactcttccagtaatcatgggtgcatgtgcctcttcatctcgtggtaacaccgacttggttttcttttctgctgatattactctcttggtatggtcactcgctatacggattgcactttcctcccaggtcgacccaaccatggcaagaaccagaaatcagcaaaggtcgcggcaattccatgtactccggcagcgcaggtaggtcgtggtgctgcctcttctgaaatggaagagaagagcagcttcatttggcaaatcgatggcttctcctcgcttcttgacaagcaagaaggatggaccaactccggatattttaagatcaaggaccttaattgttgaacctgaaggaccggaagagtggcgacgaaagagaatacgtctctcttatcctcgtgctgtcaaaaacttctggtctggaacccgacaccattgtcgaagcatcgttcaagctcttgatatacgatcaagcatacggacgacatagcgaacatgaatttagccacagattccagactacagagagcagcaggagctccgggatctcatgcatgatcctcgtctacacactcaaggaaccctcctccggtttcatcgttggtgacagctgtgtcttcggagtggagctcatcaagttcaccactgctaaagtcaaggacggttcaggaacgctgcatgttcagaagagaattggcttctgtagtgcccgggaggcctacacctggatcatcaatgacttcttaagcctgaaggggcggtgctactcaccggagtttgagatcggtggacacaaatggtacctgaccatgtacccttctggcactggcatcgacggtgataaggaaattctctccctctacctgcatatggccaagccaaacggagacgcttccctccagaactctggggtgcttgtagaagtcagtctgtccatcaaagacaaggtgaccagcaatcgcaaaacaatgacaggccggtgccagctccaagcgacggagggcgaaggctggggatggtcaaatttcatggcgacgaagtctgtgaaggactggtaccttgtgaagggcagctgcttaatcgaggcagatgttgccattcttggatcgtccaagatgaattagggatcatacgactctctacttttgtgcgtgtgccgagccaataatggaattgtgcagcgttagaccttatctgtttcatccctaaatcatagtgattaggaaggattggagaggattgaggagaattttgactgttaggaaatttaatccccttaatccctcctaacacccttgctttagggggtaacaaaaaggatttgactactatacttttagggtataatataccagtaactattttatgtgaagcatgcacaaaaacgtaagtgatttagtggtattgtgtcatttacccggtgtgtagagtggatcataggtagtgcttggttttggagtaggtagtgtttggttttagagtatggtgggatagagccactttattcataatttgttgttatttggattggttccatttggaacagagtgattctaaaaaaaaagaaaattataatcaaat

SEQ ID NO: 4229 - DNA, 1576 bp, Zea Mays
cggtcccttttttttagttttttttcttgccatttctatcgacgaacagggaaaaaaataaatgtcgcgtggaaatcgactgcatttctctgtaggagaagaaaacaaaggcgtttgtttgtttttttctctcctcgctgtgggacataaaaaggaatgggcctgcactctgcgccaccaacagtggttcagatggatggaaagaaaaaaactcatcgccatcttttccgagcctttttcgtacggcttttatcattgctcggcggccaccaaggccattgccgcctcgaaaccataacttatccccccccccaccacccggccaccccgttggtagtggtagagacgacaaaagctcgggggattagctcgcgagctaaccaatcagggccgtcaaagccgccagagattccatctcgtttggcctctcgtggtgtcatatggggatgggaaatcctgcgctcgctacgctcggcctatgcctgcctgcctgcagcgtcgccatttcaccacttgtgcaaagctagctgatcctgtggccctggaccacacacacactgctcgctcactcccctgcattggatggcatagaaaatgggggcaggcagatgcagtgcccatcctgccagtttaaccgcacatgagatttagaaccccccagctgctgaattcgatggcgaagcaagctttgttttccccgtaacaataataaactactagtgcttattattcacgagcttgatgacaaggaaggggtggtcagcgatcgcggcgcagctgccggggcgcaccgacaacgagatcaagaacgtgtggcacacccacatcaagaagcgcctggaggacggccacggggaggagaagaaggcgcgcaaaggcaagcccgccgccaagaaggccgccgacgccgtgggccgcagcagcgagcacgggccgttcctgaccgcgtcgccggggctgtcgagcagcggcgtcacgttctccgccgcggcggactccgccgcggccgtgtcgtcgtcggccgacaacgcggccaccaccagccaccacccgcagcaggtcggcgccagcaaggcggagtcgtcgacggagttggacagcggcctcagctccgccgagttcccgcccctcgacgacagcttctggtcgtcggcggacgtcgtggacatgggcctcggcgccacggacgaggagctgggcctcgcgtgcccgccgccgctgtcgtcgtcgtccaccagggacgaggacatggagttctggctcaacatgctgctggaggccggcgacatgagggacttgagcgtcttgtaactaggatgcaggatcggaagcctcaggcgcctgctatatctgaggactagagcatcgcatcttctttcttttttcttgtcatcttgttgccctgttttctggtgatgagaaaatgctgagaaactcggtcgggtgattttcaccttccgcacaagaaagaatactagcatcaaccattttgttcgttcttccgttggcttcggtagattggaccgaattgagtgggattaaatctcaagcaaatcaaaatcttttataatctttt

SEQ ID NO: 4230 - DNA, 633 bp, Zea Mays
ggggatcataaagggtacacaaacttgatcttccttcaacagccggtataagcttatatgataaaatcgatggccacctcactttacaaaaacaagctgaccggccaacgcaaaatcaggcccatggtagatcaccattccgcgtgatctgccagcgtatcacactttgttgttgagataatacaacacaacttatctccctccccaaatacacaatttacggcacatgtacaaaggagaaacacgaaagaattacgatgcttactgacctatctatgctctgaacaaatctgaactgtatgccgccgcaactcaaacctgtatgaactgagagagaaaaaattccgaagatgacagtgagctagccttgcatcaacaccgactcggtggcttttctcaacttgaaactatgcatgaactggctctctaaacttgccttgcagagacatccagttgtcacatctgttgtggaaccactgtgaaggtcaaatcgtgaggccgcaaggcactctgaactaggtcctgcactgttttgtttcgtctacagacatctgagatttcaccaaatctatctgttatggtatggagactggacccagaagcagcatcagatatggtgttgaagaagcgcaa

SEQ ID NO: 4231 - DNA, 1601 bp, Zea Mays
cgagccaacaaaatgaaaaatataggcaagaaaacatgatccttgacaaaatggaaaatacaacaagaatacacacatggagtttcagcgcatcacgacataagtagctcaatacgcaaagcgcaaagcactttcaagtaagataacctaaaatattctccaaatttacaccttaacaaaaattggacccaatccacagcttctcggtaacgttacaacctgtgttactatgcacccaatccactgcttctcggtaatgttacaaaatgactaagtatccattcttcaaggtcacggatcattcctcccaagatgcaccaagaatggcaacacaactacagaacaccatgctgatgagaaagcagaacctgaaagctacatgccatgatcttagttgtgtgatggaattggtagcctgcgcttccaagatttaacaaagaaatagcagccaaacattaacagttcagccccaaaatttgcgcacaattgaataacagatatccacctaaggatcaatcagaacacaaatggagtcgaccgttgatgactgctgaggttgttgccttgaaactgcagggcgcccccaccaacctccctccccaattttccagcaaagcaaaaatgtttgcccaacaagataactgacaaatattgaatcagatctgcacagtaaaacttttaagtagcctttgatgttactgaatctgctgtgagcctacaatggcctcaacagggtagccaccaaatttacaatccttccgcttcacaaccataatcatccatgtccaaccaaattcatgcagcaagacctgtaaacagaaaataaaatatacaacaaaaaactatgcacatgaccacaagtatatttatgcttaaaaaaactaggaacatgaccacaagtataggaatgcatgtgttttccaagttttaaggcctgcagttcagagtgtagtgcaagcagtggtcgccgaagggcaaatgtggtgcctggctggggctttaaccctccaggaccttatcctaaaatctggaccacttagggtcgtgtctggttttgataatcagtaagtgtgagtttgtgctaaccccatcccacccctcccccggggaaggtggcttccttttttttcttcttaatgaaatgacacagttctcctacatgattcgagaaaaaaaaatatctcagatttgtaactttgttatcctaatcatagttcaggaaaacaaaatgcaaaaactaagcaaggaagcactctccactcatgtattcaatcagcattcaaccagcaaaccattgggtgacagttctggttttgaacccccaaaactccatgctatttctggtcttgaagcctgttatagtgaaatctaaggtgtatagaaggtatgaacatgtcaggatttaattgaaagagaatcctagtccctagagcaatattccctacattgcacaaaagatataagcccattgcacaaaataaataaggtgtcctatatatactctgtaaaatttcatggtgtttatatcatttcatgatgtagccttacaaaactaatttagctatcttatcatgttgtgttcctagatccattggacaata

SEQ ID NO: 4232 - DNA, 4359 bp, Zea Mays
gttgaacacggtgtaagtcttccaagcatacaccatggtgtattttcaaagaagcaaatagtaagttgtggaaagttttaaaaaatgtctgtgatgccaattcaaataacccttcttcaaaccccgcagagaaaatgtgttgtgagaaagtgacaggttattcgattcttcgagccaaatacccggtaaacaaaattaactcagattcttgtatacgtttttaaaatttatggtcaaatggagggattctgcaataacaccttaaaactagtgccagatcgacagaatcaagattgcattgtactttggagttgtcttccctcttggagtttggggagagcgttatactatacgctggggtttggggaaagggtgcattttcatggcagccttgtaaccatccatccatcatctatttgccgatttgctttagctgcagagagcaaggatcccgcaaaagttcctcggcctagtaaccgccttccactctcagaattcgtcggcgtggtcctcggcagctcacttcctcctgctggtggtgatggtgaggcgctcgaggctgcggaacgtcgtgttgtcccgcgaggcggagcctcccctcccggccgcgttccgggccacgggggagcgcggggacgacctgctgttctcggcgcctcccgagtggtggagcctctgcgcgggggacgggcgcccgctgccgccactgctgccggagacccaccggcggttctggtcactgcagtcccccgaagaggtcggccgggtggacggagctgcgggcattttcgacgagctccctccccgggacaagatgcgcgttttctctgatgagtcggcaacctggtgcgtgccagataagtaagttagtacagtagtattatatttccatcaaaaaaaatctatgaaaatattataatacacttcttaagaactgatctgagttagcagaaagattttcagcaaaatactaagaacatggaaaagaggaaatgccctttattttcaattcactagactcatcttttatttagtggatttgacactaagtatatattttcgtttaaaaagttaatacctccattcatgtttactagctaccacagctaaatcagatactttttttctacaagagcaataaatcggatacttactgcttcgttggacgttccaaaggaatctgcaaagcttttgtgcctggaatgactggaatgatctgcagggcgcccagagcctggatttcttctggcgaatgcctcaacagcaccagtgaacctatcccggatctcttgtcccactggcaaaaacgcaactaattaggtcaatcgatcaattttcacatagcaatggtccaaatgcaattaactaccaggagacatactggaagctttgtctgttctctcaactgatggtccaactccagccattcttgcacttggttgctagataatttaagaaacataatggcattttagtgaaacgaaaagacaatagtaattcaccaataatgtagacaagacatagatataagattagagagacatacttgaacaagcttgttgttggagcccatttgagggtacttgagtgcagtccagtcaaatacgtaatcaaattggtatcctacagtgttaatctataatgagacccagtttcctaacaccggatcatagtgcaggcgagaacaatggtcacattagcggggtcactcagaagaaagggagcgacaatagtggaaatatgagacgaactccggcgggattacaatgttcgtgttggcaaaaagaagtacctctgccgaggtaagcattttcttttcactaattttatcatacttttgtttcttagtgccagctttaaggccctgccatgggaggctaagcataacgtaaaagcatgtcaagtatagtattagtaaaagaggaaatacagtaaaatatacagattttcgggacaaaccttcctcttaaaaaatatagcagaagatagccaacagactccagatcatctctcctgctttgttctggatgaaacaagtacaggtacatgaaaaacaaatacattgtgtttccctccttttgaaagcattagattaagtagcttctccttcgtcaatcgtcaggttaagtttatttcatgaccaagcatccaagaattaaaaagcgtatgattttaatgcaattgcagacacatggtaacatatttgatttgctcattgagctcacctattccaagatgagtattcacactagcataacgtgctgttccagtcagatttttgttctccctgtgcataaaaaaaattaatcatttaccataaaaaacaagtagtcacaaaaatgaaaaggttcactttatgtctaatctatcgattaaatttgaacctagcgtcctagtttgcaaatatcacagaaaacgcattaaatatttgcatgtgatgtgacactacttttaaccttggtgttaaaacttattcttgggctttcaagaagatactaatgcacaacaacatgacacgattggacatgaacattttgagtaatttgtcattttatttctgaaatttacatgtaaatatcgcaagatcaaacaatccactcaggttgcctctctaccatgatccgatactatatttaatatacaaaacctcagttggattgcccaacagtgtaccattagccagtgtctcttgacaaaatgtagggtgccatttgattcacgaaatgtaacgtaaatgacaatgataacgattcacacttgaatagaccggtatcaatttgtagtgtggtatatgattacggttggatttaaacaaatataatttaacattatctgttacctattacgttacaaatatataaaccaaacaacacctaggaagttgtgacataggtgcagtatagaggttgcacgaattatcacataggtgcagtatagaggttgcacgaattatcacatcccagtttctgcttatgaacttgcaatttaatggaataattgtttggcccaacaaagtccagggttagttataagtgaaaacttcattaatatgcttcacctgtatgggatgtgtttatgagtctgaaggtccttgtatttcttagcaagcccataatcaatgatatagacctgcagaataaaaaggatatgtcttcacatattgttcattgacgagtaagaatctcggggattattaccagatattattagtattagagaagtaactactatgctctttttatactgaaaataacaaaagcagatgacatttggggtttaacctgattagctttccgacctaagcctataaggaagttgtctggcttgatgtcacgatgaataaatcccttggaatgcatgtattccactcggtttatctaaaaatggaagatttaataatgtaagtccaggacaataataaaatctcgctctccttccaacacccactaaggaaaaagaatcaaacttaaaatatgtacaatcttgcaaagcttgcctgcgatacacttagaacaacatacggtgttcatgaaatccatttgtaccatcaatgatctaatactttggaattaaaacccacaaaagaaggcaacacttatggcagaatgctcatgaaacttctgaacatgtaactcccaaccaatagctgttatcaaattccagaaagttgacttgcctcctaactgttgcagggcagcgtaaggttgaatatggaatgaataaactcaccagttgatcagcaagcataagcaccgttttcatagaaaatttcctgttgcaggaattaaacaaatcttccaagcttgggccaagaagatcgatcaccataacattgtactccccctcaacaccataccacttgaggtgtgggataccgtctgtgtcaaaaatgagtgactaaataagcaaccagaaggcgtggacacaaattactgcaaataatcatataaattacaatcgacttacttccaccctgcagcagcatataaactttagattcatagtgcagctgtggatgttttgttttcacaggctcctgacagatcaaaccaaagaaaaggtgaggccttgaaccaaacgcttcagcaaaggtatatccagactctagataagagacatgttatactacattaaatgcaaacagtatatacgttccagcctggtttttttgcacataccaattttattcccacttcctctccattctgtatattaacacctagatcaagaaaagtcacactagaaagaataaaaatttatttatggggctaacaaaacacgaccataatatgcataaaatacacagaatgtaccgagatatagctctccgaaggatccgctcccaatcttcctcccaag

SEQ ID NO: 4233 - DNA, 2072 bp, Zea Mays
atggtcaaatggagggattctgcaataacaccttaaaactagtgccagatcgacagaatcaagattgcattgtactttggagttgtcttccctcttggagtttggggagagcgttatactatacgctggggtttggggaaagggtgcattttcatggcagccttgtaaccatccatccatcatctatttgccgatttgctttagctgcagagagcaaggatcccgcaaaagttcctcggcctagtaaccgccttccactctcagaattcgtcggcgtggtcctcggcagctcacttcctcctgctggtggtgatggtgaggcgctcgaggctgcggaacgtcgtgttgtcccgcgaggcggagcctcccctcccggccgcgttccgggccacgggggagcgcggggacgacctgctgttctcggcgcctcccgagtggtggagcctctgcgcgggggacgggcgcccgctgccgccactgctgccggagacccaccggcggttctggtcactgcagtcccccgaagaggtcggccgggtggacggagctgcgggcattttcgacgagctccctccccgggacaagatgcgcgttttctctgatgagtcggcaacctggtgcgtgccagataagtaagttagtacagtagtattatatttccatcaaaaaaaatctatgaaaatattataatacacttcttaagaactgatctgagttagcagaaagattttcagcaaaatactaagaacatggaaaagaggaaatgccctttattttcaattcactagactcatcttttatttagtggatttgacactaagtatatattttcgtttaaaaagttaatacctccattcatgtttactagctaccacagctaaatcagatactttttttctacaagagcaataaatcggatacttactgcttcgttggacgttccaaaggaatctgcaaagcttttgtgcctggaatgactggaatgatctgcagggcgcccagagcctggatttcttctggcgaatgcctcaacagcaccagtgaacctatcccggatctcttgtcccactggcaaaaacgcaactaattaggtcaatcgatcaattttcacatagcaatggtccaaatgcaattaactaccaggagacatactggaagctttgtctgttctctcaactgatggtccaactccagccattcttgcacttggttgctagataatttaagaaacataatggcattttagtgaaacgaaaagacaatagtaattcaccaataatgtagacaagacatagatataagattagagagacatacttgaacaagcttgttgttggagcccatttgagggtacttgagtgcagtccagtcaaatacgtaatcaaattggtatcctacagtgttaatctataatgagacccagtttcctaacaccggatcatagtgcaggcgagaacaatggtcacattagcggggtcactcagaagaaagggagcgacaatagtggaaatatgagacgaactccggcgggattacaatgttcgtgttggcaaaaagaagtacctctgccgagggcagcgtaaggttgaatatggaatgaataaactcaccagttgatcagcaagcataagcaccgttttcatagaaaatttcctgttgcaggaattaaacaaatcttccaagcttgggccaagaagatcgatcaccataacattgtactccccctcaacaccataccacttgaggctcctgacagatcaaaccaaagaaaaggtgaggccttgaaccaaacgcttcagcaaaggtatatccagactctagataagagacatgttatactacattaaatgcaaacagtatatacgttccagcctggtttttttgcacataccaattttattcccacttcctctccattctgtatattaacacctagatcaagaaaagtcacactagaaagaataaaaatttatttatggggctaacaaaacacgaccataatatgcataaaatacacagaatgtaccgagatatagctctccgaaggatccgctcccaatcttcctcccaag

SEQ ID NO: 4234 - DNA, 2546 bp, Zea Mays
agcccaccccaggtcgccacgcccgccacaagaagcagcagccttacccgaaccgaagacgaaccctaccgcgccttgatatcatatcgtctccgtgtcgttctcgcagcgcagcgagcgagccacgcgctcctgcgcagtagcgtaatggcggtgcaaggcggcgaggagagggtggtgctttgggcgctgagcacgcgggcgggcacgctgctgctgtgcggccggctcagcctcggcgccggcttcccctacgtgcgcaggttcgccgacatggcgccggagcggcgggaggcggccctgcggcgctggaaccgggtgcgctggctcttcccgctccgcatcgccttcgccatcgtcaagatcctctgccactacgtcttctacgccatggtacgccggccgcacccttctctctcgtacgcaccgtgctggccgcaataaatctaggcgtctatactaatcggcaggagattaggttctggaaccctccaattagtaacgggcggctttccactgttcctgaacgcgggtactactagtgtggtgaacgagaactccgagaatccatactggaaagcgataggatacagcgtggacgagccacgggaggatcgggctcggacggcgacaccgtcgccgtcccggcccctcgacgtcggcgtcgtggagaccaggctgctggacgacaacaagctgctcagatcgctcgtggggaggggcctcacggtgaagccggcgtcgtcggacgcgaaccaccacacagtgcaatgcgacgccgtcatcgtggggtccggctgcggcggtggcgtggccgcggccgtgctcgcgtccgcggggtacaaggtggtggtcgtcgagaaaggcgactacttcaccgccgaggactacagctcgatcgagggcccgtccatggagcgcctcttcgagcgaggcggcatcttctgcacgtccaacgtgaccaccatgatcttcacgggcgccacggtcggcggcggctcggcggtgaactggtcggcgagtatccggacgccggaggaggtgacgcaggagtgggcgcgcgagcacgggctcccggtgttcgcgagccccgggtatgcgcaggccatggacgcggtgtgcgcccggctcggcgtcaccgacgggtgccaggaggaggggttccagaacaaggtggtccgccgcgggtgcgaggctctcgggctgtgcgccgacgctgtgccgcgcaactcgtcggatgctcacttctgcgggagctgcaacttcggttgcccgaccggggacaagcgcggcaccgacacgacgtggctcgtggacgccgtcgcgcgcggcgcggtcatcctgaccggctgcaaggctgagtacttcgtcctcgagaagaaccacagcagcggcagcggaagcgggcggggcaagaagtgcgtgggcctggtggcgacctgcgcgagcaacggcgtcaccaagaaactgcgcatcgaggccaaggtttcgatcgcggcttgtggggcgctgatgacgccgccgctgctgcggcgtagcgggctcaagaaccggcacatcggcagcaacctccacctccacccggtgtccatggcgtggggttacttcccggagaacaagcaggaccccccgctctctggcaagtgctacgagggcggcatcatcaccagcatgcaccgcgtcacggaccgcaccatcatcgagacgccggcgctggggcccggcgccttcgccgcgatggtgccgtgggagtccggccgcgacatgaaggagcgcatgcgccggtactcccgcacggcgcacgcctttgcgctggtccgcgaccgcggcgtcgggttcgtggacggcgaaggacgcgtgcgcttcaccccgagccgcgaggacgtcgacgagctccgcaacggcctacgccgcgtgctgcgcatcttggtggcggcgggggccgcggaggtcgggacccaccgcagtgacggtctccggctgcggtgcaagggcctccgcgacgaggacctcgaggggttcctggacgaggtgaccatcgagaaggggcccatgcactcgagggttgacaagtgggctctccactgctcagcgcaccagatgggcagctgtcgtatggggtccagccctaaggacggcgccgtggatggccgcggcgagagctgggaggcagagggcctgtacgtgtgcgacggcagcctgctgcccacggcggtgggcgtcaaccccatgatcaccatccagtctatcgccttctgcctctccaagggcatcgccgagaccatggcccaggggcagggcaagggacagtagcctatgattgagacgcgcctggcgatggtttaattcatgcgtgcaacactgcaacatgtgtgcgttcttgttaatcgagtgtggtgaaagcgtcgaaaaatgtgtttgtgcattgtgtttgtgcaaatggtacgcgaatcacaatacatcctgtttcctgccccggtcaatatttttctattatgatgcataagattgctcattgtaaaatgtatggctgccgccgcttgccc

SEQ ID NO: 4235 - DNA, 2632 bp, Zea Mays
ccctgtctcgctctcactctcgctcaagtctcaacgacaggacacaggagctctctctctctctctatctagtctctctctatatatacacagcacacacaagccactgccgttgtctgtactaagcacccgcgggtttcgacaagaagcgtaagctagctatggcaacggggaggaggggaagcccgctgctgcggaggtgcaagcgcgaggggtacacgcacgggctgcgcccgccgcagatggaggcgctccgggccatgtgcggcgcgctcatcccgtccctacccgtggagggcctccacgtccagcctcagcccggccgtggcaaggacgacctcgaccggttcttccgcgcgtccgccgccgacggcgccatccctgacgaggtaaacgagaactcggacaacccgtcctggaaagcaataggatacagcgtgcccgtgccggcggcggcggcggacgtggacaggctacggccacgggaattaggtccagcggaggcagaggcgccgtcaccgcggccactggacagcggcgtcgtggagaccagatccctgaacgacgccacgctgctcaagtcactgacggagagaggagtggcggtgaaagcgggcgtgtcgggcgcgcaccacaccgtgcaatgcgacgtcgtcatcgtcgggtcaggctgcggaggcggcgtggccgccgccgtgctggcggcggcggggcgcaaggtcgtcgtcgttgagaagggggactacttcacagccgagagctacacctccgtggagggcccgtccatggagcgcctctacgagaaggggggcatcttctgcacgtccaacgtgacgaccatcatgttcgcgggcacgacggtcggcggcggctctgccatcaactggtccgccagtgtccgcacgccggagtgggtcacgcaggagtgggcgcgcgagcatgggctccccatgttcgggaggccggagtacgcgcacgccatggacgcggtttgcgccaggctcgccgtcaccggcgggtgccgggaggaagggttccagaacaaggtgctccgccgcggctgcgaggcgcttgggctgcgtggcgacgccgtgccgcgcaactcgtcggagggccacttctgcggtagctgccacctgggctgccccaccggcgacaagcgcggcaccgacacgacgtggctcgtcgacgccgtcgcgcgcggcgcggtcgtactcacaggttgcaaggccgagcgttttgtgctggagagcaacccaggcggcagggacggccggagcaacaggtgcgtgggcctggtggcgacgtgcatgagcgacggcatcaccaagaagctgcgcatcgaggccaaggtttccgtctcggcgtgtggcgcgctcatgacgccgcctctgctccgcaacagcgggctccagaacagccacgtcggccgcaaccttcacctgcacccggtgtctatggcgtggggctactttccggacagcacgccggaggcagagctcagtggcaagtgctacgagggtggcatcatcacgaccatgcgtcgcgtcaccgcgcgcaccatcatccagacgccggcgctggggccaggatgctgggcttcgctggtcccctgggagtcgggccgcgacatgaaggagcgcatgctccgctacgcgcgcaccgcgcacgccttcgccctggtccgtgaccgcggcgcggggcacgtcgacggcgagggccgcgtgcgctacaccccgagccgggaggacgtggacgagctccgcaacgggctgcgccagacgctgcgcatcctggtggccgccggagcggccgaggtcggcacccaccgcagcgacgggctccggctgcggtgcgacggcctccgcgacgaggacctggaggcgttcctgaagcaggtgaccgtagagaaaggtcccatggtcccggggcatgacaagtgggcgctccattgctcggcgcaccagatgggcagctgccggatggggtccagcccgaaacacggcgccgtggacggccgcggcgagagctgggaggcggaggggctgtacgtgtgcgatggcagcctgctgcccacggcggtgggcgtcaaccccatgatcaccatacagtccaccgcgtactgcgtctccaagggcatcgcggagtctctggcgcgtgacaataaatagtagcctggtttgagaccgtcggatcgtgctcgcgcgcaaatggttgttgcccctgccagtggctgtgtgtgtgcatgttggatgtgtcttcatccttgtaatttgttgcataaaaagcccatcggctcgtattttcatacatcattttttaacgcttttcctatatacttagttgaggtcattgaacttaaaaataatttcagaggacaatattgtaccattaactagcccaagtatagtttattatttgttttttgttataatatatcaagttgttgtctctatctgaccataaaaacaattatatattgttaattatttttataccatataaaccatatttttgccagatttatgatttattaaaatataacttttcttctcggtacttaaaattacagagtgtgcataaggaagttataactaaaactataattactcccttcacatatggatattgt

SEQ ID NO: 4236 - DNA, 2734 bp, Zea Mays
aagccactgccgttgtctgtactaagcacccgcgggtttcgacaagaagcgtaagctagctatggcaacggggaggaggggaagcccgctgctgcggaggtgcaagcgcgaggggtacacgcacgggctgcgcccgccgcagatggaggcgctccgggccatgtgcggcgcgctcatcccgtccctacccgtggagggcctccacgtccagcctcagcccggccgtggcaaggacgacctcgaccggttcttccgcgcgtccgccgccgacggcgccatccctgacgaggattggcacgctggcgctgtgcgggcggctgtgcttctccgccggcaagtcgtcgttcccgtacgcctgcaggttcgcggacatgccggtggagcggagagagcgggtgctgcagcggtggagcggcgcgcggtggctgttccccctcaagatcaccttcgtcatcgccaagctcctgtcccactacgcgttctacacaatggtaaacgagaactcggacaacccgtcctggaaagcaataggatacagcgtgcccgtgccggcggcggcggcggacgtggacaggctacggccacgggaattaggtccagcggaggcagaggcgccgtcaccgcggccactggacagcggcgtcgtggagaccagatccctgaacgacgccacgctgctcaagtcactgacggagagaggagtggcggtgaaagcgggcgtgtcgggcgcgcaccacaccgtgcaatgcgacgtcgtcatcgtcgggtcaggctgcggaggcggcgtggccgccgccgtgctggcggcggcggggcgcaaggtcgtcgtcgttgagaagggggactacttcacagccgagagctacacctccgtggagggcccgtccatggagcgcctctacgagaaggggggcatcttctgcacgtccaacgtgacgaccatcatgttcgcgggcacgacggtcggcggcggctctgccatcaactggtccgccagtgtccgcacgccggagtgggtcacgcaggagtgggcgcgcgagcatgggctccccatgttcgggaggccggagtacgcgcacgccatggacgcggtttgcgccaggctcgccgtcaccggcgggtgccgggaggaagggttccagaacaaggtgctccgccgcggctgcgaggcgcttgggctgcgtggcgacgccgtgccgcgcaactcgtcggagggccacttctgcggtagctgccacctgggctgccccaccggcgacaagcgcggcaccgacacgacgtggctcgtcgacgccgtcgcgcgcggcgcggtcgtactcacaggttgcaaggccgagcgttttgtgctggagagcaacccaggcggcagggacggccggagcaacaggtgcgtgggcctggtggcgacgtgcatgagcgacggcatcaccaagaagctgcgcatcgaggccaaggtttccgtctcggcgtgtggcgcgctcatgacgccgcctctgctccgcaacagcgggctccagaacagccacgtcggccgcaaccttcacctgcacccggtgtctatggcgtggggctactttccggacagcacgccggaggcagagctcagtggcaagtgctacgagggtggcatcatcacgaccatgcgtcgcgtcaccgcgcgcaccatcatccagacgccggcgctggggccaggatgctgggcttcgctggtcccctgggagtcgggccgcgacatgaaggagcgcatgctccgctacgcgcgcaccgcgcacgccttcgccctggtccgtgaccgcggcgcggggcacgtcgacggcgagggccgcgtgcgctacaccccgagccgggaggacgtggacgagctccgcaacgggctgcgccagacgctgcgcatcctggtggccgccggagcggccgaggtcggcacccaccgcagcgacgggctccggctgcggtgcgacggcctccgcgacgaggacctggaggcgttcctgaagcaggtgaccgtagagaaaggtcccatggtcccggggcatgacaagtgggcgctccattgctcggcgcaccagatgggcagctgccggatggggtccagcccgaaacacggcgccgtggacggccgcggcgagagctgggaggcggaggggctgtacgtgtgcgatggcagcctgctgcccacggcggtgggcgtcaaccccatgatcaccatacagtccaccgcgtactgcgtctccaagggcatcgcggagtctctggcgcgtgacaataaatagtagcctggtttgagaccgtcggatcgtgctcgcgcgcaaatggttgttgcccctgccagtggctgtgtgtgtgcatgttggatgtgtcttcatccttgtaatttgttgcataaaaagcccatcggctcgtattttcatacatcattttttaacgcttttcctatatacttagttgaggtcattgaacttaaaaataatttcagaggacaatattgtaccattaactagcccaagtatagtttattatttgttttttgttataatatatcaagttgttgtctctatctgaccataaaaacaattatatattgttaattatttttataccatataaaccatatttttgccagatttatgatttattaaaatataacttttcttctcggtacttaaaattacagagtgtgcataaggaagttataactaaaactataattactcccttcacatatggatattgt

SEQ ID NO: 4237 - DNA, 1698 bp, Zea Mays
ggtttcgacaagaagcgtaagctagctatggcaacggggaggaggggaagcccgctgctgcggaggtgcaagcgcgaggggtacacgcacgggctgcgcccgccgcagatggaggcgctccgggccatgtgcggcgcgctcatcccgtccctacccgtggagggcctccacgtccagcctcagcccggccgtggcaaggacgacctcgaccggttcttccgcgcgtccgccgccgacggcgccatccctgacgaggtcgcggagatggtgacccgatgcgtatgggagggagtgctgctcatgaggattgtcctgtgggtcctgagcaccaggattggcacgctggcgctgtgcgggcggctgtgcttctccgccggcaagtcgtcgttcccgtacgcctgcaggttcgcggacatgccggtggagcggagagagcgggtgctgcagcggtggagcggcgcgcggtggctgttccccctcaagatcaccttcgtcatcgccaagctcctgtcccactacgcgttctacacaatgtcctacaggctgagctagagaagctttgccgccgagcgggccaagttgcaaagtatgtcggggctcgaggttcgtccctggtggagcgcttggatgatatctcgtgcagtatttaggatattatcgattttagcgtttagggggtagttatagccttggtcgtcgaggagcttcgttctagttgtgggctccaggacgtcgtcgattttcctctagatgtcccagacgatggactagaggatgtgttagagggttatgatgaggcggctagtcatgtcgtggccaggctgtctgtagatgatatcgtccgcaaggcttggtgacaccaatgtgccaccagctgttaatcctcacaatgctgatgcagatggctaggatgagtggccattgtacagagatatgtctgagggctcgttctgtctttctatttcactttctcccatgcaccccattcacaaggacagggagcggtgggtcatgccatgctttctttgatgggctagcaatgacactcggtgagctgtaatcaggtgatttgagtgaggccctggttcctttcacacgatccaagtttggggtctacaaggaaaatgaaccacgggccatctggctaagtgattttggtttttgatgatcaacacaaccttgtggactaatgttttccaagtctttgtgttttgtagttcacaggatgcgaagaggtttggactaaggccttgaggataaaacacctcaaaagaagacataaaagatacttagaagatcaataaaaatcaagcacaagttcaagactcaaagctaaaaaagcccaagataaagattgaagaaaaagaagaaatgaacagtcagccaacgcactagtggcacatcggacagtctgcgcagagagttccgcaaacggactctcgggagctggtgcaccggactgtccagtgcgtccgacgacagaaatagttagctttctgtccaacgactatatttgaggggagactatttatacccctccaaccggcacctgaaagtgtaggagtctaagcaacataccaacacatgttatagacatttctaagtgcgtaaacacccaagtgctcaatagaatcactcgataattagcgtatgtgctttccgaagtgcttaggttagttagaccgtttatgtgattgc

SEQ ID NO: 4238 - DNA, 3910 bp, Zea Mays
gcgtagtctacgagccaggccggcgtcccccaaaatcaccggcaggttttcctcggttcccgttacgtatgtggacacctgaactcaacgcaaagaccacgaactgccgtcagagaagacgctagtaaaccgcccgccgccccaactcacgaatcggcaccgccacccaacggggctgaaggcccagccctccaccctccgggcaccagtgcgtgcgccgtcgacttcctctcaccttctcgctcctcgagaacgactccatagcgcaccacaccagcgcggcgacagacagcccgcgaggagaaaaggtagaagaggaggggcagggagagccatacatactcaccggttggattcggtccaatccaatccagccggccgcggcgtgaccagccgatccagagggcgccgaatcgatctgcgggggcggcgcggcgatgcggagggctaccgctggggatcccggtcgccgcgggggatgcgcatgagggcgtccggcccgcgaatcttctggtttggcgggagcccagggggcgcgcaccccggatcggcggcgcgcggcgcgggcaggatcgtgtcggtggggctgcggcagtgaccgcgggcgcgggggagggtgagaagcggcaactagcacttcgagtcgagcgggcgcgatggtgagcggccacatcttccactgccggaagaactcgtggccggcggaggagtacgtcggccggaccgcgctgcagctgttggatttcgatggcggggcgccgccggagcaggcgtggcggaggcggctcaacagccacgcgaacatcctcaaggagttcagtgtcactttcatggaggcaatgaggatgatgagccttggcctgagactatggtcgtatgttcgggaggaggcgtcacatggacggaaagcaccgatcgatccgttcacaaaagagcgctgtaaaccgtcagcttcccagggtgtgccacttggtgggatggggagcggaagcatttcgagaggtttcaggggagagttcaagaattggcacatcatacctggtctttgtgaaagttcgccggtcatggagaaccagttctctatatttgtatctcgagacgggggtaataagaaatactcatcagttttggctcctggacatcatgaaggtctgaagaaaaatagtgactctggaatttcttcatgggactggaatttaagtggtcaacactcgacctatcatgcattgttccctcgggcatggactgtttatgatggtgaacctgatccagaccttaaaatctcatgtcgtcaaatatcacctttcattcctcatgattacaaggatagcagtcttccaacatctgtatttgtgtatactctagtaaacactgggagagatcgtgcaaaagtaagcctgttaatgacatgggcgaattctattggaggtttttcgcataattcaggaggccactacaatgagcccttcattgcggaagatggagtatcaggagtgcttctgcatcacaaaacagccaaggataatccacctgtcacttttgctgttgctgcctgcgaaactcagaatgtgaatgtgacagtcttgccagtgtttggtctttctggagaaaaccatgtttccgcaaaggaaatgtggaacaccatgctacagaatggtcactttgatcgggaaaatttcagtgctggtcccagtatgccttcttctccaggacagaaactctgtgcagctgtctcagcctcaacttgggttgagccacatggtagatgtactgttgtgtttgctctggcttggtcctcacctaaagtaaagtttcaaaaaggatgcacatataacaggaggtacacccaattctacggaacttctgagaaatcggctgttaatttggtacatgatgccttaacaaaatataaactttgggaagaagaaattgagaagtggcaaaaccccatactgaaggatgaaaggcttccagaatggtataagttcactctttttaatgagctttactttctggtagctggggggactgtttggacagatggtcaacccccagcaatcgatgagaaaaagagtcctggttttaatcaccagaagtcctcaaagaggggtactaaagacaccaatcagggatctgttaaagatagacatgtcaacctggcagtggagcaagtacctcatggtggttacatggctaatggtgatgatcacagtgtatccaagttcgcagcagttcatggatcagaaatgcaagaacaaatcaatggactcaagtcagaagagccaattccttacttgatttcaaaggatggccctgaacacgttggcaagtttttgtatctagaaggagtggaatacatcatgtggaacacatatgatgtgcatttctatgcatcttttgctctccttgatttgttcccaaaaatagagttgagtatccaacgtgattttgccaatgctgtgctgtatgaagatcggcgcaaagtaaaatttttggctgatggtacatccggaatccgcaaggttaaaggtgcagtgcctcatgacctcggaacgcatgatccgtggcatgaaatgaatgcatataacatacacgatacaagcaaatggaaagatttgaaccccaaatttgtgctccagatatacagagactttgctgctacaggtgatatgcaattcggtcgagatgtttggcctgcagtctgtgctgctatggactatatggatcagtttgaccgtgatggtgatggtctcattgagaatgatggatttcctgatcaaacctatgatgcttggactgttcatggaatcagtgcttactgtggttgtctttggcttgctgcacttcaagctgcagctacaatggctcatcgccttggggatcggcactttgctgagaagtacaagctcaagtttataaaagccaaagcagtatatgaggcgaagttatggaatgggtcatatttcaattacgacagcggcacaagtagcaacagtagatccattcaggctgatcagctggcaggacagtggtatgctgcctcgtcgggcttgcccccgcttttcgatgagcacaagataagaactgctctgcaaaaaatatttgaattcaacgtgatgaaggttaaaggaggacggatgggagctgtaaatggtatgactccaaagggaaaggtggacgagacatgcatgcaatcacgtgaaatctggactggtgttacatacgctgttgctgcaaatatgctgctccatggaatggagcatcaaggctttacgaccgcagaaggaatttttactgcgggatggtcagaagaaggatatgggtattggttccaaacaccagaaggatggaccacagatgggcattatagatccctcgtatacatgcggcctcttgccatttgggcgatccagtatgcagtttctcctcccaaggctattcttgaggcccccaaagttaacctaatggaccgaatacatatctcccctcacatggtccgagcaattagcgagataagcattagaaaggtagcacccgacaatagatgtttccctagctctgccttccactgtgaatgctgatccgaagcaccaatggcggaggaggagagaagaaacgcaagaaagtgcaagcagtatgtcgcacgtgttaatcaagctccaatgtataaaatgtattagtcgaacgaggttttaagctagcacgcacctggtgtctaatgtattgcacctcacttcctctctctctcatcttttcactcatctttgcaccttcttctgttagcaaacacaatatatgcagacgccctaataagcatgcatatttctgtgttacatgtatatatgaaccatttattgtaggttaaggttgctttgaatttttaaagtcaattctctcctgcttggagcac

SEQ ID NO: 4239 - DNA, 4502 bp, Zea Mays
gcgtagtctacgagccaggccggcgtcccccaaaatcaccggcaggttttcctcggttcccgttacgtatgtggacacctgaactcaacgcaaagaccacgaactgccgtcagagaagacgctagtaaaccgcccgccgccccaactcacgaatcggcaccgccacccaacggggctgaaggcccagccctccaccctccgggcaccagtgcgtgcgccgtcgacttcctctcaccttctcgctcctcgagaacgactccatagcgcaccacaccagcgcggcgacagacagcccgcgaggagaaaaggtagaagaggaggggcagggagagccatacatactcaccggttggattcggtccaatccaatccagccggccgcggcgtgaccagccgatccagagggcgccgaatcgatctgcgggggcggcgcggcgatgcggagggctaccgctggggatcccggtcgccgcgggggatgcgcatgagggcgtccggcccgcgaatcttctggtttggcgggagcccagggggcgcgcaccccggatcggcggcgcgcggcgcgggcaggatcgtgtcggtggggctgcggcagtgaccgcgggcgcgggggagggtgagaagcggcaactagcacttcgagtcgagcgggcgcgatggtgagcggccacatcttccactgccggaagaactcgtggccggcggaggagtacgtcggccggaccgcgctgcagctgttggatttcgatggcggggcgccgccggagcaggcgtggcggaggcggctcaacagccacgcgaacatcctcaaggagttcagtgtcactttcatggaggcaatgaggatgatgagccttggcctgagactatggtcgtatgttcgggaggaggcgtcacatggacggaaagcaccgatcgatccgttcacaaaagagcgctgtaaaccgtcagcttcccagggtgtgccacttggtgggatggggagcggaagcatttcgagaggtttcaggggagagttcaagaattggcacatcatacctggtctttgtgaaagttcgccggtcatggagaaccagttctctatatttgtatctcgagacgggggtaataagaaatactcatcagttttggctcctggacatcatgaaggtctgaagaaaaatagtgactctggaatttcttcatgggactggaatttaagtggtcaacactcgacctatcatgcattgttccctcgggcatggactgtttatgatggtgaacctgatccagaccttaaaatctcatgtcgtcaaatatcacctttcattcctcatgattacaaggatagcagtcttccaacatctgtatttgtgtatactctagtaaacactgggagagatcgtgcaaaagtaagcctgttaatgacatgggcgaattctattggaggtttttcgcataattcaggaggccactacaatgagcccttcattgcggaagatggagtatcaggagtgcttctgcatcacaaaacagccaaggataatccacctgtcacttttgctgttgctgcctgcgaaactcagaatgtgaatgtgacagtcttgccagtgtttggtctttctggagaaaaccatgtttccgcaaaggaaatgtggaacaccatgctacagtgctggtcccagtatgccttcttctccaggacagaaactctgtgcagctgtctcagcctcaacttgggttgagccacatggtagatgtactgttgtgtttgctctggcttggtcctcacctaaagtaaagtttcaaaaaggatgcacatataacaggaggtacacccaattctacggaacttctgagaaatcggctgttaatttggtacatgatgccttaacaaaatataaactttgggaagaagaaattgagaagtggcaaaaccccatactgaaggatgaaaggcttccagaatggtataagttcactctttttaatgagctttactttctggtagctggggggactgtttggacagatggtcaacccccagcaatcgatgagaaaaagagtcctggttttaatcaccagaagtcctcaaagaggggtactaaagacaccaatcagggatctgttaaagatagacatgtcaacctggcagtggagcaagtacctcatggtggttacatggctaatggtgatgatcacagtgtatccaagttcgcagcagttcatggatcagaaatgcaagaacaaatcaatggactcaagtcagaagagccaattccttacttgatttcaaaggatggccctgaacacgttggcaagtttttgtatctagaaggagtggaatacatcatgtggaacacatatgatgtgcatttctatgcatcttttgctctccttgatttgttcccaaaaatagagttgagtatccaacgtgattttgccaatgctgtgctgtatgaagatcggcgcaaagtaaaatttttggctgatggtacatccggaatccgcaaggttaaaggtgcagtgcctcatgacctcggaacgcatgatccgtggcatgaaatgaatgcatataacatacacgatacaagcaaatggaaagatttgaaccccaaatttgtgctccagatatacagagactttgctgctacaggtgatatgcaattcggtcgagatgtttggcctgcagtctgtgctgctatggactatatggatcagtttgaccgtgatggtgatggtctcattgagaatgatggatttcctgatcaaacctatgatgcttggactgttcatggaatcagtgcttactgtggttgtctttggcttgctgcacttcaagctgcagctacaatggctcatcgccttggggatcggcactttgctgagaagtacaagctcaagtttataaaagccaaagcagtatatgaggcgaagttatggaatgggtcatatttcaattacgacagcggcacaagtagcaacagtagatccattcaggctgatcagctggcaggacagtggtatgctgcctcgtcgggcttgcccccgcttttcgatgagcacaagataagaactgctctgcaaaaaatatttgaattcaacgtgatgaaggttaaaggaggacggatgggagctgtaaatggtatgactccaaagggaaaggtggacgagacatgcatgcaatcacgtgaaatctggactggtgttacatacgctgttgctgcaaatatgctgctccatggaatggagcatcaaggctttacgaccgcagaaggaatttttactgcgggatggtcagaagaaggatatgggtattggttccaaacaccagaaggatggaccacagatgggcattatagatccctcgtatacatgcggcctcttgccatttgggcgatccagtatgcagtttctcctcccaaggctattcttgaggcccccaaagttaacctaatggaccgaatacatatctcccctcacatggtccgagcaattagcgagataagcattagaaaggtagcacccgacaatagatgtttccctagctctgccttccactgtgaatgctgatccgaaggtaaacatgcagctgctgagcaacttgcaaccttttttttggcttttttcggtttctccttgccccccccccccctttcaaggtccaggtgggggggctcaggagttcttttcttggatcagagggcttatccaaaccaccaccaaactcgtgactcaagagagttcatgttgtataattgtacagcaaactgttagtcacataatctttttttttcactttgaaagttttgtgctgttcacttgaatagagctagaaataaaagaactgggaagctggtgtctacggctaaccgtagggctgttggaagttaacgtcccatagctaggcaggtagcgttggaagttaatttaactttcgacggaatcacaagaagttgctgactacgacaccgtgttgccactcgtttggtctactcatcttttttttgttgctggaagttttgtgctgccaaagtaaccacatttcacaagaatagagctagaaataaaaggaaatctggtggtagttaggttttcatatcggcacttgtgttgggagttgggacatgtgcatgcaatccctatatcaaatattagctgtgttcattttgttgctcttggcgcccgagctttgccgcagcaccaatggcggaggaggagagaagaaacgcaagaaagtgcaagcagtatgtcgcacgtgttaatcaagctccaatgtataaaatgtattagtcgaacgaggttttaagctagcacgcacctggtgtctaatgtattgcacctcacttcctctctctctcatcttttcactcatctttgcaccttcttctgttagcaaacacaatatatgcagacgccctaataagcatgcatatttctgtgttacatgtatatatgaaccatttattgtaggttaaggttgctttgaatttttaaagtcaattctctcctgcttggagcac

SEQ ID NO: 4240 - DNA, 4918 bp, Zea Mays
gcgtagtctacgagccaggccggcgtcccccaaaatcaccggcaggttttcctcggttcccgttacgtatgtggacacctgaactcaacgcaaagaccacgaactgccgtcagagaagacgctagtaaaccgcccgccgccccaactcacgaatcggcaccgccacccaacggggctgaaggcccagccctccaccctccgggcaccagtgcgtgcgccgtcgacttcctctcaccttctcgctcctcgagaacgactccatagcgcaccacaccagcgcggcgacagacagcccgcgaggagaaaaggtagaagaggaggggcagggagagccatacatactcaccggttggattcggtccaatccaatccagccggccgcggcgtgaccagccgatccagagggcgccgaatcgatctgcgggggcggcgcggcgatgcggagggctaccgctggggatcccggtcgccgcgggggatgcgcatgagggcgtccggcccgcgaatcttctggtttggcgggagcccagggggcgcgcaccccggatcggcggcgcgcggcgcgggcaggatcgtgtcggtggggctgcggcagtgaccgcgggcgcgggggagggtgagaagcggcaactagcacttcgagtcgagcgggcgcgatggtgagcggccacatcttccactgccggaagaactcgtggccggcggaggagtacgtcggccggaccgcgctgcagctgttggatttcgatggcggggcgccgccggagcaggcgtggcggaggcggctcaacagccacgcgaacatcctcaaggagttcagtgtcactttcatggaggcaatgaggatgatgagccttggcctgagactatggtcgtatgttcgggaggaggcgtcacatggacggaaagcaccgatcgatccgttcacaaaagagcgctgtaaaccgtcagcttcccagggtgtgccacttggtgggatggggagcggaagcatttcgagaggtttcaggggagagttcaagaattggcacatcatacctggtctttgtgaaagttcgccggtcatggagaaccagttctctatatttgtatctcgagacgggggtaataagaaatactcatcagttttggctcctggacatcatgaaggtctgaagaaaaatagtgactctggaatttcttcatgggactggaatttaagtggtcaacactcgacctatcatgcattgttccctcgggcatggactgtttatgatggtgaacctgatccagaccttaaaatctcatgtcgtcaaatatcacctttcattcctcatgattacaaggatagcagtcttccaacatctgtatttgtgtatactctagtaaacactgggagagatcgtgcaaaagtaagcctgttaatgacatgggcgaattctattggaggtttttcgcataattcaggaggccactacaatgagcccttcattgcggaagatggagtatcaggagtgcttctgcatcacaaaacagccaaggataatccacctgtcacttttgctgttgctgcctgcgaaactcagaatgtgaatgtgacagtcttgccagtgtttggtctttctggagaaaaccatgtttccgcaaaggaaatgtggaacaccatgctacagaatggtcactttgatcgggaaaatttcagtgctggtcccagtatgccttcttctccaggacagaaactctgtgcagctgtctcagcctcaacttgggttgagccacatggtagatgtactgttgtgtttgctctggcttggtcctcacctaaagtaaagtttcaaaaaggatgcacatataacaggaggtacacccaattctacggaacttctgagaaatcggctgttaatttggtacatgatgccttaacaaaatataaactttgggaagaagaaattgagaagtggcaaaaccccatactgaaggatgaaaggcttccagaatggtataagttcactctttttaatgagctttactttctggtagctggggggactgtttggacagatggtcaacccccagcaatcgatgagaaaaagagtcctggttttaatcaccagaagtcctcaaagaggggtactaaagacaccaatcagggatctgttaaagatagacatgtcaacctggcagtggagcaagtacctcatggtggttacatggctaatggtgatgatcacagtgtatccaagttcgcagcagttcatggatcagaaatgcaagaacaaatcaatggactcaagtcagaagagccaattccttacttgatttcaaaggatggccctgaacacgttggcaagtttttgtatctagaaggagtggaatacatcatgtggaacacatatgatgtgcatttctatgcatcttttgctctccttgatttgttcccaaaaatagagttgagtatccaacgtgattttgccaatgctgtgctgtatgaagatcggcgcaaagtaaaatttttggctgatggtacatccggaatccgcaaggttaaaggtgcagtgcctcatgacctcggaacgcatgatccgtggcatgaaatgaatgcatataacatacacgatacaagcaaatggaaagatttgaaccccaaatttgtgctccagatatacagagactttgctgctacaggtgatatgcaattcggtcgagatgtttggcctgcagtctgtgctgctatggactatatggatcagtttgaccgtgatggtgatggtctcattgagaatgatggatttcctgatcaaacctatgatgcttggactgttcatggaatcagtgcttactgtggttgtctttggcttgctgcacttcaagctgcagctacaatggctcatcgccttggggatcggcactttgctgagaagtacaagctcaagtttataaaagccaaagcagtatatgaggcgaagttatggaatgggtcatatttcaattacgacagcggcacaagtagcaacagtagatccattcaggctgatcagctggcaggacagtggtatgctgcctcgtcgggcttgcccccgcttttcgatgagcacaagataagaactgctctgcaaaaaatatttgaattcaacgtgatgaaggttaaaggaggacggatgggagctgtaaatggtatgactccaaagggaaaggtggacgagacatgcatgcaatcacgtgaaatctggactggtgttacatacgctgttgctgcaaatatgctgctccatggaatggagcatcaaggctttacgaccgcagaaggaatttttactgcgggatggtcagaagaaggatatgggtatgccctgtctcacacattgttgagcagaagtttcagattttttttttcagtggtgcagcttttcacattaccttagcagtgcatctcttatctcgttattaacttggcagtgcattccttatctcatttataacttagcagtgcatttcttatctttcttttttttgttgcttctattatatatattccatgagaaacctaggaatcagatgttctagtgcggcttatcgtatgttattcctaaatctgtatagagcagtctacttttaccttttttctaacacatgccaaattgtctctaattaaatgaagttttgagtagtgtttgttttgagtcatgttcatcaatgagatacataacatgggtttaccgcggtgctgcaggtattggttccaaacaccagaaggatggaccacagatgggcattatagatccctcgtatacatgcggcctcttgccatttgggcgatccagtatgcagtttctcctcccaaggctattcttgaggcccccaaagttaacctaatggaccgaatacatatctcccctcacatggtccgagcaattagcgagataagcattagaaaggtagcacccgacaatagatgtttccctagctctgccttccactgtgaatgctgatccgaaggtaaacatgcagctgctgagcaacttgcaaccttttttttggcttttttcggtttctccttgccccccccccccctttcaaggtccaggtgggggggctcaggagttcttttcttggatcagagggcttatccaaaccaccaccaaactcgtgactcaagagagttcatgttgtataattgtacagcaaactgttagtcacataatctttttttttcactttgaaagttttgtgctgttcacttgaatagagctagaaataaaagaactgggaagctggtgtctacggctaaccgtagggctgttggaagttaacgtcccatagctaggcaggtagcgttggaagttaatttaactttcgacggaatcacaagaagttgctgactacgacaccgtgttgccactcgtttggtctactcatcttttttttgttgctggaagttttgtgctgccaaagtaaccacatttcacaagaatagagctagaaataaaaggaaatctggtggtagttaggttttcatatcggcacttgtgttgggagttgggacatgtgcatgcaatccctatatcaaatattagctgtgttcattttgttgctcttggcgcccgagctttgccgcagcaccaatggcggaggaggagagaagaaacgcaagaaagtgcaagcagtatgtcgcacgtgttaatcaagctccaatgtataaaatgtattagtcgaacgaggttttaagctagcacgcacctggtgtctaatgtattgcacctcacttcctctctctctcatcttttcactcatctttgcaccttcttctgttagcaaacacaatatatgcagacgccctaataagcatgcatatttctgtgttacatgtatatatgaaccatttattgtaggttaaggttgctttgaatttttaaagtcaattctctcctgcttggagcac

SEQ ID NO: 4241 - DNA, 4889 bp, Zea Mays
gcgtagtctacgagccaggccggcgtcccccaaaatcaccggcaggttttcctcggttcccgttacgtatgtggacacctgaactcaacgcaaagaccacgaactgccgtcagagaagacgctagtaaaccgcccgccgccccaactcacgaatcggcaccgccacccaacggggctgaaggcccagccctccaccctccgggcaccagtgcgtgcgccgtcgacttcctctcaccttctcgctcctcgagaacgactccatagcgcaccacaccagcgcggcgacagacagcccgcgaggagaaaaggtagaagaggaggggcagggagagccatacatactcaccggttggattcggtccaatccaatccagccggccgcggcgtgaccagccgatccagagggcgccgaatcgatctgcgggggcggcgcggcgatgcggagggctaccgctggggatcccggtcgccgcgggggatgcgcatgagggcgtccggcccgcgaatcttctggtttggcgggagcccagggggcgcgcaccccggatcggcggcgcgcggcgcgggcaggatcgtgtcggtggggctgcggcagtgaccgcgggcgcgggggagggtgagaagcggcaactagcacttcgagtcgagcgggcgcgatggtgagcggccacatcttccactgccggaagaactcgtggccggcggaggagtacgtcggccggaccgcgctgcagctgttggatttcgatggcggggcgccgccggagcaggcgtggcggaggcggctcaacagccacgcgaacatcctcaaggagttcagtgtcactttcatggaggcaatgaggatgatgagccttggcctgagactatggtcgtatgttcgggaggaggcgtcacatggacggaaagcaccgatcgatccgttcacaaaagagcgctgtaaaccgtcagcttcccagggtgtgccacttggtgggatggggagcggaagcatttcgagaggtttcaggggagagttcaagaattggcacatcatacctggtctttgtgaaagttcgccggtcatggagaaccagttctctatatttgtatctcgagacgggggtaataagaaatactcatcagttttggctcctggacatcatgaaggtctgaagaaaaatagtgactctggaatttcttcatgggactggaatttaagtggtcaacactcgacctatcatgcattgttccctcgggcatggactgtttatgatggtgaacctgatccagaccttaaaatctcatgtcgtcaaatatcacctttcattcctcatgattacaaggatagcagtcttccaacatctgtatttgtgtatactctagtaaacactgggagagatcgtgcaaaagtaagcctgttaatgacatgggcgaattctattggaggtttttcgcataattcaggaggccactacaatgagcccttcattgcggaagatggagtatcaggagtgcttctgcatcacaaaacagccaaggataatccacctgtcacttttgctgttgctgcctgcgaaactcagaatgtgaatgtgacagtcttgccagtgtttggtctttctggagaaaaccatgtttccgcaaaggaaatgtggaacaccatgctacagtgctggtcccagtatgccttcttctccaggacagaaactctgtgcagctgtctcagcctcaacttgggttgagccacatggtagatgtactgttgtgtttgctctggcttggtcctcacctaaagtaaagtttcaaaaaggatgcacatataacaggaggtacacccaattctacggaacttctgagaaatcggctgttaatttggtacatgatgccttaacaaaatataaactttgggaagaagaaattgagaagtggcaaaaccccatactgaaggatgaaaggcttccagaatggtataagttcactctttttaatgagctttactttctggtagctggggggactgtttggacagatggtcaacccccagcaatcgatgagaaaaagagtcctggttttaatcaccagaagtcctcaaagaggggtactaaagacaccaatcagggatctgttaaagatagacatgtcaacctggcagtggagcaagtacctcatggtggttacatggctaatggtgatgatcacagtgtatccaagttcgcagcagttcatggatcagaaatgcaagaacaaatcaatggactcaagtcagaagagccaattccttacttgatttcaaaggatggccctgaacacgttggcaagtttttgtatctagaaggagtggaatacatcatgtggaacacatatgatgtgcatttctatgcatcttttgctctccttgatttgttcccaaaaatagagttgagtatccaacgtgattttgccaatgctgtgctgtatgaagatcggcgcaaagtaaaatttttggctgatggtacatccggaatccgcaaggttaaaggtgcagtgcctcatgacctcggaacgcatgatccgtggcatgaaatgaatgcatataacatacacgatacaagcaaatggaaagatttgaaccccaaatttgtgctccagatatacagagactttgctgctacaggtgatatgcaattcggtcgagatgtttggcctgcagtctgtgctgctatggactatatggatcagtttgaccgtgatggtgatggtctcattgagaatgatggatttcctgatcaaacctatgatgcttggactgttcatggaatcagtgcttactgtggttgtctttggcttgctgcacttcaagctgcagctacaatggctcatcgccttggggatcggcactttgctgagaagtacaagctcaagtttataaaagccaaagcagtatatgaggcgaagttatggaatgggtcatatttcaattacgacagcggcacaagtagcaacagtagatccattcaggctgatcagctggcaggacagtggtatgctgcctcgtcgggcttgcccccgcttttcgatgagcacaagataagaactgctctgcaaaaaatatttgaattcaacgtgatgaaggttaaaggaggacggatgggagctgtaaatggtatgactccaaagggaaaggtggacgagacatgcatgcaatcacgtgaaatctggactggtgttacatacgctgttgctgcaaatatgctgctccatggaatggagcatcaaggctttacgaccgcagaaggaatttttactgcgggatggtcagaagaaggatatgggtatgccctgtctcacacattgttgagcagaagtttcagattttttttttcagtggtgcagcttttcacattaccttagcagtgcatctcttatctcgttattaacttggcagtgcattccttatctcatttataacttagcagtgcatttcttatctttcttttttttgttgcttctattatatatattccatgagaaacctaggaatcagatgttctagtgcggcttatcgtatgttattcctaaatctgtatagagcagtctacttttaccttttttctaacacatgccaaattgtctctaattaaatgaagttttgagtagtgtttgttttgagtcatgttcatcaatgagatacataacatgggtttaccgcggtgctgcaggtattggttccaaacaccagaaggatggaccacagatgggcattatagatccctcgtatacatgcggcctcttgccatttgggcgatccagtatgcagtttctcctcccaaggctattcttgaggcccccaaagttaacctaatggaccgaatacatatctcccctcacatggtccgagcaattagcgagataagcattagaaaggtagcacccgacaatagatgtttccctagctctgccttccactgtgaatgctgatccgaaggtaaacatgcagctgctgagcaacttgcaaccttttttttggcttttttcggtttctccttgccccccccccccctttcaaggtccaggtgggggggctcaggagttcttttcttggatcagagggcttatccaaaccaccaccaaactcgtgactcaagagagttcatgttgtataattgtacagcaaactgttagtcacataatctttttttttcactttgaaagttttgtgctgttcacttgaatagagctagaaataaaagaactgggaagctggtgtctacggctaaccgtagggctgttggaagttaacgtcccatagctaggcaggtagcgttggaagttaatttaactttcgacggaatcacaagaagttgctgactacgacaccgtgttgccactcgtttggtctactcatcttttttttgttgctggaagttttgtgctgccaaagtaaccacatttcacaagaatagagctagaaataaaaggaaatctggtggtagttaggttttcatatcggcacttgtgttgggagttgggacatgtgcatgcaatccctatatcaaatattagctgtgttcattttgttgctcttggcgcccgagctttgccgcagcaccaatggcggaggaggagagaagaaacgcaagaaagtgcaagcagtatgtcgcacgtgttaatcaagctccaatgtataaaatgtattagtcgaacgaggttttaagctagcacgcacctggtgtctaatgtattgcacctcacttcctctctctctcatcttttcactcatctttgcaccttcttctgttagcaaacacaatatatgcagacgccctaataagcatgcatatttctgtgttacatgtatatatgaaccatttattgtaggttaaggttgctttgaatttttaaagtcaattctctcctgcttggagcac

SEQ ID NO: 4242 - DNA, 4531 bp, Zea Mays
gcgtagtctacgagccaggccggcgtcccccaaaatcaccggcaggttttcctcggttcccgttacgtatgtggacacctgaactcaacgcaaagaccacgaactgccgtcagagaagacgctagtaaaccgcccgccgccccaactcacgaatcggcaccgccacccaacggggctgaaggcccagccctccaccctccgggcaccagtgcgtgcgccgtcgacttcctctcaccttctcgctcctcgagaacgactccatagcgcaccacaccagcgcggcgacagacagcccgcgaggagaaaaggtagaagaggaggggcagggagagccatacatactcaccggttggattcggtccaatccaatccagccggccgcggcgtgaccagccgatccagagggcgccgaatcgatctgcgggggcggcgcggcgatgcggagggctaccgctggggatcccggtcgccgcgggggatgcgcatgagggcgtccggcccgcgaatcttctggtttggcgggagcccagggggcgcgcaccccggatcggcggcgcgcggcgcgggcaggatcgtgtcggtggggctgcggcagtgaccgcgggcgcgggggagggtgagaagcggcaactagcacttcgagtcgagcgggcgcgatggtgagcggccacatcttccactgccggaagaactcgtggccggcggaggagtacgtcggccggaccgcgctgcagctgttggatttcgatggcggggcgccgccggagcaggcgtggcggaggcggctcaacagccacgcgaacatcctcaaggagttcagtgtcactttcatggaggcaatgaggatgatgagccttggcctgagactatggtcgtatgttcgggaggaggcgtcacatggacggaaagcaccgatcgatccgttcacaaaagagcgctgtaaaccgtcagcttcccagggtgtgccacttggtgggatggggagcggaagcatttcgagaggtttcaggggagagttcaagaattggcacatcatacctggtctttgtgaaagttcgccggtcatggagaaccagttctctatatttgtatctcgagacgggggtaataagaaatactcatcagttttggctcctggacatcatgaaggtctgaagaaaaatagtgactctggaatttcttcatgggactggaatttaagtggtcaacactcgacctatcatgcattgttccctcgggcatggactgtttatgatggtgaacctgatccagaccttaaaatctcatgtcgtcaaatatcacctttcattcctcatgattacaaggatagcagtcttccaacatctgtatttgtgtatactctagtaaacactgggagagatcgtgcaaaagtaagcctgttaatgacatgggcgaattctattggaggtttttcgcataattcaggaggccactacaatgagcccttcattgcggaagatggagtatcaggagtgcttctgcatcacaaaacagccaaggataatccacctgtcacttttgctgttgctgcctgcgaaactcagaatgtgaatgtgacagtcttgccagtgtttggtctttctggagaaaaccatgtttccgcaaaggaaatgtggaacaccatgctacagaatggtcactttgatcgggaaaatttcagtgctggtcccagtatgccttcttctccaggacagaaactctgtgcagctgtctcagcctcaacttgggttgagccacatggtagatgtactgttgtgtttgctctggcttggtcctcacctaaagtaaagtttcaaaaaggatgcacatataacaggaggtacacccaattctacggaacttctgagaaatcggctgttaatttggtacatgatgccttaacaaaatataaactttgggaagaagaaattgagaagtggcaaaaccccatactgaaggatgaaaggcttccagaatggtataagttcactctttttaatgagctttactttctggtagctggggggactgtttggacagatggtcaacccccagcaatcgatgagaaaaagagtcctggttttaatcaccagaagtcctcaaagaggggtactaaagacaccaatcagggatctgttaaagatagacatgtcaacctggcagtggagcaagtacctcatggtggttacatggctaatggtgatgatcacagtgtatccaagttcgcagcagttcatggatcagaaatgcaagaacaaatcaatggactcaagtcagaagagccaattccttacttgatttcaaaggatggccctgaacacgttggcaagtttttgtatctagaaggagtggaatacatcatgtggaacacatatgatgtgcatttctatgcatcttttgctctccttgatttgttcccaaaaatagagttgagtatccaacgtgattttgccaatgctgtgctgtatgaagatcggcgcaaagtaaaatttttggctgatggtacatccggaatccgcaaggttaaaggtgcagtgcctcatgacctcggaacgcatgatccgtggcatgaaatgaatgcatataacatacacgatacaagcaaatggaaagatttgaaccccaaatttgtgctccagatatacagagactttgctgctacaggtgatatgcaattcggtcgagatgtttggcctgcagtctgtgctgctatggactatatggatcagtttgaccgtgatggtgatggtctcattgagaatgatggatttcctgatcaaacctatgatgcttggactgttcatggaatcagtgcttactgtggttgtctttggcttgctgcacttcaagctgcagctacaatggctcatcgccttggggatcggcactttgctgagaagtacaagctcaagtttataaaagccaaagcagtatatgaggcgaagttatggaatgggtcatatttcaattacgacagcggcacaagtagcaacagtagatccattcaggctgatcagctggcaggacagtggtatgctgcctcgtcgggcttgcccccgcttttcgatgagcacaagataagaactgctctgcaaaaaatatttgaattcaacgtgatgaaggttaaaggaggacggatgggagctgtaaatggtatgactccaaagggaaaggtggacgagacatgcatgcaatcacgtgaaatctggactggtgttacatacgctgttgctgcaaatatgctgctccatggaatggagcatcaaggctttacgaccgcagaaggaatttttactgcgggatggtcagaagaaggatatgggtattggttccaaacaccagaaggatggaccacagatgggcattatagatccctcgtatacatgcggcctcttgccatttgggcgatccagtatgcagtttctcctcccaaggctattcttgaggcccccaaagttaacctaatggaccgaatacatatctcccctcacatggtccgagcaattagcgagataagcattagaaaggtagcacccgacaatagatgtttccctagctctgccttccactgtgaatgctgatccgaaggtaaacatgcagctgctgagcaacttgcaaccttttttttggcttttttcggtttctccttgccccccccccccctttcaaggtccaggtgggggggctcaggagttcttttcttggatcagagggcttatccaaaccaccaccaaactcgtgactcaagagagttcatgttgtataattgtacagcaaactgttagtcacataatctttttttttcactttgaaagttttgtgctgttcacttgaatagagctagaaataaaagaactgggaagctggtgtctacggctaaccgtagggctgttggaagttaacgtcccatagctaggcaggtagcgttggaagttaatttaactttcgacggaatcacaagaagttgctgactacgacaccgtgttgccactcgtttggtctactcatcttttttttgttgctggaagttttgtgctgccaaagtaaccacatttcacaagaatagagctagaaataaaaggaaatctggtggtagttaggttttcatatcggcacttgtgttgggagttgggacatgtgcatgcaatccctatatcaaatattagctgtgttcattttgttgctcttggcgcccgagctttgccgcagcaccaatggcggaggaggagagaagaaacgcaagaaagtgcaagcagtatgtcgcacgtgttaatcaagctccaatgtataaaatgtattagtcgaacgaggttttaagctagcacgcacctggtgtctaatgtattgcacctcacttcctctctctctcatcttttcactcatctttgcaccttcttctgttagcaaacacaatatatgcagacgccctaataagcatgcatatttctgtgttacatgtatatatgaaccatttattgtaggttaaggttgctttgaatttttaaagtcaattctctcctgcttggagcac

SEQ ID NO: 4243 - DNA, 274 bp, Zea Mays
ggagaataatggcacttggggattcaggtgtttgtggagtggacttgactgacaaagtagtggacataattttccatgtatttgatgctaactgtgatggtaagctgagctcagaggagttcttgaggtcattacaaagaagagaaaatgacattcgccagccagcaacttctggttttctaggggtgatcacctgctggttgaactgtacaaagtgttctcttcaacaaatgctgccccagtagattcttttgatagtcgtgacactttgttc

SEQ ID NO: 4244 - DNA, 757 bp, Zea Mays
ggtctctctctcactcacaagtcacaactggcctgtcacctctgtgggttctggaagtcgaggaaatggcatgtccttgcaaggtctcttcctgggccatgaccccaaattggcaccgccattaaatgtttgaggattaccagggagacgacgccctgcagcttgattaacacccagatgactagcactcctgggtccacgagatccggccactcttgccaccgcagggtgaacgctcctccggtgcacgccgtcccaagttctagggagatgaatgagtacttcgctgccgaacagcgacggcaacagcaggatttcattgacaagtacaacttcgatcctgcaaacgactgccctctcccaggcaggtttgagtgggtgaagctagactgatggattcagagggacgagagagcagcaggcatggaatggaactcactccccgctccctccacaccaccccagcgttgtggcagaggcgcataccgtcgtgttagcttcgtttctgctgtaaaaaaaaacccttagtgttttatttagcatgtagccttaactggtcgtgtgttacagtacagaactgatgctgagttacaacaccctgatctgatccctcaactccaatgtaacccttaacagctcattctgtaaggaacctgtcaccctgttacctgttgctgaactaatgaagtagagctagataatgacgttttatcgtagttattattaataacttatcctctgtgatgttgcacctgaa

SEQ ID NO: 4245 - DNA, 770 bp, Zea Mays
tgccagttgcggctccagccatggcctgatgggagcaccggagcaccacaggagggaccataatacggaacagtagtaaagctgagcctctaaaatccctttgggccttccatgtatgtcagcctaaatagtaaccggatgatggaggattaccagggagacgacgccctgcagcttgattaacacccagatgactagcactcctgggtccacgagatccggccactcttgccaccgcagggtgaacgctcctccggtgcacgccgtcccaagttctagggagatgaatgagtacttcgctgccgaacagcgacggcaacagcaggatttcattgacaagtacaacttcgatcctgcaaacgactgccctctcccaggcaggtttgagtgggtgaagctagactgatggattcagagggacgagagagcagcaggcatggaatggaactcactccccgctccctccacaccaccccagcgttgtggcagaggcgcataccgtcgtgttagcttcgtttctgctgtaaaaaaaaacccttagtgttttatttagcatgtagccttaactggtcgtgtgttacagtacagaactgatgctgagttacaacaccctgatctgatccctcaactccaatgtaacccttaacagctcattctgtaaggaacctgtcaccctgttacctgttgctgaactaatgaagtagagctagataatgacgttttatcgtagttattattaataacttatcctctgtgatgttgcacctgaa

SEQ ID NO: 4246 - DNA, 702 bp, Zea Mays
gttgttttctctagcctttttatggcacctgaagctagatactgagaggaatggtagatttgcaggaccacaaatgatggattaccagggagacgacgccctgcagcttgattaacacccagatgactagcactcctgggtccacgagatccggccactcttgccaccgcagggtgaacgctcctccggtgcacgccgtcccaagttctagggagatgaatgagtacttcgctgccgaacagcgacggcaacagcaggatttcattgacaagtacaacttcgatcctgcaaacgactgccctctcccaggcaggtttgagtgggtgaagctagactgatggattcagagggacgagagagcagcaggcatggaatggaactcactccccgctccctccacaccaccccagcgttgtggcagaggcgcataccgtcgtgttagcttcgtttctgctgtaaaaaaaaacccttagtgttttatttagcatgtagccttaactggtcgtgtgttacagtacagaactgatgctgagttacaacaccctgatctgatccctcaactccaatgtaacccttaacagctcattctgtaaggaacctgtcaccctgttacctgttgctgaactaatgaagtagagctagataatgacgttttatcgtagttattattaataacttatcctctgtgatgttgcacctgaa

SEQ ID NO: 4247 - DNA, 3459 bp, Zea Mays
gcaccggccgcatgcatgtccaataaaacccgactcttcgtacgactacgaccgattctttccatctacccccacctactgcttgtaaatacaagcaacaccctggctggcacggttcaaaccaagctttctctacccaagtcctgcgccggccgccgcttcttctccttgcatccggttcaggatttccagcggcctcgactcccgatccggtctccgtaggagcgtcggtatcctcgtgtctccggcagtctttcgaacctcggttggtcccgattggcgagaaacccccgcgtcgaattggcggccaaggggcgcgggacgcatcattcgattcttggcggctgcttgcctgcttgtgcttgagcgcttaacagaacttcgcgagctgggctttctctaggtggaaagacaatttgatttggagatggggccggaaatgatagagcaggatggatggtaggaaaaggaaggggaaattcaggaattctctcaggcgtatggctatggagtgcctgtgctctggtgagcagttgaaggcgtcagatgagaccatgcggtcatctgattctacgatcacaaaggatttctcggccagtgggtactcttctcggaatggagagattgagcagtaccttgataatggcaacatagaggaagccgagttgtcgctccgggagggcatttgcctaaattatgaggaagcaagggcattgctaggaaggctagaatatcaacggggtcatgtagaggcagcactccgtgtctttgatgggatagacatatctgcattagttcctaagatgaaaatctcaattgctagaaaaacagaccgtcggaagactcattcacagtgggattccccaccaatgcccttgcatgctgtcagccttctcatggaggccatatatcttaaagcaagagcacttcatgatcttgggaaagataaagaagctgcacaagaatgtagaatgatattggatattgtggaagcagctgtacctgagggcttgccagcaggctttgggaaaggctgtaaattgaacgaaataatatgcaaggctgtagagttgctccctgagctgtggaaatcaggggggttttcacttgaaaccatttcttcatataggaggtcacttcttaataattggaatcttgatggagagacaatagcaaggatacaaaagaaatttgctgtttttctcctatatagtggttgtgaagcacgccctccaaatcttcattctcagttggacggttcatttgtacctcgcaacaatattgaagaggctatccttcttttgatgattcttttgaggaagtccaatctcaagaggattgagcaagatccctctgtgatgcatcaccttacttttgcactgtccatgtcaggacagctaattccactggctggacagtttgaagaattgttacctggtgtgttagacaaaaaagaatggttgtacagcgttgcattgtgttatttagcagaagaagatgatctgagtgccctgaatctactcaaaattatactaaaatctggagaggactccgttcaactcatagaactgcttctagcttcaaaggcttgcattgagatgagtattcatactgaaggtgctttttatgcaaggagagccattgcaaatatgcagggaggatgcaaaccaatggcaggacttgcaaacctattgcttggtgttgcactttctaatcaggctagaagtgcaatatctgatacagatagagcttcttggcagtgcgaagcactggaagcccttgggaatgctgaaaaaaatatacatgggaaagattctagggcattatacagtctcagccttgaaaatgctgtgcagaggaaattagaattagctgccttttatgcaaagaggctggtgaaacttgaggctggatcagagttgaggagttggctccttttagctcgaatacttagtgctcaaaagctgtttgctgatgctgaaacagttgttgatgctgctctagatcaaactgggaaatggtgtcaaggagatttattgcgaaccaaagccagaattcaggctgcacaggggcaatttagagaagcggttgaaacatacacccaacttcttgctatcattcaacttagaacgaaaagtttaactgctggagtttgcttgccaaagggcaacaaggatgataaaggcctggaaacagagacctggtatgatctagctctcttatacctaggtatggcacaatggagggatgcagaggtttgtgtattgaagataagatccatcagtccttattctgcattggcttggcatgctacaggaaaaatatatgaagcaaaaggtcttagaaaagaagctttgggagcttttttcagagccttagatcttgatcctaaacatgtcccaagtttaatatcaactgccactgttctacaacaacttggtgacaggccattgccttctatacggtgcttcctgactgatgcattacaactggatagaactaatcatgttgcgtggttcaatcttggccttctttacaaagaggaaggtggcaggtcagcagctgaggctgctgaatgcttccaagctgctgcttttcttaaagaaactgcaccttcagaacctttcagatgacatctacaggggctatagatcttagctagttgcatcaattaatggtgcagatattggtctctatccagcactaatgaaatggtacaccagataaccagcaaccgattgaattatatcagtcttcttgtctggatatgcccaagtatgaagggcaattgctggtatgtgttcttttcaaccaaccgagtaatgatgatacggaggcttcctatttcttagtgcgcctttatctttactgtctgtgtaccaaatttgttgagggttgtccatgccgatgttcaaccatgcagatcattataaaaaaaaactatgcagttaagtggagaatactgttcgtctaaaaaacttttagttatatgtagtgctggtttgatttttttccgtattatcaattagtttaaccacaagatctgaaaaatatttgatcctccaataatttttagctgtgatttaattctggcattttctcttgtttccagtttactatattatagcagtacaatttgtacatgtgtttaattttcgagtcactagggttttaaccatatgatattatttttcactcatttgttgtccaattggtttgagttggtctatacaggtaaacatctggaaagttcaaccatggatatattgagttgtaatgtatgtagctatatggaacatggagtcagtaagtaggatactagaaatgtatacgtataccattgttctcaatgacatctactagggttttatgtgtttttttttgacatctctgcaaataaggcaagatacccagctttgttccttggatttttggtagatgcattgttatcttgtgttt

SEQ ID NO: 4248 - DNA, 4252 bp, Zea Mays
gcaccggccgcatgcatgtccaataaaacccgactcttcgtacgactacgaccgattctttccatctacccccacctactgcttgtaaatacaagcaacaccctggctggcacggttcaaaccaagctttctctacccaagtcctgcgccggccgccgcttcttctccttgcatccggttcaggatttccagcggcctcgactcccgatccggtctccgtaggagcgtcggtatcctcgtgtctccggcagtctttcgaacctcggttggtcccgattggcgagaaacccccgcgtcgaattggcggccaaggggcgcgggacgcatcattcgattcttggcggctgcttgcctgcttgtgcttgagcgcttaacagaacttcgcgagctgggctttctctaggtggaaagacaatttgatttggagatggggccggaaatgatagagcaggatggatggtaggaaaaggaaggggaaattcaggaattctctcaggcgtatggctatggagtgcctgtgctctggtgagcagttgaaggcgtcagatgagaccatgcggtcatctgattctacgatcacaaaggatttctcggccagtgggtactcttctcggaatggagagattgagcagtaccttgataatggcaacatagaggaagccgagttgtcgctccgggagggcatttgcctaaattatgaggaagcaagggcattgctaggaaggctagaatatcaacggggtcatgtagaggcagcactccgtgtctttgatgggatagacatatctgcattagttcctaagatgaaaatctcaattgctagaaaaacagaccgtcggaagactcattcacagtgggattccccaccaatgcccttgcatgctgtcagccttctcatggaggccatatatcttaaagcaagagcacttcatgatcttgggaaagataaagaagctgcacaagaatgtagaatgatattggatattgtggaagcagctgtacctgagggcttgccagcaggctttgggaaaggctgtaaattgaacgaaataatatgcaaggctgtagagttgctccctgagctgtggaaatcaggggggttttcacttgaaaccatttcttcatataggaggtcacttcttaataattggaatcttgatggagagacaatagcaaggatacaaaagaaatttgctgtttttctcctatatagtggttgtgaagcacgccctccaaatcttcattctcagttggacggttcatttgtacctcgcaacaatattgaagaggctatccttcttttgatgattcttttgaggaagtccaatctcaagaggattgagcaagatccctctgtgatgcatcaccttacttttgcactgtccatgtcaggacagctaattccactggctggacagtttgaagaattgttacctggtgtgttagacaaaaaagaatggttgtacagcgttgcattgtgttatttagcagaagaagatgatctgagtgccctgaatctactcaaaattatactaaaatctggagaggactccgttcaactcatagaactgcttctagcttcaaaggcttgcattgagatgagtattcatactgaaggtgctttttatgcaaggagagccattgcaaatatgcagggaggatgcaaaccaatggcaggacttgcaaacctattgcttggtgttgcactttctaatcaggctagaagtgcaatatctgatacagatagagcttcttggcagtgcgaagcactggaagcccttgggaatgctgaaaaaaatatacatgggaaagattctagggcattatacagtctcagccttgaaaatgctgtgcagaggaaattagaattagctgccttttatgcaaagaggctggtgaaacttgaggctggatcagagttgaggagttggctccttttagctcgaatacttagtgctcaaaagctgtttgctgatgctgaaacagttgttgatgctgctctagatcaaactgggaaatggtgtcaaggagatttattgcgaaccaaagccagaattcaggctgcacaggggcaatttagagaagcggttgaaacatacacccaacttcttgctatcattcaacttagaacgaaaagtttaactgctggagtttgcttgccaaagggcaacaaggatgataaaggcctggaaacagagacctggtatgatctagctctcttatacctaggtatggcacaatggagggatgcagaggtttgtgtattgaagataagatccatcagtccttattctgcattggcttggcatgctacaggaaaaatatatgaagcaaaaggtcttagaaaagaagctttgggagcttttttcagagccttagatcttgatcctaaacatgtcccaagtttaatatcaactgccactgttctacaacaacttggtgacaggccattgccttctatacggtgcttcctgactgatgcattacaactggatagaactaatcatgttgcgtggttcaatcttggccttctttacaaagaggaaggtggcaggtcagcagctgaggctgctgaatgcttccaagctgctgcttttcttaaagaaactgcaccttcagaacctttcagatgacatctacaggggctatagatgtaagctgctgtatgtatttttgatatatttcactgatgaaatagtggattacagagttctaaaaatgatcttcttgggagatcacagcattggaaactgttggaaaaaatgtttaacaattcaatctatagttccaattgttgcctgtatagcaacaagaaagacgatgatcttcgccttgtgtaggaacagtgcttactgtgatatatatatatagatagatgaccagtacattgtgtatcttgagtaaaatggtttcacatataaggtatcagactactctctccgtttgttaagaatttagtcaagatataaaatatgttctggggtccttcagaattcagttcagtatttactatcaactgtaaccttcatgcatatcaatcatggattacaagttattgatggattgcctatttcctgacatctgatgaaaaaaactgaccctaattgaccttgtgatcggacatggtagagtgaaatacaccccccctccccccgttccaaattataagttggtatggcttttctagatacataataaaagttatatatctaggcctagcatatatttatatacataataaaagctatgtacctagaaatgctggaacaacttgtaatttttataagagagagtacttttttatggcagtcattttgagtccagaatgcacatgttttgaaccatcaatggtgtactatcatctcttgtgacagtactatgtaatttctcttgaggccttcctccatgtaaggcccttcatttgctgtcaacttgtcatgttgcagcttagctagttgcatcaattaatggtgcagatattggtctctatccagcactaatgaaatggtacaccagataaccagcaaccgattgaattatatcagtcttcttgtctggatatgcccaagtatgaagggcaattgctggtatgtgttcttttcaaccaaccgagtaatgatgatacggaggcttcctatttcttagtgcgcctttatctttactgtctgtgtaccaaatttgttgagggttgtccatgccgatgttcaaccatgcagatcattataaaaaaaaactatgcagttaagtggagaatactgttcgtctaaaaaacttttagttatatgtagtgctggtttgatttttttccgtattatcaattagtttaaccacaagatctgaaaaatatttgatcctccaataatttttagctgtgatttaattctggcattttctcttgtttccagtttactatattatagcagtacaatttgtacatgtgtttaattttcgagtcactagggttttaaccatatgatattatttttcactcatttgttgtccaattggtttgagttggtctatacaggtaaacatctggaaagttcaaccatggatatattgagttgtaatgtatgtagctatatggaacatggagtcagtaagtaggatactagaaatgtatacgtataccattgttctcaatgacatctactagggttttatgtgtttttttttgacatctctgcaaataaggcaagatacccagctttgttccttggatttttggtagatgcattgttatcttgtgttt

SEQ ID NO: 4249 - DNA, 2989 bp, Zea Mays
gcaccggccgcatgcatgtccaataaaacccgactcttcgtacgactacgaccgattctttccatctacccccacctactgcttgtaaatacaagcaacaccctggctggcacggttcaaaccaagctttctctacccaagtcctgcgccggccgccgcttcttctccttgcatccggttcaggatttccagcggcctcgactcccgatccggtctccgtaggagcgtcggtatcctcgtgtctccggcagtctttcgaacctcggttggtcccgattggcgagaaacccccgcgtcgaattggcggccaaggggcgcgggacgcatcattcgattcttggcggctgcttgcctgcttgtgcttgagcgcttaacagaacttcgcgagctgggctttctctaggtggaaagacaatttgatttggagatggggccggaaatgatagagcaggatggatggtaggaaaaggaaggggaaattcaggaattctctcaggcgtatggctatggagtgcctgtgctctggtgagcagttgaaggcgtcagatgagaccatgcggtcatctgattctacgatcacaaaggatttctcggccagtgggtactcttctcggaatggagagattgagcagtaccttgataatggcaacatagaggaagccgagttgtcgctccgggagggcatttgcctaaattatgaggaagcaagggcattgctaggaaggctagaatatcaacggggtcatgtagaggcagcactccgtgtctttgatgggatagacatatctgcattagttcctaagatgaaaatctcaattgctagaaaaacagaccgtcggaagactcattcacagtgggattccccaccaatgcccttgcatgctgtcagccttctcatggaggccatatatcttaaagcaagagcacttcatgatcttgggaaagataaagaagctgcacaagaatgtagaatgatattggatattgtggaagcagctgtacctgagggcttgccagcaggctttgggaaaggctgtaaattgaacgaaataatatgcaaggctgtagagttgctccctgagctgtggaaatcaggggggttttcacttgaaaccatttcttcatataggaggtcacttcttaataattggaatcttgatggagagacaatagcaaggatacaaaagaaatttgctgtttttctcctatatagtggttgtgaagcacgccctccaaatcttcattctcagttggacggttcatttgtacctcgcaacaatattgaagaggctatccttcttttgatgattcttttgaggaagtccaatctcaagaggattgagcaagatccctctgtgatgcatcaccttacttttgcactgtccatgtcaggacagctaattccactggctggacagtttgaagaattgttacctggtgtgttagacaaaaaagaatggttgtacagcgttgcattgtgttatttagcagaagaagatgatctgagtgccctgaatctactcaaaattatactaaaatctggagaggactccgttcaactcatagaactgcttctagcttcaaaggcttgcattgagatgagtattcatactgaaggtgctttttatgcaaggagagccattgcaaatatgcagggaggatgcaaaccaatggcaggacttgcaaacctattgcttggtgttgcactttctaatcaggctagaagtgcaatatctgatacagatagagcttcttggcagtgcgaagcactggaagcccttgggaatgctgaaaaaaatatacatgggaaagattctagggcattatacagtctcagccttgaaaatgctgtgcagaggaaattagaattagctgccttttatgcaaagaggctggtgaaacttgaggctggatcagagttgaggagttggctccttttagctcgaatacttagtgctcaaaagctgtttgctgatgctgaaacagttgttgatgctgctctagatcaaactgggaaatggtgtcaaggagatttattgcgaaccaaagccagaattcaggctgcacaggggcaatttagagaagcggttgaaacatacacccaacttcttgctatcattcaacttagaacgaaaagtttaactgctggagtttgcttgccaaagggcaacaaggatgataaaggcctggaaacagagacctggtatgatctagctctcttatacctaggtatggcacaatggagggatgcagaggtttgtgtattgaagataagatccatcagtccttattctgcattggcttggcatgctacaggaaaaatatatgaagcaaaaggtcttagaaaagaagctttgggagcttttttcagagccttagatcttgatcctaaacatgtcccaagtttaatatcaactgccactgttctacaacaacttggtgacaggccattgccttctatacggtgcttcctgactgatgcattacaactggatagaactaatcatgttgcgtggttcaatcttggccttctttacaaagaggaaggtggcaggtcagcagctgaggctgctgaatgcttccaagctgctgcttttcttaaagaaactgcaccttcagaacctttcagatgacatctacaggggctatagatatattggtctctatccagcactaatgaaatggtacaccagataaccagcaaccgattgaattatatcagtcttcttgtctggatatgcccaagtatgaagggcaattgctggtaaacatctggaaagttcaaccatggatatattgagttgtaatgtatgtagctatatggaacatggagtcagtaagtaggatactagaaatgtatacgtataccattgttctcaatgacatctactagggttttatgtgtttttttttgacatctctgcaaataaggcaagatacccagctttgttccttggatttttggtagatgcattgttatcttgtgttt

SEQ ID NO: 4250 - DNA, 3932 bp, Zea Mays
cccacctactgcttgtaaatacaagcaacaccctggctggcacggttcaaaccaagctttctctacccaagtcctgcgccggccgccgcttcttctccttgcatccggttcaggatttccagcggcctcgactcccgatccggtctccgtaggagcgtcggtatcctcgtgtctccggcagtctttcgaacctcggttggtcccgattggcgagaaacccccgcgtcgaattggcggccaaggggcgcgggacgcatcattcgattcttggcggctgcttgcctgcttgtgcttgagcgcttaacagaacttcgcgagctgggctttctctaggtggaaagacaatttgatttggagatggggccggaaatgatagagcaggatggatggtaggaaaaggaaggggaaattcaggaattctctcaggcgtatggctatggagtgcctgtgctctggtgagcagttgaaggcgtcagatgagaccatgcggtcatctgattctacgatcacaaaggatttctcggccagtgggtactcttctcggaatggagagattgagcagtaccttgataatggcaacatagaggaagccgagttgtcgctccgggagggcatttgcctaaattatgagaagctgcacaagaatgtagaatgatattggatattgtggaagcagctgtacctgagggcttgccagcaggctttgggaaaggctgtaaattgaacgaaataatatgcaaggctgtagagttgctccctgagctgtggaaatcaggggggttttcacttgaaaccatttcttcatataggaggtcacttcttaataattggaatcttgatggagagacaatagcaaggatacaaaagaaatttgctgtttttctcctatatagtggttgtgaagcacgccctccaaatcttcattctcagttggacggttcatttgtacctcgcaacaatattgaagaggctatccttcttttgatgattcttttgaggaagtccaatctcaagaggattgagcaagatccctctgtgatgcatcaccttacttttgcactgtccatgtcaggacagctaattccactggctggacagtttgaagaattgttacctggtgtgttagacaaaaaagaatggttgtacagcgttgcattgtgttatttagcagaagaagatgatctgagtgccctgaatctactcaaaattatactaaaatctggagaggactccgttcaactcatagaactgcttctagcttcaaaggcttgcattgagatgagtattcatactgaaggtgctttttatgcaaggagagccattgcaaatatgcagggaggatgcaaaccaatggcaggacttgcaaacctattgcttggtgttgcactttctaatcaggctagaagtgcaatatctgatacagatagagcttcttggcagtgcgaagcactggaagcccttgggaatgctgaaaaaaatatacatgggaaagattctagggcattatacagtctcagccttgaaaatgctgtgcagaggaaattagaattagctgccttttatgcaaagaggctggtgaaacttgaggctggatcagagttgaggagttggctccttttagctcgaatacttagtgctcaaaagctgtttgctgatgctgaaacagttgttgatgctgctctagatcaaactgggaaatggtgtcaaggagatttattgcgaaccaaagccagaattcaggctgcacaggggcaatttagagaagcggttgaaacatacacccaacttcttgctatcattcaacttagaacgaaaagtttaactgctggagtttgcttgccaaagggcaacaaggatgataaaggcctggaaacagagacctggtatgatctagctctcttatacctaggtatggcacaatggagggatgcagaggtttgtgtattgaagataagatccatcagtccttattctgcattggcttggcatgctacaggaaaaatatatgaagcaaaaggtcttagaaaagaagctttgggagcttttttcagagccttagatcttgatcctaaacatgtcccaagtttaatatcaactgccactgttctacaacaacttggtgacaggccattgccttctatacggtgcttcctgactgatgcattacaactggatagaactaatcatgttgcgtggttcaatcttggccttctttacaaagaggaaggtggcaggtcagcagctgaggctgctgaatgcttccaagctgctgcttttcttaaagaaactgcaccttcagaacctttcagatgacatctacaggggctatagatgtaagctgctgtatgtatttttgatatatttcactgatgaaatagtggattacagagttctaaaaatgatcttcttgggagatcacagcattggaaactgttggaaaaaatgtttaacaattcaatctatagttccaattgttgcctgtatagcaacaagaaagacgatgatcttcgccttgtgtaggaacagtgcttactgtgatatatatatatagatagatgaccagtacattgtgtatcttgagtaaaatggtttcacatataaggtatcagactactctctccgtttgttaagaatttagtcaagatataaaatatgttctggggtccttcagaattcagttcagtatttactatcaactgtaaccttcatgcatatcaatcatggattacaagttattgatggattgcctatttcctgacatctgatgaaaaaaactgaccctaattgaccttgtgatcggacatggtagagtgaaatacaccccccctccccccgttccaaattataagttggtatggcttttctagatacataataaaagttatatatctaggcctagcatatatttatatacataataaaagctatgtacctagaaatgctggaacaacttgtaatttttataagagagagtacttttttatggcagtcattttgagtccagaatgcacatgttttgaaccatcaatggtgtactatcatctcttgtgacagtactatgtaatttctcttgaggccttcctccatgtaaggcccttcatttgctgtcaacttgtcatgttgcagcttagctagttgcatcaattaatggtgcagatattggtctctatccagcactaatgaaatggtacaccagataaccagcaaccgattgaattatatcagtcttcttgtctggatatgcccaagtatgaagggcaattgctggtatgtgttcttttcaaccaaccgagtaatgatgatacggaggcttcctatttcttagtgcgcctttatctttactgtctgtgtaccaaatttgttgagggttgtccatgccgatgttcaaccatgcagatcattataaaaaaaaactatgcagttaagtggagaatactgttcgtctaaaaaacttttagttatatgtagtgctggtttgatttttttccgtattatcaattagtttaaccacaagatctgaaaaatatttgatcctccaataatttttagctgtgatttaattctggcattttctcttgtttccagtttactatattatagcagtacaatttgtacatgtgtttaattttcgagtcactagggttttaaccatatgatattatttttcactcatttgttgtccaattggtttgagttggtctatacaggtaaacatctggaaagttcaaccatggatatattgagttgtaatgtatgtagctatatggaacatggagtcagtaagtaggatactagaaatgtatacgtataccattgttctcaatgacatctactagggttttatgtgtttttttttgacatctctgcaaataaggcaagatacccagctttgttccttggatttttggtagatgcattgttatcttgtgttt

SEQ ID NO: 4251 - DNA, 2744 bp, Zea Mays
cccacctactgcttgtaaatacaagcaacaccctggctggcacggttcaaaccaagctttctctacccaagtcctgcgccggccgccgcttcttctccttgcatccggttcaggatttccagcggcctcgactcccgatccggtctccgtaggagcgtcggtatcctcgtgtctccggcagtctttcgaacctcggttggtcccgattggcgagaaacccccgcgtcgaattggcggccaaggggcgcgggacgcatcattcgattcttggcggctgcttgcctgcttgtgcttgagcgcttaacagaacttcgcgagctgggctttctctaggtggaaagacaatttgatttggagatggggccggaaatgatagagcaggatggatggtaggaaaaggaaggggaaattcaggaattctctcaggcgtatggctatggagtgcctgtgctctggtgagcagttgaaggcgtcagatgagaccatgcggtcatctgattctacgatcacaaaggatttctcggccagtgggtactcttctcggaatggagagattgagcagtaccttgataatggcaacatagaggaagccgagttgtcgctccgggagggcatttgcctaaattatgaggaagcaagggcattgctaggaaggctagaatatcaacggggtcatgtagaggcagcactccgtgtctttgatgggatagacatatctgcattagttcctaagatgaaaatctcaattgctagaaaaacagaccgtcggaagactcattcacagtgggattccccaccaatgcccttgcatgctgtcagccttctcatggaggccatatatcttaaagcaagagcacttcatgatcttgggaaagataaagaagctgcacaagaatgtagaatgatattggatattgtggaagcagctgtacctgagggcttgccagcaggctttgggaaaggctgtaaattgaacgaaataatatgcaaggctgtagagttgctccctgagctgtggaaatcaggggggttttcacttgaaaccatttcttcatataggaggtcacttcttaataattggaatcttgatggagagacaatagcaaggatacaaaagaaatttgctgtttttctcctatatagtggttgtgaagcacgccctccaaatcttcattctcagttggacggttcatttgtacctcgcaacaatattgaagaggctatccttcttttgatgattcttttgaggaagtccaatctcaagaggattgagcaagatccctctgtgatgcatcaccttacttttgcactgtccatgtcaggacagctaattccactggctggacagtttgaagaattgttacctggtgtgttagacaaaaaagaatggttgtacagcgttgcattgtgttatttagcagaagaagatgatctgagtgccctgaatctactcaaaattatactaaaatctggagaggactccgttcaactcatagaactgcttctagcttcaaaggcttgcattgagatgagtattcatactgaaggtgctttttatgcaaggagagccattgcaaatatgcagggaggatgcaaaccaatggcaggacttgcaaacctattgcttggtgttgcactttctaatcaggctagaagtgcaatatctgatacagatagagcttcttggcagtgcgaagcactggaagcccttgggaatgctgaaaaaaatatacatgggaaagattctagggcattatacagtctcagccttgaaaatgctgtgcagaggaaattagaattagctgccttttatgcaaagaggctggtgaaacttgaggctggatcagagttgaggagttggctccttttagctcgaatacttagtgctcaaaagctgtttgctgatgctgaaacagttgttgatgctgctctagatcaaactgggaaatggtgtcaaggagatttattgcgaaccaaagccagaattcaggctgcacaggggcaatttagagaagcggttgaaacatacacccaacttcttgctatcattcaacttagaacgaaaagtttaactgctggagtttgcttgccaaaggtatggcacaatggagggatgcagaggtttgtgtattgaagataagatccatcagtccttattctgcattggcttggcatgctacaggaaaaatatatgaagcaaaaggtcttagaaaagaagctttgggagcttttttcagagccttagatcttgatcctaaacatgtcccaagtttaatatcaactgccactgttctacaacaacttggtgacaggccattgccttctatacggtgcttcctgactgatgcattacaactggatagaactaatcatgttgcgtggttcaatcttggccttctttacaaagaggaaggtggcaggtcagcagctgaggctgctgaatgcttccaagctgctgcttttcttaaagaaactgcaccttcagaacctttcagatgacatctacaggggctatagatgtaaacatctggaaagttcaaccatggatatattgagttgtaatgtatgtagctatatggaacatggagtcagtaagtaggatactagaaatgtatacgtataccattgttctcaatgacatctactagggttttatgtgtttttttttgacatctctgcaaataaggcaagatacccagctttgttccttggatttttggtagatgcattgttatcttgtgttt

SEQ ID NO: 4252 - DNA, 2727 bp, Zea Mays
ctttcctcccccctcccctccccccctctccctgtccggttttaaagacgcggagagattgtaaagtctaaatcttgcattcacttggggaattggataggtagggagtggataggctttgtcggtaggtcctttttccggggagaattcgcctgagttccttggaataaaagaagatttgcgatccttaagcctcacgttccttgatctgctggtgtggaagttgatcttgatcatgttcccgttcgtcgtcttcatggacaatttgatttggagatggggccggaaatgatagagcaggatggatggtaggaaaaggaaggggaaattcaggaattctctcaggcgtatggctatggagtgcctgtgctctggtgagcagttgaaggcgtcagatgagaccatgcggtcatctgattctacgatcacaaaggatttctcggccagtgggtactcttctcggaatggagagattgagcagtaccttgataatggcaacatagaggaagccgagttgtcgctccgggagggcatttgcctaaattatgaggaagcaagggcattgctaggaaggctagaatatcaacggggtcatgtagaggcagcactccgtgtctttgatgggatagacatatctgcattagttcctaagatgaaaatctcaattgctagaaaaacagaccgtcggaagactcattcacagtgggattccccaccaatgcccttgcatgctgtcagccttctcatggaggccatatatcttaaagcaagagcacttcatgatcttgggaaagataaagaagctgcacaagaatgtagaatgatattggatattgtggaagcagctgtacctgagggcttgccagcaggctttgggaaaggctgtaaattgaacgaaataatatgcaaggctgtagagttgctccctgagctgtggaaatcaggggggttttcacttgaaaccatttcttcatataggaggtcacttcttaataattggaatcttgatggagagacaatagcaaggatacaaaagaaatttgctgtttttctcctatatagtggttgtgaagcacgccctccaaatcttcattctcagttggacggttcatttgtacctcgcaacaatattgaagaggctatccttcttttgatgattcttttgaggaagtccaatctcaagaggattgagcaagatccctctgtgatgcatcaccttacttttgcactgtccatgtcaggacagctaattccactggctggacagtttgaagaattgttacctggtgtgttagacaaaaaagaatggttgtacagcgttgcattgtgttatttagcagaagaagatgatctgagtgccctgaatctactcaaaattatactaaaatctggagaggactccgttcaactcatagaactgcttctagcttcaaaggcttgcattgagatgagtattcatactgaaggtgctttttatgcaaggagagccattgcaaatatgcagggaggatgcaaaccaatggcaggacttgcaaacctattgcttggtgttgcactttctaatcaggctagaagtgcaatatctgatacagatagagcttcttggcagtgcgaagcactggaagcccttgggaatgctgaaaaaaatatacatgggaaagattctagggcattatacagtctcagccttgaaaatgctgtgcagaggaaattagaattagctgccttttatgcaaagaggctggtgaaacttgaggctggatcagagttgaggagttggctccttttagctcgaatacttagtgctcaaaagctgtttgctgatgctgaaacagttgttgatgctgctctagatcaaactgggaaatggtgtcaaggagatttattgcgaaccaaagccagaattcaggctgcacaggggcaatttagagaagcggttgaaacatacacccaacttcttgctatcattcaacttagaacgaaaagtttaactgctggagtttgcttgccaaagggcaacaaggatgataaaggcctggaaacagagacctggtatgatctagctctcttatacctaggtatggcacaatggagggatgcagaggtttgtgtattgaagataagatccatcagtccttattctgcattggcttggcatgctacaggaaaaatatatgaagcaaaaggtcttagaaaagaagctttgggagcttttttcagagccttagatcttgatcctaaacatgtcccaagtttaatatcaactgccactgttctacaacaacttggtgacaggccattgccttctatacggtgcttcctgactgatgcattacaactggatagaactaatcatgttgcgtggttcaatcttggccttctttacaaagaggaaggtggcaggtcagcagctgaggctgctgaatgcttccaagctgctgcttttcttaaagaaactgcaccttcagaacctttcagatgacatctacaggggctatagatgtaaacatctggaaagttcaaccatggatatattgagttgtaatgtatgtagctatatggaacatggagtcagtaagtaggatactagaaatgtatacgtataccattgttctcaatgacatctactagggttttatgtgtttttttttgacatctctgcaaataaggcaagatacccagctttgttccttggatttttggtagatgcattgttatcttgtgttt

SEQ ID NO: 4253 - DNA, 2839 bp, Zea Mays
ccctgtccggttttaaagacgcggagagattgtaaagtctaaatcttgcattcacttggggaattggataggtagggagtggataggctttgtcggtaggtcctttttccggggagaattcgcctgagttccttggaataaaagaagatttgcgatccttaagcctcacgttccttgatctgctggtgtggaagttgatcttgatcatgttcccgttcgtcgtcttcatggacaatttgatttggagatggggccggaaatgatagagcaggatggatggtaggaaaaggaaggggaaattcaggaattctctcaggcgtatggctatggagtgcctgtgctctggtgagcagttgaaggcgtcagatgagaccatgcggtcatctgattctacgatcacaaaggatttctcggccagtgggtactcttctcggaatggagagattgagcagtaccttgataatggcaacatagaggaagccgagttgtcgctccgggagggcatttgcctaaattatgaggaagcaagggcattgctaggaaggctagaatatcaacggggtcatgtagaggcagcactccgtgtctttgatgggatagacatatctgcattagttcctaagatgaaaatctcaattgctagaaaaacagaccgtcggaagactcattcacagtgggattccccaccaatgcccttgcatgctgtcagccttctcatggaggccatatatcttaaagcaagagcacttcatgatcttgggaaagataaagaagctgcacaagaatgtagaatgatattggatattgtggaagcagctgtacctgagggcttgccagcaggctttgggaaaggctgtaaattgaacgaaataatatgcaaggctgtagagttgctccctgagctgtggaaatcaggggggttttcacttgaaaccatttcttcatataggaggtcacttcttaataattggaatcttgatggagagacaatagcaaggatacaaaagaaatttgctgtttttctcctatatagtggttgtgaagcacgccctccaaatcttcattctcagttggacggttcatttgtacctcgcaacaatattgaagaggctatccttcttttgatgattcttttgaggaagtccaatctcaagaggattgagcaagatccctctgtgatgcatcaccttacttttgcactgtccatgtcaggacagctaattccactggctggacagtttgaagaattgttacctggtgtgttagacaaaaaagaatggttgtacagcgttgcattgtgttatttagcagaagaagatgatctgagtgccctgaatctactcaaaattatactaaaatctggagaggactccgttcaactcatagaactgcttctagcttcaaaggcttgcattgagatgagtattcatactgaaggtgctttttatgcaaggagagccattgcaaatatgcagggaggatgcaaaccaatggcaggacttgcaaacctattgcttggtgttgcactttctaatcaggctagaagtgcaatatctgatacagatagagcttcttggcagtgcgaagcactggaagcccttgggaatgctgaaaaaaatatacatgggaaagattctagggcattatacagtctcagccttgaaaatgctgtgcagaggaaattagaattagctgccttttatgcaaagaggctggtgaaacttgaggctggatcagagttgaggagttggctccttttagctcgaatacttagtgctcaaaagctgtttgctgatgctgaaacagttgttgatgctgctctagatcaaactgggaaatggtgtcaaggagatttattgcgaaccaaagccagaattcaggctgcacaggggcaatttagagaagcggttgaaacatacacccaacttcttgctatcattcaacttagaacgaaaagtttaactgctggagtttgcttgccaaagggcaacaaggatgataaaggcctggaaacagagacctggtatgatctagctctcttatacctaggtatggcacaatggagggatgcagaggtttgtgtattgaagataagatccatcagtccttattctgcattggcttggcatgctacaggaaaaatatatgaagcaaaaggtcttagaaaagaagctttgggagcttttttcagagccttagatcttgatcctaaacatgtcccaagtttaatatcaactgccactgttctacaacaacttggtgacaggccattgccttctatacggtgcttcctgactgatgcattacaactggatagaactaatcatgttgcgtggttcaatcttggccttctttacaaagaggaaggtggcaggtcagcagctgaggctgctgaatgcttccaagctgctgcttttcttaaagaaactgcaccttcagaacctttcagatgacatctacaggggctatagatcttagctagttgcatcaattaatggtgcagatattggtctctatccagcactaatgaaatggtacaccagataaccagcaaccgattgaattatatcagtcttcttgtctggatatgcccaagtatgaagggcaattgctggtaaacatctggaaagttcaaccatggatatattgagttgtaatgtatgtagctatatggaacatggagtcagtaagtaggatactagaaatgtatacgtataccattgttctcaatgacatctactagggttttatgtgtttttttttgacatctctgcaaataaggcaagatacccagctttgttccttggatttttggtagatgcattgttatcttgtgttt

SEQ ID NO: 4254 - DNA, 3896 bp, Zea Mays
atgaagcgggcgatcgtgagtgccggcgagggtggtgacacgcgagggcctgggggaaacgcccctggtgctagtgacggtggagaaagaagccctagtggatcacgaggtgaggagaaactctatcaaacatggtggatgaaagcgcatggagagtgggggaaagaaagcaaaaaagagaggaatctgtgggctaacatgtatgacgagaagatttgggatgtcgagatcggccctgagatcattgacgaggcgctccatcctgccaccgtaggccgtggcatcatcgagctcgatgtgtggcctgcacccagtcatgagcagattgtgcggcttgagaccccggtgtcggagagggcggacaaggatgagggcagggcacgtaacggagggagagagagcagcagttgcagccgccactacctcctctccagcttcgcgtccactcccctcaaaaccctaaacgcgctcaggaccctagttgtcatgtcgtaccgcggagggcgcgggggcggcgggcccaactcgcaccgcgggcgcgggcggggcggcggcggtggggcgggacgccgcggcggcggcgggggacgcggggagcagaggtggtgggacccggagtggcgagccgagcgcctccggcagatgcatggggaggtggaaaaggtcgatgagaatgaatggtggaacaagattgggcaattaagagaagggtcccagcaggagctagtagtcaagcggaattttggacgggatggacaaaatatacttgcaaacatggctcagagacaaggaatttacttatagtaatgcatacaacaaagggaagacacttgttttcagcaaggtacccttacctgattatcgagcagatctggacgacaggcatggatcaacacaaaaggagattaagatgtctaatcagacagaggcgcgagtcgaagaccttttgtccaggtcaaagtggaacaacaattctgcaagcacatcaactgtctcaacgagacaaattttccctggcgcatcctcgtctgtagttgaaccagcagcaccaattgataaagaaaagctcagttcccagcttagggagttgcagaattcaaggaagacgacagcaagtgctagatcaatgcaatcttttagggagaaattacctgcattcagcatgagagaggggtttctgaaagcagtggcagccaatcaggttctggtcatttctggcgagacaggctgcggcaaaacaactcagcttccacagttcattctagaagaagaaataaacagcctccgcggtgctgattgcaacataatttgtactcagccccgccgtatatctgccatttcagtagcagcaagagtatctgctgagagaggtgaagaactcggcgaggctgttggataccagattcgccttgaatcaaaacggtctgcacaaacacggttgctgttctgcactactggagttttgcttagaagactggttcaagagcctgacttaattggggtgagtcatttactagttgacgaaattcatgaacgcggcatgaatgaagattttctcatcataatactgcgtgaccttctaccaagacgtccagatcttcgccttgtactgatgagtgcaactataaatgctgaactattttccatgtactttggagatgctccagtgatgcacatcccggggttcacttttcctgttgctgagttgtttctggaagatgttctagaaaagacacgttacaggatcaattccgaacgtgataattttgcaggtagttcaaggagaaagaggttttcatcagttaagagtgatccactatctgatgtttttgaggacattgacattactaaggagtatggaaattacagcagttcaacaaggcagtcccttgaagcttggtctgctgctgaactagatttgagccttgtggaaaatacaattgaatatatttgtcgctatgaagcagaaggtgcaatccttgtgttccttactggctgggatgaaatttcgaagcttctggacaagattaaagggaataatttccttggcagtcctaatagatttcttgttcttcctttgcatggttctatgccaactgtgaatcaacgcgaaatttttgacagaccaccagctaatatgagaaaaattgttttggcaaccaacattgcggagagtagtatcactatagatgatgttgtctatgtgattgattgtggtaaggccaaggagacaagctatgatgccttgaataagctcgcatgccttcttccgtcatggatatcaaaagcttctgctcatcagaggagaggtcgtgcaggccgcgttcagccaggtttttgctatcggctctatccaaagatcattcacgatgcaatgccacagtttcagttgcctgaaattctcaggactcctttgcaagagctatgccttaccatcaaaagcttacagcttggagcagtatcctcctttttagccaagtcactgcagccaccagatccactttctgttaagaatgctattgagcttcttaaaaccattggcgcactggatgatatggaggagctcacttctcttgggcgacatctctgtactctcccactggacccaaacatcgggaaaatgctgcttatgggatctgtattccagtgcctggatccagtattgacaattgctgctgctctcgcatatcgaaatccatttgtgctcccaatagatagaaaagaagaagctgatgctgtcaaaagatcatttgctggtgactcgtgcagtgatcacattgctcttgttaaggcgtttgtagcatggaaggatgctaaaaggagtggtagagaacgcactttctgttgggaaagttttctgtcccctatgaccctgaagatgatggacgacatgcgaaatcaattttttgatctactatctgatattgggtttgttagcaagacagcaggagtgaaggcatataaccgctatggtaatgatctggagatggtttgcgctgtcttgtgcgctgggctgtacccaaatgttgtgcaatgcaaaaggcgaggcaagaggactgctttctacaccaaagatgtgggaaaagtggacattcatccatcatcagtcaatgcattcgtaaaccaattcccgttacctttcttggtttacagtgagaaggtgaagactgctagcatttatgtaagggactcgacaaatatatcagactatgcccttctactctttggtggttcgcttagtccgagcaaaactggagaaggcattgagatgcttgggggttatcttcatttctcggctccaaagcgtaccatagagttgattcagaaattaagaggtgaattggacaaactccttcagaaaaagattgaggaacctggactcgacatcttttcgcaaggaaagggtgttgtggcggcagctgtagaactgctacacagtcaaaatttcgaccattagatgccaaatattacatgttatcaggacaagtttcacactagacgaaagcaaaatcagcgtattcttttgtaaatctcacctctgcgtgttagcatatttctgttgctttttttagaaaccagaatttgagcccagcaacaaccacaacgatatcgttgcggagaaaggacttatacaaggttattttcagggcgacatattgggcacgttcttggtcgctgctgcttagagacgaggacgcgaggaccgatctgaacaaggcatgccacttatcggagtcggtcgttatggaggtgttcgctaagtttgggtggaagttctcaaatagaattacagcctagtcgtctagctagggatgaaaacggtcgaaaacgatcgaaaaaacactgatattggtttggttttcgttttataacaacggtacgaaaacgaaaacgaa

SEQ ID NO: 4255 - DNA, 3684 bp, Zea Mays
atgaagcgggcgatcgtgagtgccggcgagggtggtgacacgcgagggcctgggggaaacgcccctggtgctagtgacggtggagaaagaagccctagtggatcacgaggtgaggagaaactctatcaaacatggtggatgaaagcgcatggagagtgggggaaagaaagcaaaaaagagaggaatctgtgggctaacatgtatgacgagaagatttgggatgtcgagatcggccctgagatcattgacgaggcgctccatcctgccaccgtaggccgtggcatcatcgagctcgatgtgtggcctgcacccagtcatgagcagattgtgcggcttgagaccccggtgtcggagagggcggacaaggatgagggcagggcacgtaacggagggagagagagcagcagttgcagccgccactacctcctctccagcttcgcgtccactcccctcaaaaccctaaacgcgctcaggaccctagttgtcatgtcgtaccgcggagggcgcgggggcggcgggcccaactcgcaccgcgggcgcgggcggggcggcggcggtggggcgggacgccgcggcggcggcgggggacgcggggagcagaggtggtgggacccggagtggcgagccgagcgcctccggcagatgcatggggaggtggaaaaggtcgatgagaatgaatggtggaacaagattgggcaattaagagaagggtcccagcaggagctagtagtcaagcggaattttggacgggatggacaaaatatacttgcaaacatggctcagagacaaggaatttactttaatgcatacaacaaagggaagacacttgttttcagcaaggtacccttacctgattatcgagcagatctggacgacaggcatggatcaacacaaaaggagattaagatgtctaatcagacagaggcgcgagtcgaagaccttttgtccaggtcaaagtggaacaacaattctgcaagcacatcaactgtctcaacgagacaaattttccctggcgcatcctcgtctgtagttgaaccagcagcaccaattgataaagaaaagctcagttcccagcttagggagttgcagaattcaaggaagacgacagcaagtgctagatcaatgcaatcttttagggagaaattacctgcattcagcatgagagaggggtttctgaaagcagtggcagccaatcaggttctggtcatttctggcgagacaggctgcggcaaaacaactcagcttccacagttcattctagaagaagaaataaacagcctccgcggtgctgattgcaacataatttgtactcagccccgccgtatatctgccatttcagtagcagcaagagtatctgctgagagaggtgaagaactcggcgaggctgttggataccagattcgccttgaatcaaaacggtctgcacaaacacggttgctgttctgcactactggagttttgcttagaagactggttcaagagcctgacttaattggggtgagtcatttactagttgacgaaattcatgaacgcggcatgaatgaagattttctcatcataatactgcgtgaccttctaccaagacgtccagatcttcgccttgtactgatgagtgcaactataaatgctgaactattttccatgtactttggagatgctccagtgatgcacatcccggggttcacttttcctgttgctgagttgtttctggaagatgttctagaaaagacacgttacaggatcaattccgaacgtgataattttgcaggtagttcaaggagaaagaggttttcatcagttaagagtgatccactatctgatgtttttgaggacattgacattactaaggagtatggaaattacagcagttcaacaaggcagtcccttgaagcttggtctgctgctgaactagatttgagccttgtggaaaatacaattgaatatatttgtcgctatgaagcagaaggtgcaatccttgtgttccttactggctgggatgaaatttcgaagcttctggacaagattaaagggaataatttccttggcagtcctaatagatttcttgttcttcctttgcatggttctatgccaactgtgaatcaacgcgaaatttttgacagaccaccagctaatatgagaaaaattgttttggcaaccaacattgcggagagtagtatcactatagatgatgttgtctatgtgattgattgtggtaaggccaaggagacaagctatgatgccttgaataagctcgcatgccttcttccgtcatggatatcaaaagcttctgctcatcagaggagaggtcgtgcaggccgcgttcagccaggtttttgctatcggctctatccaaagatcattcacgatgcaatgccacagtttcagttgcctgaaattctcaggactcctttgcaagagctatgccttaccatcaaaagcttacagcttggagcagtatcctcctttttagccaagtcactgcagccaccagatccactttctgttaagaatgctattgagcttcttaaaaccattggcgcactggatgatatggaggagctcacttctcttgggcgacatctctgtactctcccactggacccaaacatcgggaaaatgctgcttatgggatctgtattccagtgcctggatccagtattgacaattgctgctgctctcgcatatcgaaatccatttgtgctcccaatagatagaaaagaagaagctgatgctgtcaaaagatcatttgctggtgactcgtgcagtgatcacattgctcttgttaaggcgtttgtagcatggaaggatgctaaaaggagtggtagagaacgcactttctgttgggaaagttttctgtcccctatgaccctgaagatgatggacgacatgcgaaatcaattttttgatctactatctgatattgggtttgttagcaagacagcaggagtgaaggcatataaccgctatggtaatgatctggagatggtttgcgctgtcttgtgcgctgggctgtacccaaatgttgtgcaatgcaaaaggcgaggcaagaggactgctttctacaccaaagattgagaaggtgaagactgctagcatttatgtaagggactcgacaaatatatcagactatgcccttctactctttggtggttcgcttagtccgagcaaaactggagaaggcattgagatgcttgggggttatcttcatttctcggctccaaagcgtaccatagagttgattcagaaattaagaggtgaattggacaaactccttcagaaaaagattgaggaacctggactcgacatcttttcgcaaggaaagggtgttgtggcggcagctgtagaactgctacacagtcaaaatttcgaccattagatgccaaatattacatgttatcaggacaagtttcacactagacgaaagcaaaatcagcgtattcttttgtaaatctcacctctgcgtgttagcatatttctgttgctttttttagaaaccagaatttgagcccagcaacaaccacaacgatatcgttgcggagaaaggacttatacaaggtgattctctgtctccgatcctctttaatatcgttgcggacatgttggctattttaattgagagagcaaagaataatgttgacctaaaaaaaatgaatttgaatccagtttgtttcactttttctctct

SEQ ID NO: 4256 - DNA, 2915 bp, Zea Mays
cttcacttcacatgtctatgatcattcttcactgatagtaatgcatacaacaaagggaagacacttgttttcagcaaggtacccttacctgattatcgagcagatctggacgacaggcatggatcaacacaaaaggagattaagatgtctaatcagacagaggcgcgagtcgaagaccttttgtccaggtcaaagtggaacaacaattctgcaagcacatcaactgtctcaacgagacaaattttccctggcgcatcctcgtctgtagttgaaccagcagcaccaattgataaagaaaagctcagttcccagcttagggagttgcagaattcaaggaagacgacagcaagtgctagatcaatgcaatcttttagggagaaattacctgcattcagcatgagagaggggtttctgaaagcagtggcagccaatcaggttctggtcatttctggcgagacaggctgcggcaaaacaactcagcttccacagttcattctagaagaagaaataaacagcctccgcggtgctgattgcaacataatttgtactcagccccgccgtatatctgccatttcagtagcagcaagagtatctgctgagagaggtgaagaactcggcgaggctgttggataccagattcgccttgaatcaaaacggtctgcacaaacacggttgctgttctgcactactggagttttgcttagaagactggttcaagagcctgacttaattggggtgagtcatttactagttgacgaaattcatgaacgcggcatgaatgaagattttctcatcataatactgcgtgaccttctaccaagacgtccagatcttcgccttgtactgatgagtgcaactataaatgctgaactattttccatgtactttggagatgctccagtgatgcacatcccggggttcacttttcctgttgctgagttgtttctggaagatgttctagaaaagacacgttacaggatcaattccgaacgtgataattttgcaggtagttcaaggagaaagaggttttcatcagttaagagtgatccactatctgatgtttttgaggacattgacattactaaggagtatggaaattacagcagttcaacaaggcagtcccttgaagcttggtctgctgctgaactagatttgagccttaaaaattgttttggcaaccaacattgcggagagtagtatcactatagatgatgttgtctatgtgattgattgtggtaaggccaaggagacaagctatgatgccttgaataagctcgcatgccttcttccgtcatggatatcaaaagcttctgctcatcagaggagaggtcgtgcaggccgcgttcagccaggtttttgctatcggctctatccaaagatcattcacgatgcaatgccacagtttcagttgcctgaaattctcaggactcctttgcaagagctatgccttaccatcaaaagcttacagcttggagcagtatcctcctttttagccaagtcactgcagccaccagatccactttctgttaagaatgctattgagcttcttaaaaccattggcgcactggatgatatggaggagctcacttctcttgggcgacatctctgtactctcccactggacccaaacatcgggaaaatgctgcttatgggatctgtattccagtgcctggatccagtattgacaattgctgctgctctcgcatatcgaaatccatttgtgctcccaatagatagaaaagaagaagctgatgctgtcaaaagatcatttgctggtgactcgtgcagtgatcacattgctcttgttaaggcgtttgtagcatggaaggatgctaaaaggagtggtagagaacgcactttctgttgggaaagttttctgtcccctatgaccctgaagatgatggacgacatgcgaaatcaattttttgatctactatctgatattgggtttgttagcaagacagcaggagtgaaggcatataaccgctatggtaatgatctggagatggtttgcgctgtcttgtgcgctgggctgtacccaaatgttgtgcaatgcaaaaggcgaggcaagaggactgctttctacaccaaagatgtgggaaaagtggacattcatccatcatcagtcaatgcattcgtaaaccaattcccgttacctttcttggtttacagtgagaaggtgaagactgctagcatttatgtaagggactcgacaaatatatcagactatgcccttctactctttggtggttcgcttagtccgagcaaaactggagaaggcattgagatgcttgggggttatcttcatttctcggctccaaagcgtaccatagagttgattcagaaattaagaggtgaattggacaaactccttcagaaaaagattgaggaacctggactcgacatcttttcgcaaggaaagggtgttgtggcggcagctgtagaactgctacacagtcaaaatttcgaccattagatgccaaatattacatgttatcaggacaagtttcacactagacgaaagcaaaatcagcgtattcttttgtaaatctcacctctgcgtgttagcatatttctgttgctttttttagaaaccagaatttgagcccagcaacaaccacaacgatatcgttgcggagaaaggacttatacaaggttattttcagggcgacatattgggcacgttcttggtcgctgctgcttagagacgaggacgcgaggaccgatctgaacaaggcatgccacttatcggagtcggtcgttatggaggtgttcgctaagtttgggtggaagttctcaaatagaattacagcctagtcgtctagctagggatgaaaacggtcgaaaacgatcgaaaaaacactgatattggtttggttttcgttttataacaacggtacgaaaacgaaaacgaa

SEQ ID NO: 4257 - DNA, 2427 bp, Zea Mays
gtttgacacagcctctctgcaaaatgcagggttcaagagcctgacttaattggggtgagtcatttactagttgacgaaattcatgaacgcggcatgaatgaagattttctcatcataatactgcgtgaccttctaccaagacgtccagatcttcgccttgtactgatgagtgcaactataaatgctgaactattttccatgtactttggagatgctccagtgatgcacatcccggggttcacttttcctgttgctgagttgtttctggaagatgttctagaaaagacacgttacaggatcaattccgaacgtgataattttgcaggtagttcaaggagaaagaggttttcatcagttaagagtgatccactatctgatgtttttgaggacattgacattactaaggagtatggaaattacagcagttcaacaaggcagtcccttgaagcttggtctgctgctgaactagatttgagccttgtggaaaatacaattgaatatatttgtcgctatgaagcagaaggtgcaatccttgtgttccttactggctgggatgaaatttcgaagcttctggacaagattaaagggaataatttccttggcagtcctaatagatttcttgttcttcctttgcatggttctatgccaactgtgaatcaacgcgaaatttttgacagaccaccagctaatatgagaaaaattgttttggcaaccaacattgcggagagtagtatcactatagatgatgttgtctatgtgattgattgtggtaaggccaaggagacaagctatgatgccttgaataagctcgcatgccttcttccgtcatggatatcaaaagcttctgctcatcagaggagaggtcgtgcaggccgcgttcagccaggtttttgctatcggctctatccaaagatcattcacgatgcaatgccacagtttcagttgcctgaaattctcaggactcctttgcaagagctatgccttaccatcaaaagcttacagcttggagcagtatcctcctttttagccaagtcactgcagccaccagatccactttctgttaagaatgctattgagcttcttaaaaccattggcgcactggatgatatggaggagctcacttctcttgggcgacatctctgtactctcccactggacccaaacatcgggaaaatgctgcttatgggatctgtattccagtgcctggatccagtattgacaattgctgctgctctcgcatatcgaaatccatttgtgctcccaatagatagaaaagaagaagctgatgctgtcaaaagatcatttgctggtgactcgtgcaggcgtttgtagcatggaaggatgctaaaaggagtggtagagaacgcactttctgttgggaaagttttctgtcccctatgaccctgaagatgatggacgacatgcgaaatcaattttttgatctactatctgatattgggtttgttagcaagacagcaggagtgaaggcatataaccgctatggtaatgatctggagatggtttgcgctgtcttgtgcgctgggctgtacccaaatgttgtgcaatgcaaaaggcgaggcaagaggactgctttctacaccaaagatgtgggaaaagtggacattcatccatcatcagtcaatgcattcgtaaaccaattcccgttacctttcttggtttacagtgagaaggtgaagactgctagcatttatgtaagggactcgacaaatatatcagactatgcccttctactctttggtggttcgcttagtccgagcaaaactggagaaggcattgagatgcttgggggttatcttcatttctcggctccaaagcgtaccatagagttgattcagaaattaagaggtgaattggacaaactccttcagaaaaagattgaggaacctggactcgacatcttttcgcaaggaaagggtgttgtggcggcagctgtagaactgctacacagtcaaaatttcgaccattagatgccaaatattacatgttatcaggacaagtttcacactagacgaaagcaaaatcagcgtattcttttgtaaatctcacctctgcgtgttagcatatttctgttgctttttttagaaaccagaatttgagcccagcaacaaccacaacgatatcgttgcggagaaaggacttatacaaggttattttcagggcgacatattgggcacgttcttggtcgctgctgcttagagacgaggacgcgaggaccgatctgaacaaggcatgccacttatcggagtcggtcgttatggaggtgttcgctaagtttgggtggaagttctcaaatagaattacagcctagtcgtctagctagggatgaaaacggtcgaaaacgatcgaaaaaacactgatattggtttggttttcgttttataacaacggtacgaaaacgaaaacgaa

SEQ ID NO: 4258 - DNA, 436 bp, Zea Mays
ctcatctgagctactgtcagagctgctgctatcaggtttaacctgttttgaaccattactgactgctgtgacaggtttttttgaaaggacagtgggcttctttgaaaggacagtgggcttctttgaaaggaccgtgggcttctttgctggttcctcatcagagctgctatcatcactgtcactgctatcatcactgctgctactactggcaggaggcttttttgaaccggcaactggttttttggaaggttcctaatttaaggggaaaatataagtatgtatgatcttggtaagaggaaagccccaaaagcaagtgaacaatgcttacatcgtctgaggagctctcagagctgctgtcatcactggactcctgtttagcaggttgtgtacttttcttcggttgaataaccttcttcggctggaccttaacctgcaa

SEQ ID NO: 4259 - DNA, 211 bp, Zea Mays
gattatccctgcaccagttcgagttggagaagacgaacttccaccgtcttgggaccctatatcctctcctttaggtacttgttatattctaaatgttctttattacaccatgttctatttttgttggtgtttattttctgtcatgaattttgttttagttagcaatggatgtggcactaagagatcaccttagacagaggagagatgatga

SEQ ID NO: 4260 - DNA, 1919 bp, Zea Mays
atgaggccgcgggccgccccttccgaagaccgcagttccgcttgggttattaggttcgggtaccgcactgttaaacccgaagttcgctgtaaaaattcggcgtccgccgcccaccgcctacacggctacaccttcctctctccggcgacctcccgaaacagaactgactcgcatggtcttcgctccgtcgcgaggcccacgttagcggagcctcccactctctggctcaactgcctacgtctggaccagatcctccatgagctcgcgggagtgcattggtggcgcgacgcgaccaacgtcgtctcgaccctccttagcggcaaccgaagacctgaatcctacaaaggcacatgcatgtggtggccaggaggaggctcagatctggaatccagtccgaatgttcctgacaagccaactgcaacaacgattattgcttcaattttagcgatctattttttctaacttgcaaaccaacatgctcaaaattgcagtcaaattagcaatgttgtcagataccaatcctccaactctgaaattcgtgaggttgctgcaacgaccagactgaacattattcattttgtttaaaagtatgtactacaagagaataatcggttgtcatatgaatgtcataaacagggttaatacatgatttgcctactgtcagccttctatggtagggcctaaaagctgggaacaaaaaacaaaagtatgaaaagatcaacgaaaggaaaattgctacttcaactgaggctctctgccatggatatcctaccgaatttgcttcttacttccattattgtcgctcactgcgtttcgaagatgcaccggactatcagtacctgaagagactgttcagagacctttttattcgggaagtcgaggattccagtgttgacgtatcagcagcgacagaaaatttccagagcttaagcctacataatgatgagttagctgcaaaaaagactgctgaagataaccctgtagtgttaattcctggtcatttgcaagttaccaatacagaatgtgttagtttgagctttggcagttttggatctggtgcattttctaggctactcccacaaaagaccactgatagcaatgtggaattccttgtttgagaggattctgcaacagtagatccaatagatgccaggaatcaagattactatgaaagtggtgcaataacttcaccagcagaagaaaatcttgaggccatgctaggaactaacatggagaagtcgatgcaccttctgtttcacaggctaatgagctcagtcaggacgtacttgatccttttgtacttaaatatgacgtgccatcagtttcaagtcatgcttattcaaacatgaacactccacaacctagcacaatagaggacccacaaggaaacaaccaagcacatactctttcccatttgtctaacatgatgcctacaacaacccaagttgccgacctgctttgctgtctgttagaggacatattcttcctcccccacaaccaggtatggcatattggccgccaccaccatggggatatcctacacatccaatgaggccttggggacgccccccatggccaacacaaccacttccatcaccagcggattatggctctcatcaagtgactcctccccctcacgatgactttgcggacagatgtctcaattctagtggtgcagctacgaacaacaatctgatgtcctgatcgagagcgatggagctaatgttcaaacttgtgtgtttgaacttgtgaactaaaaatgtgaactgtggatgtgaacttatgtgaatttgtgaacttatgtatttggacttgtgtgaaattgtgatatgaacatatatccatgtgtttgaaatctgtattgtatgtgatattctgtgttgcatgtgattttatgtttgtctaatttttcatttctg

SEQ ID NO: 4261 - DNA, 1641 bp, Zea Mays
atgaggccgcgggccgccccttccgaagaccgcagttccgcttgggttattaggttcgggtaccgcactgttaaacccgaagttcgctgtaaaaattcggcgtccgccgcccaccgcctacacggctacaccttcctctctccggcgacctcccgaaacagaactgactcgcatggtcttcgctccgtcgcgaggcccacgttagcggagcctcccactctctggctcaactgcctacgtctggaccagatcctccatgagctcgcgggagtgcattggtggcgcgacgcgaccaacgtcgtctcgaccctccttagcggcaaccgaagacctgaatcctacaaaggcacatgcatgtggttaatacatgatttgcctactgtcagccttctatggtagggcctaaaagctgggaacaaaaaacaaaagtatgaaaagatcaacgaaaggaaaattgctacttcaactgaggctctctgccatggatatcctaccgaatttgcttcttacttccattattgtcgctcactgcgtttcgaagatgcaccggactatcagtacctgaagagactgttcagagacctttttattcgggaagtcgaggattccagtgttgacgtatcagcagcgacagaaaatttccagagcttaagcctacataatgatgagttagctgcaaaaaagactgctgaagataaccctgtagtgttaattcctggtcatttgcaagttaccaatacagaatgtgttagtttgagctttggcagttttggatctggtgcattttctaggctactcccacaaaagaccactgatagcaatgtggaattccttgtttgagaggattctgcaacagtagatccaatagatgccaggaatcaagattactatgaaagtggtgcaataacttcaccagcagaagaaaatcttgaggccatgctaggaactaacatggagaagtcgatgcaccttctgtttcacaggctaatgagctcagtcaggacgtacttgatccttttgtacttaaatatgacgtgccatcagtttcaagtcatgcttattcaaacatgaacactccacaacctagcacaatagaggacccacaaggaaacaaccaagcacatactctttcccatttgtctaacatgatgcctacaacaacccaagttgccgacctgctttgctgtctgttagaggacatattcttcctcccccacaaccaggtatggcatattggccgccaccaccatggggatatcctacacatccaatgaggccttggggacgccccccatggccaacacaaccacttccatcaccagcggattatggctctcatcaagtgactcctccccctcacgatgactttgcggacagatgtctcaattctagtggtgcagctacgaacaacaatctgatgtcctgatcgagagcgatggagctaatgttcaaacttgtgtgtttgaacttgtgaactaaaaatgtgaactgtggatgtgaacttatgtgaatttgtgaacttatgtatttggacttgtgtgaaattgtgatatgaacatatatccatgtgtttgaaatctgtattgtatgtgatattctgtgttgcatgtgattttatgtttgtctaatttttcatttctg

SEQ ID NO: 4262 - DNA, 1945 bp, Zea Mays
atgaggccgcgggccgccccttccgaagaccgcagttccgcttgggttattaggttcgggtaccgcactgttaaacccgaagttcgctgtaaaaattcggcgtccgccgcccaccgcctacacggctacaccttcctctctccggcgacctcccgaaacagaactgactcgcatggtcttcgctccgtcgcgaggcccacgttagcggagcctcccactctctggctcaactgcctacgtctggaccagatcctccatgagctcgcgggagtgcattggtggcgcgacgcgaccaacgtcgtctcgaccctccttagcggcaaccgaagacctgaatcctacaaaggcacatgcatgtggtggccaggaggaggctcagatctggaatccagtccgaatgttcctgacaagccaactgcaacaacgattattgcttcaattttagcgatctattttttctaacttgcaaaccaacatgctcaaaattgcagtcaaattagcaatgttgtcagataccaatcctccaactctgaaattcgtgagggtatgtgcttctaacacttgcatatttggatggatgatgtttatggacggatagagatgttcccctaatactttgtaccgtcaaaagatgctatggacactataatggtctattaacaagttaatacatgatttgcctactgtcagccttctatggtagggcctaaaagctgggaacaaaaaacaaaagtatgaaaagatcaacgaaaggaaaattgctacttcaactgaggctctctgccatggatatcctaccgaatttgcttcttacttccattattgtcgctcactgcgtttcgaagatgcaccggactatcagtacctgaagagactgttcagagacctttttattcgggaagtcgaggattccagtgttgacgtatcagcagcgacagaaaatttccagagcttaagcctacataatgatgagttagctgcaaaaaagactgctgaagataaccctgtagtgttaattcctggtcatttgcaagttaccaatacagaatgtgttagtttgagctttggcagttttggatctggtgcattttctaggctactcccacaaaagaccactgatagcaatgtggaattccttgtttgagaggattctgcaacagtagatccaatagatgccaggaatcaagattactatgaaagtggtgcaataacttcaccagcagaagaaaatcttgaggccatgctaggaactaacatggagaagtcgatgcaccttctgtttcacaggctaatgagctcagtcaggacgtacttgatccttttgtacttaaatatgacgtgccatcagtttcaagtcatgcttattcaaacatgaacactccacaacctagcacaatagaggacccacaaggaaacaaccaagcacatactctttcccatttgtctaacatgatgcctacaacaacccaagttgccgacctgctttgctgtctgttagaggacatattcttcctcccccacaaccaggtatggcatattggccgccaccaccatggggatatcctacacatccaatgaggccttggggacgccccccatggccaacacaaccacttccatcaccagcggattatggctctcatcaagtgactcctccccctcacgatgactttgcggacagatgtctcaattctagtggtgcagctacgaacaacaatctgatgtcctgatcgagagcgatggagctaatgttcaaacttgtgtgtttgaacttgtgaactaaaaatgtgaactgtggatgtgaacttatgtgaatttgtgaacttatgtatttggacttgtgtgaaattgtgatatgaacatatatccatgtgtttgaaatctgtattgtatgtgatattctgtgttgcatgtgattttatgtttgtctaatttttcatttctg

SEQ ID NO: 4263 - DNA, 1374 bp, Zea Mays
ctcatcgtccccgcatcgccgcatctttcccccttccctcccctccactcccgcaatctcgtctccgccgtccgtcgccgcgccgtagcaaggttaatacatgatttgcctactgtcagccttctatggtagggcctaaaagctgggaacaaaaaacaaaagtatgaaaagatcaacgaaaggaaaattgctacttcaactgaggctctctgccatggatatcctaccgaatttgcttcttacttccattattgtcgctcactgcgtttcgaagatgcaccggactatcagtacctgaagagactgttcagagacctttttattcgggaagtcgaggattccagtgttgacgtatcagcagcgacagaaaatttccagagcttaagcctacataatgatgagttagctgcaaaaaagactgctgaagataaccctgtagtgttaattcctggtcatttgcaagttaccaatacagaatgtgttagtttgagctttggcagttttggatctggtgcattttctaggctactcccacaaaagaccactgatagcaatgtggaattccttgtttgagaggattctgcaacagtagatccaatagatgccaggaatcaagattactatgaaagtggtgcaataacttcaccagcagaagaaaatcttgaggccatgctaggaactaacatggagaagtcgatgcaccttctgtttcacaggctaatgagctcagtcaggacgtacttgatccttttgtacttaaatatgacgtgccatcagtttcaagtcatgcttattcaaacatgaacactccacaacctagcacaatagaggacccacaaggaaacaaccaagcacatactctttcccatttgtctaacatgatgcctacaacaacccaagttgccgacctgctttgctgtctgttagaggacatattcttcctcccccacaaccaggtatggcatattggccgccaccaccatggggatatcctacacatccaatgaggccttggggacgccccccatggccaacacaaccacttccatcaccagcggattatggctctcatcaagtgactcctccccctcacgatgactttgcggacagatgtctcaattctagtggtgcagctacgaacaacaatctgatgtcctgatcgagagcgatggagctaatgttcaaacttgtgtgtttgaacttgtgaactaaaaatgtgaactgtggatgtgaacttatgtgaatttgtgaacttatgtatttggacttgtgtgaaattgtgatatgaacatatatccatgtgtttgaaatctgtattgtatgtgatattctgtgttgcatgtgattttatgtttgtctaatttttcatttctg

SEQ ID NO: 4264 - DNA, 1190 bp, Zea Mays
cgcatcgccgcatctttcccccttccctcccctccactcccgcaatctcgtctccgccgtccgtcgccgcgccgtagcaaggttaatacatgatttgcctactgtcagccttctatggtagggcctaaaagctgggaacaaaaaacaaaagtatgaaaagatcaacgaaaggaaaattgctacttcaactgaggctctctgccatggatatcctaccgaatttgcttcttacttccattattgtcgctcactgcgtttcgaagatgcaccggactatcagtacctgaagagactgttcagagacctttttattcgggaagtcgaggattccagtgttgacgtatcagcagcgacagaaaatttccagagcttaagcctacataatgatgagttagctgcaaaaaagactgctgaagataaccctgtagtgttaattcctggtcatttgcaagttaccaatacagaatgtgttagtttgagctttggcagttttggatctggtgcattttctaggctactcccacaaaagaccactgatagcaatgtggaattccttgtttgagaggattctgcaacagtagatccaatagatgccaggaatcaagattactatgaaagtggtgcaataacttcaccagcagaagaaaatcttgaggccatgctaggaactaacatggagaagtcgatgcaccttctgtttcacaggctaatgagctcagtcaggacgtacttgatccttttgtacttaaatatgacgtgccatcagtttcaagtcatgcttattcaaacatgaacactccacaacctagcacaatagaggacccacaaggaaacaaccaagcacatactctttcccatttgtctaacatgatggattatggctctcatcaagtgactcctccccctcacgatgactttgcggacagatgtctcaattctagtggtgcagctacgaacaacaatctgatgtcctgatcgagagcgatggagctaatgttcaaacttgtgtgtttgaacttgtgaactaaaaatgtgaactgtggatgtgaacttatgtgaatttgtgaacttatgtatttggacttgtgtgaaattgtgatatgaacatatatccatgtgtttgaaatctgtattgtatgtgatattctgtgttgcatgtgattttatgtttgtctaatttttcatttctg

SEQ ID NO: 4265 - DNA, 1310 bp, Zea Mays
ctcccctccactcccgcaatctcgtctccgccgtccgtcgccgcgccgtagcaagccttctatggtagggcctaaaagctgggaacaaaaaacaaaagtatgaaaagatcaacgaaaggaaaattgctacttcaactgaggctctctgccatggatatcctaccgaatttgcttcttacttccattattgtcgctcactgcgtttcgaagatgcaccggactatcagtacctgaagagactgttcagagacctttttattcgggaagtcgaggattccagtgttgacgtatcagcagcgacagaaaatttccagagcttaagcctacataatgatgagttagctgcaaaaaagactgctgaagataaccctgtagtgttaattcctggtcatttgcaagttaccaatacagaatgtgttagtttgagctttggcagttttggatctggtgcattttctaggctactcccacaaaagaccactgatagcaatgtggaattccttgtttgagaggattctgcaacagtagatccaatagatgccaggaatcaagattactatgaaagtggtgcaataacttcaccagcagaagaaaatcttgaggccatgctaggaactaacatggagaagtcgatgcaccttctgtttcacaggctaatgagctcagtcaggacgtacttgatccttttgtacttaaatatgacgtgccatcagtttcaagtcatgcttattcaaacatgaacactccacaacctagcacaatagaggacccacaaggaaacaaccaagcacatactctttcccatttgtctaacatgatgcctacaacaacccaagttgccgacctgctttgctgtctgttagaggacatattcttcctcccccacaaccaggtatggcatattggccgccaccaccatggggatatcctacacatccaatgaggccttggggacgccccccatggccaacacaaccacttccatcaccagcggattatggctctcatcaagtgactcctccccctcacgatgactttgcggacagatgtctcaattctagtggtgcagctacgaacaacaatctgatgtcctgatcgagagcgatggagctaatgttcaaacttgtgtgtttgaacttgtgaactaaaaatgtgaactgtggatgtgaacttatgtgaatttgtgaacttatgtatttggacttgtgtgaaattgtgatatgaacatatatccatgtgtttgaaatctgtattgtatgtgatattctgtgttgcatgtgattttatgtttgtctaatttttcatttctg

SEQ ID NO: 4266 - DNA, 1324 bp, Zea Mays
cgcaatctcgtctccgccgtccgtcgccgcgccgtagcaagggttaatacatgatttgcctactgtcagccttctatggtagggcctaaaagctgggaacaaaaaacaaaagtatgaaaagatcaacgaaaggaaaattgctacttcaactgaggctctctgccatggatatcctaccgaatttgcttcttacttccattattgtcgctcactgcgtttcgaagatgcaccggactatcagtacctgaagagactgttcagagacctttttattcgggaagtcgaggattccagtgttgacgtatcagcagcgacagaaaatttccagagcttaagcctacataatgatgagttagctgcaaaaaagactgctgaagataaccctgtagtgttaattcctggtcatttgcaagttaccaatacagaatgtgttagtttgagctttggcagttttggatctggtgcattttctaggctactcccacaaaagaccactgatagcaatgtggaattccttgtttgagaggattctgcaacagtagatccaatagatgccaggaatcaagattactatgaaagtggtgcaataacttcaccagcagaagaaaatcttgaggccatgctaggaactaacatggagaagtcgatgcaccttctgtttcacaggctaatgagctcagtcaggacgtacttgatccttttgtacttaaatatgacgtgccatcagtttcaagtcatgcttattcaaacatgaacactccacaacctagcacaatagaggacccacaaggaaacaaccaagcacatactctttcccatttgtctaacatgatgcctacaacaacccaagttgccgacctgctttgctgtctgttagaggacatattcttcctcccccacaaccaggtatggcatattggccgccaccaccatggggatatcctacacatccaatgaggccttggggacgccccccatggccaacacaaccacttccatcaccagcggattatggctctcatcaagtgactcctccccctcacgatgactttgcggacagatgtctcaattctagtggtgcagctacgaacaacaatctgatgtcctgatcgagagcgatggagctaatgttcaaacttgtgtgtttgaacttgtgaactaaaaatgtgaactgtggatgtgaacttatgtgaatttgtgaacttatgtatttggacttgtgtgaaattgtgatatgaacatatatccatgtgtttgaaatctgtattgtatgtgatattctgtgttgcatgtgattttatgtttgtctaatttttcatttctg

SEQ ID NO: 4267 - DNA, 1200 bp, Zea Mays
ctccgccgtccgtcgccgcgccgtagcaaggctctctgccatggatatcctaccgaatttgcttcttacttccattattgtcgctcactgcgtttcgaagatgcaccggactatcagtacctgaagagactgttcagagacctttttattcgggaagtcgaggattccagtgttgacgtatcagcagcgacagaaaatttccagagcttaagcctacataatgatgagttagctgcaaaaaagactgctgaagataaccctgtagtgttaattcctggtcatttgcaagttaccaatacagaatgtgttagtttgagctttggcagttttggatctggtgcattttctaggctactcccacaaaagaccactgatagcaatgtggaattccttgtttgagaggattctgcaacagtagatccaatagatgccaggaatcaagattactatgaaagtggtgcaataacttcaccagcagaagaaaatcttgaggccatgctaggaactaacatggagaagtcgatgcaccttctgtttcacaggctaatgagctcagtcaggacgtacttgatccttttgtacttaaatatgacgtgccatcagtttcaagtcatgcttattcaaacatgaacactccacaacctagcacaatagaggacccacaaggaaacaaccaagcacatactctttcccatttgtctaacatgatgcctacaacaacccaagttgccgacctgctttgctgtctgttagaggacatattcttcctcccccacaaccaggtatggcatattggccgccaccaccatggggatatcctacacatccaatgaggccttggggacgccccccatggccaacacaaccacttccatcaccagcggattatggctctcatcaagtgactcctccccctcacgatgactttgcggacagatgtctcaattctagtggtgcagctacgaacaacaatctgatgtcctgatcgagagcgatggagctaatgttcaaacttgtgtgtttgaacttgtgaactaaaaatgtgaactgtggatgtgaacttatgtgaatttgtgaacttatgtatttggacttgtgtgaaattgtgatatgaacatatatccatgtgtttgaaatctgtattgtatgtgatattctgtgttgcatgtgattttatgtttgtctaatttttcatttctg

SEQ ID NO: 4268 - DNA, 1072 bp, Zea Mays
aaacatttaaggattgtgtaattctttggtcgaggattccagtgttgacgtatcagcagcgacagaaaatttccagagcttaagcctacataatgatgagttagctgcaaaaaagactgctgaagataaccctgtagtgttaattcctggtcatttgcaagttaccaatacagaatgtgttagtttgagctttggcagttttggatctggtgcattttctaggctactcccacaaaagaccactgatagcaatgtggaattccttgtttgagaggattctgcaacagtagatccaatagatgccaggaatcaagattactatgaaagtggtgcaataacttcaccagcagaagaaaatcttgaggccatgctaggaactaacatggagaagtcgatgcaccttctgtttcacaggctaatgagctcagtcaggacgtacttgatccttttgtacttaaatatgacgtgccatcagtttcaagtcatgcttattcaaacatgaacactccacaacctagcacaatagaggacccacaaggaaacaaccaagcacatactctttcccatttgtctaacatgatgcctacaacaacccaagttgccgacctgctttgctgtctgttagaggacatattcttcctcccccacaaccaggtatggcatattggccgccaccaccatggggatatcctacacatccaatgaggccttggggacgccccccatggccaacacaaccacttccatcaccagcggattatggctctcatcaagtgactcctccccctcacgatgactttgcggacagatgtctcaattctagtggtgcagctacgaacaacaatctgatgtcctgatcgagagcgatggagctaatgttcaaacttgtgtgtttgaacttgtgaactaaaaatgtgaactgtggatgtgaacttatgtgaatttgtgaacttatgtatttggacttgtgtgaaattgtgatatgaacatatatccatgtgtttgaaatctgtattgtatgtgatattctgtgttgcatgtgattttatgtttgtctaatttttcatttctg

SEQ ID NO: 4269 - DNA, 1114 bp, Zea Mays
accaagacccattttttaaattttaaacaatccagtttctgcttattttctgaatgacctgaaagctagcgatatgcccatatatataactacttttgatcaacctgaacactttctcaagtcattgcatacagagcaaaaatcttgatatttgcacccactaacaagatttatttctgtgtctcagtccctctgcatggtccacaatgatctgattcctttggtaactgttgtttatctgcagtcgaggattccagtgttgacgtatcagcagcgacagaaaatttccagagcttaagcctacataatgatgagttagctgcaaaaaagactgctgaagataaccctgtagtgttaattcctggtcatttgcaagttaccaatacagaatgtgttagtttgagctttggcagttttggatctggtgcattttctaggctactcccacaaaagaccactgatagcaatgtggaattccttgtttgagaggattctgcaacagtagatccaatagatgccaggaatcaagattactatgaaagtggtgcaataacttcaccagcagaagaaaatcttgaggccatgctaggaactaacatggagaagtcgatgcaccttctgtttcacaggctaatgagctcagtcaggacgtacttgatccttttgtacttaaatatgacgtgccatcagtttcaagtcatgcttattcaaacatgaacactccacaacctagcacaatagaggacccacaaggaaacaaccaagcacatactctttcccatttgtctaacatgatggattatggctctcatcaagtgactcctccccctcacgatgactttgcggacagatgtctcaattctagtggtgcagctacgaacaacaatctgatgtcctgatcgagagcgatggagctaatgttcaaacttgtgtgtttgaacttgtgaactaaaaatgtgaactgtggatgtgaacttatgtgaatttgtgaacttatgtatttggacttgtgtgaaattgtgatatgaacatatatccatgtgtttgaaatctgtattgtatgtgatattctgtgttgcatgtgattttatgtttgtctaatttttcatttctg

SEQ ID NO: 4270 - DNA, 1587 bp, Zea Mays
atcattaccatcctaattaggtttcgatccggcccaggctgcaatcgtcgccccataggtttttgctctaagaagaccattactacacacagttttggattatgaagacgatttttttgctttgttaatgggtgtccttgagtcccatagcctacggacaacagatggttccttttcagagtcattatatggtctcaggaggagacctgttaaggttgcagtgaagagaaagagtcctggtacagaatccaatgacaaagtctatggttctgctctaaggaagcgccagaaaatcctttcagttgtttttttggttgttttgccatattttaagtcaaagttgcagtctatatataacaaagaaagggaagccaggttgcaggcaaccctttggggtcaggatgatgttagatttgatgaagttgactttgtattagatcaggagcagacttctcaagcacagactgaacctacaactggagaaatgtcaaatttgacacgttttaaaaagaattttgcctcacttataggtgtttgctatccatggattcatgcaactaatgaaggtctctcgtttgcataccagctcttgtatctgttggatgcaactgcattttatagtccagcactacatgtacttgggattcatgtttgtcgtgctactggacaagagctgatggattcatcttctaggatatcaaggattagaagtcgtgaacttgagaggcttcgcggtcctccatggttcaaggctgtgcaacgagtgttccttagttgtgtgtacacaactctagattatgcacaaaccggtttaattgctgcagtcttctttttcaagatgatggagtggtggtatcaatctgctgaagaaagaatgtcagctccgactgtatatccaccaccccctcctcctccaactcctaaggttgccaaagacgggattccgttgccacctgacaggacgctctgccccctgtgctgccagaagcgtgctaacccctccgttctttctgtttctggttttgttttttgctacagctgcatattcaaatctgtctcacagcataaaaggtgccctgtcacgctaatgcctgccggcgttgagcaaatcaggcgtctcttccacgatttgtagccatggaagacccgaaaacttcttttctaaagaccagggacgtcagcaactcagcatacagaaacatatatcagaaccaccattttgtaaactataagaaactcagcatacttttttaagcaaatgcatggatggcactttcttcccgatttcctttgtacggttattcttcgtccattggaaattgcacaggaaaagcaagctggagtttgagcttgacagtcttaggttgggggtgtataatctgttgttaggtgatactagcatatccattgagataggctgttgttaggtgatactagcatatccattgagataggcgttaattgtgtacctgcatgactgtatccactctcttcatttgtttgtaaaaaaaactgtctgtaattttggattggtcctgctcgacgtcacttatattggctgtttggagtaatctctcagattatggg

SEQ ID NO: 4271 - DNA, 1727 bp, Zea Mays
gtctcgtgtgtgttgctgtgattcctctggcagctgtgtctgttcactctcttgtctaatcgtctcgtctcccggtcccacccatgacccatcgtcgcccatctccgtcacacaaggcttccttttccggcccgcctccttgctcgcccagttcccctcaccgccgtggacgcgcgaaccaacacccaaaccgtctgttcccaacagataacaccctcggctgcggcagctgcagcgccctcgctgccggcgcaggtccggcgaggcggccagccaagttctaggcctccgcctccggggccaaccctagccaccactcgcaacgccagaggcggggggcgccatgctgttccaagtgggagggcagggcgcgcgacccaccttcttcgagatgtccgccgcgcagcagctgcccgccagcctccgcgccgccctcacctattcgctcggggtttttgctctaagaagaccattactacacacagttttggattatgaagacgatttttttgctttgttaatgggtgtccttgagtcccatagcctacggacaacagatggttccttttcagagtcattatatggtctcaggaggagacctgttaaggttgcagtgaagagaaagagtcctggtacagaatccaatgacaaagtctatggttctgctctaaggaagcgccagaaaatcctttcagttgtttttttggtctctcgtttgcataccagctcttgtatctgttggatgcaactgcattttatagtccagcactacatgtacttgggattcatgtttgtcgtgctactggacaagagctgatggattcatcttctaggatatcaaggattagaagtcgtgaacttgagaggcttcgcggtcctccatggttcaaggctgtgcaacgagtgttccttagttgtgtgtacacaactctagattatgcacaaaccggtttaattgctgcagtcttctttttcaagatgatggagtggtggtatcaatctgctgaagaaagaatgtcagctccgactgtatatccaccaccccctcctcctccaactcctaaggttgccaaagacgggattccgttgccacctgacaggacgctctgccccctgtgctgccagaagcgtgctaacccctccgttctttctgtttctggttttgttttttgctacagctgcatattcaaatctgtctcacagcataaaaggtgccctgtcacgctaatgcctgccggcgttgagcaaatcaggcgtctcttccacgatttgtagccatggaagacccgaaaacttcttttctaaagaccagggacgtcagcaactcagcatacagaaacatatatcagaaccaccattttgtaaactataagaaactcagcatacttttttaagcaaatgcatggatggcactttcttcccgatttcctttgtacggttattcttcgtccattggaaattgcacaggaaaagcaagctggagtttgagcttgacagtcttaggttgggggtgtataatctgttgttaggtgatactagcatatccattgagataggctgttgttaggtgatactagcatatccattgagataggcgttaattgtgtacctgcatgactgtatccactctcttcatttgtttgtaaaaaaaactgtctgtaattttggattggtcctgctcgacgtcacttatattggctgtttggagtaatctctcagattatggg

SEQ ID NO: 4272 - DNA, 1826 bp, Zea Mays
cactctcttgtctaatcgtctcgtctcccggtcccacccatgacccatcgtcgcccatctccgtcacacaaggcttccttttccggcccgcctccttgctcgcccagttcccctcaccgccgtggacgcgcgaaccaacacccaaaccgtctgttcccaacagataacaccctcggctgcggcagctgcagcgccctcgctgccggcgcaggtccggcgaggcggccagccaagttctaggcctccgcctccggggccaaccctagccaccactcgcaacgccagaggcggggggcgccatgctgttccaagtgggagggcagggcgcgcgacccaccttcttcgagatgtccgccgcgcagcagctgcccgccagcctccgcgccgccctcacctattcgctcggggtttttgctctaagaagaccattactacacacagttttggattatgaagacgatttttttgctttgttaatgggtgtccttgagtcccatagcctacggacaacagatggttccttttcagagtcattatatggtctcaggaggagacctgttaaggttgcagtgaagagaaagagtcctggtacagaatccaatgacaaagtctatggttctgctctaaggaagcgccagaaaatcctttcagttgtttttttggttgttttgccatattttaagtcaaagttgcagtctatatataacaaagaaagggaagccaggttgcaggcaaccctttggggtcaggatgatgttagatttgatgaagttgactttgtattagatcaggagcagacttctcaagcacagactgaacctacaactggagaaatgtcaaatttgacacgttttaaaaagaattttgcctcacttataggtgtttgctatccatggattcatgcaactaatgaagatggattcatcttctaggatatcaaggattagaagtcgtgaacttgagaggcttcgcggtcctccatggttcaaggctgtgcaacgagtgttccttagttgtgtgtacacaactctagattatgcacaaaccggtttaattgctgcagtcttctttttcaagatgatggagtggtggtatcaatctgctgaagaaagaatgtcagctccgactgtatatccaccaccccctcctcctccaactcctaaggttgccaaagacgggattccgttgccacctgacaggacgctctgccccctgtgctgccagaagcgtgctaacccctccgttctttctgtttctggttttgttttttgctacagctgcatattcaaatctgtctcacagcataaaaggtgccctgtcacgctaatgcctgccggcgttgagcaaatcaggcgtctcttccacgatttgtagccatggaagacccgaaaacttcttttctaaagaccagggacgtcagcaactcagcatacagaaacatatatcagaaccaccattttgtaaactataagaaactcagcatacttttttaagcaaatgcatggatggcactttcttcccgatttcctttgtacggttattcttcgtccattggaaattgcacaggaaaagcaagctggagtttgagcttgacagtcttaggttgggggtgtataatctgttgttaggtgatactagcatatccattgagataggctgttgttaggtgatactagcatatccattgagataggcgttaattgtgtacctgcatgactgtatccactctcttcatttgtttgtaaaaaaaactgtctgtaattttggattggtcctgctcgacgtcacttatattggctgtttggagtaatctctcagattatggg

SEQ ID NO: 4273 - DNA, 1734 bp, Zea Mays
caaaggtccgaatgactgtcagatttacctggcccctgttggagttagccttagttgtgcgaattgtactagtttcccaaatgatggctcattttagaaatcctacaatttgttgaactaaagaggggtggtgaatatctggatacccttagggccaccaattcacatccctaaacttctggtgaagtaccttagtgcaaaacatgtttttgctctaagaagaccattactacacacagttttggattatgaagacgatttttttgctttgttaatgggtgtccttgagtcccatagcctacggacaacagatggttccttttcagagtcattatatggtctcaggaggagacctgttaaggttgcagtgaagagaaagagtcctggtacagaatccaatgacaaagtctatggttctgctctaaggaagcgccagaaaatcctttcagttgtttttttggttgttttgccatattttaagtcaaagttgcagtctatatataacaaagaaagggaagccaggttgcaggcaaccctttggggtcaggatgatgttagatttgatgaagttgactttgtattagatcaggagcagacttctcaagcacagactgaacctacaactggagaaatgtcaaatttgacacgttttaaaaagaattttgcctcacttataggtgtttgctatccatggattcatgcaactaatgaaggtctctcgtttgcataccagctcttgtatctgttggatgcaactgcattttatagtccagcactacatgtacttgggattcatgtttgtcgtgctactggacaagagctgatggattcatcttctaggatatcaaggattagaagtcgtgaacttgagaggcttcgcggtcctccatggttcaaggctgtgcaacgagtgttccttagttgtgtgtacacaactctagattatgcacaaaccggtttaattgctgcagtcttctttttcaagatgatggagtggtggtatcaatctgctgaagaaagaatgtcagctccgactgtatatccaccaccccctcctcctccaactcctaaggttgccaaagacgggattccgttgccacctgacaggacgctctgccccctgtgctgccagaagcgtgctaacccctccgttctttctgtttctggttttgttttttgctacagctgcatattcaaatctgtctcacagcataaaaggtgccctgtcacgctaatgcctgccggcgttgagcaaatcaggcgtctcttccacgatttgtagccatggaagacccgaaaacttcttttctaaagaccagggacgtcagcaactcagcatacagaaacatatatcagaaccaccattttgtaaactataagaaactcagcatacttttttaagcaaatgcatggatggcactttcttcccgatttcctttgtacggttattcttcgtccattggaaattgcacaggaaaagcaagctggagtttgagcttgacagtcttaggttgggggtgtataatctgttgttaggtgatactagcatatccattgagataggctgttgttaggtgatactagcatatccattgagataggcgttaattgtgtacctgcatgactgtatccactctcttcatttgtttgtaaaaaaaactgtctgtaattttggattggtcctgctcgacgtcacttatattggctgtttggagtaatctctcagattatggg

SEQ ID NO: 4274 - DNA, 952 bp, Zea Mays
atctctatctcatcgtcatcattagaaaggccgaagccgtctccgttcctcctcgacgcgtctcttccacagccgcaacctctatccctcgtctggtatcgtctcccacacccctctgccccaactcagaaaaaccctcgaaaagcggcggcggcgcgacatggcggaggcgaagggtccgcacaagctgcaccgccagtggaccttctgcttgtatgatcatgttttccgtccaagcaagttgcctgggactgctgattttcacctattcaaggctggagtagagccaaaatgggaagacccagagtgtgcaaatggtggcaaatggactgtcccatgcaacagaaagccaacctttgagaccatgtggcttgaaacgttgatggctcttgttggggagcagtttgatgaaacagatgacatttgtggaattgttgctagtgtccgtccaagaggagataagcttgcattgtggactaggactgccagcaatgaagctgtccaggtaaacattggcaagaaatggaaggatgtcatcgactacaatgacaagatcatctacactttccatgacgactcgagaagggataagccaagcagaggtggacggtacaccgtgtaagttgcacacgaagaaggtcgttgttgttcggactggacagagggtgagagtggagttttgtgctgagatcggcaccagctttcatttaatacagcctcagcttacctgaggcaattttcgcacctgttatgatgttgttttgctctcagataggtttatgtagcacaagaaagatatgttggagacgttgacgattttgtatgcaactaaatttctatcttaatatgccccgattcaacagcacccagtcgagtcattgcgttctggagattcttgcagcgcatttccatgtttaagaccttattatgaaatgtctggcattcgtggatc

SEQ ID NO: 4275 - DNA, 1339 bp, Zea Mays
ggcttggttccccgtgacgacttgccagccgcgctagatacacactcttcatcacccggagtcccggacggacgcacacgcatcgcttgcttgtcgttctccactcctcttcccccgctgctcgcctctcgattccgcctcatcgcgtccgcgaactccatgtccactgcgaccgcgaccctggccgccgcgcgatccccggctgtcgcgcttctcagcctgcgccgccgcgcacccgcggctgcccccattcgcttccccggtctccgcgtcggctctggttgccgtcacatagctatggcttccgcggcgcactcccgcgcccccaccgacccgcttcccaagggtgctgatttatttttccgggcagtaatctcgaacatggaaaaggtttatttgagcaggaatcctacagccaaaaccattctggagcttgtacgatcttatgatgaactcagatttccagctaaaaagcttagggcactatggttttccccgcccactaatgatggctactctggaactggtacatatggacctttgccaaggatattcatttcagaacttcttgtggatgagttgactactcaaagccaggaaattatacataaatacattaaaacttctggcaatggaaataatcatgctgctattgcaagtacatctggggagctaacatgggagaagcccatttattcagatttccagattttgtctagggaaagtgaatatgctgcatggactcttgttaatggctatgcactaaatcatgccacaattgccacccatcgcctagaatcagatatcagaagtattaataagttcaacaaatttgtggaggacaatggcttcaagttaaattcagaaggagggattctgaaagtgagtcctgatggtctccttcaacaaagttcaacagtagctgactcatcattgtttacgtttgctgatggaataactgaatctattcctcgatcatacattgaatttgctgaacgtctcctgttaccacagttcaaagatttacaagatgaagaggtgaaagaataccacaggcgtgatggttttgaggtgggcaatgcggacaagatattcgaaagtacatcgaaggatcagctgacgcggagatctgcatgaacagtgaactctagatctgcatatgaccccgtgaactctctagatctgcaaacaacccagtgtgcctcttggaagtgtgttggtgactgtgaaatgattgtacctacttgggtgaaataaagcatgggagtcaataaaaagtaactgtttctttattctacatctgttgaatccaaagagagaattagttactgtttccctt

SEQ ID NO: 4276 - DNA, 948 bp, Zea Mays
tcactagcatatattcagttattgtgctgcatagtgtgaaatcttgatatattgattactaactcagatttccagctaaaaagcttagggcactatggttttccccgcccactaatgatggctactctggaactggtacatatggacctttgccaaggatattcatttcagaacttcttgtggatgagttgactactcaaagccaggaaattatacataaatacattaaaacttctggcaatggaaataatcatgctgctattgcaagtacatctggggagctaacatgggagaagcccatttattcagatttccagattttgtctagggaaagtgaatatgctgcatggactcttgttaatggctatgcactaaatcatgccacaattgccacccatcgcctagaatcagatatcagaagtattaataagttcaacaaatttgtggaggacaatggcttcaagttaaattcagaaggagggattctgaaagtgagtcctgatggtctccttcaacaaagttcaacagtagctgactcatcattgtttacgtttgctgatggaataactgaatctattcctcgatcatacattgaatttgctgaacgtctcctgttaccacagttcaaagatttacaagatgaagaggtgaaagaataccacaggcgtgatggttttgaggtgggcaatgcggacaagatattcgaaagtacatcgaaggatcagctgacgcggagatctgcatgaacagtgaactctagatctgcatatgaccccgtgaactctctagatctgcaaacaacccagtgtgcctcttggaagtgtgttggtgactgtgaaatgattgtacctacttgggtgaaataaagcatgggagtcaataaaaagtaactgtttctttattctacatctgttgaatccaaagagagaattagttactgtttccctt

SEQ ID NO: 4277 - DNA, 493 bp, Zea Mays
ctgagcgcggtcaagtggatcctttggtaccttccggtgagtcctgatggtctccttcaacaaagttcaacagtagctgactcatcattgtttacgtttgctgatggaataactgaatctattcctcgatcatacattgaatttgctgaacgtctcctgttaccacagttcaaagatttacaagatgaagaggtgaaagaataccacaggcgtgatggttttgaggtgggcaatgcggacaagatattcgaaagtacatcgaaggatcagctgacgcggagatctgcatgaacagtgaactctagatctgcatatgaccccgtgaactctctagatctgcaaacaacccagtgtgcctcttggaagtgtgttggtgactgtgaaatgattgtacctacttgggtgaaataaagcatgggagtcaataaaaagtaactgtttctttattctacatctgttgaatccaaagagagaattagttactgtttccctt

SEQ ID NO: 4278 - DNA, 278 bp, Zea Mays
aaggacttcacctgcttctcccttaaaaaagaacaaacatgcaggatgactagttttgtttttgttaatttctgctgttctctgttctgcatcctatcacttatggttatggttaatgtattgggaatccttggaactgtgaaagcaggtgtgctgccgtgccgaggtgctgaaactgtgcacttatctgcactaaggtgctcagtagatgttttgtcctcagacggagtatggtttcctgccatccatatttcattagtttgtgcctactttctgac

SEQ ID NO: 4279 - DNA, 1325 bp, Zea Mays
tgcctacataaagtggtttcttgagaagattgggcatgaaggtttaaataatctgttaaaagcttatgaagataaatcagcgtttgctatgtgcatcttctctcttgctcttggacctggagaggaaccaatcacatttgttggcaaaactgcgggaaagatcgtgcctgctagaggccctaattattttgggtgggatcctgtgttccagccagatggttttgaacaaacatatgctgagatgcccaagtcagtgaagaacaacatatctcacagagggaaagctcttgctctggtgaaagaacacttcgcatctgctagctatacagttcagagcaacgactcaacttaaagtttgacttggattcctagacgaatgaactgtcattctggaatgtaaactgaactactacttttagtccggtgcctattatacttgcgagttgcgacatttcttcactggatcaacactagaatcacaaacaggataaatagattacacagcacccttcaccaggtatcaatgccgataagccaaacgcacacaaaattttcacacggagagatactacacactatctgcatttgactagatgcagaaacacaccaaagaatcgttggctaaaaacctgacaacctctagggcctcctgagtttaacatggagaggcatctccttgtaggtggtgactcgttccctggcctgccgcatcggccttccaagagatgatctgcgcaagaacgggtgcccaggcttctcgctgccggaagcactctctggatcgatcttgcagctgccgattgcgagctggacgtcctctatctcgaacaagtcctccgtgcggctgctcaactcgggtgttctcatggacttcctgcagaggaaggccaatgatcttagcaaaactcaaccgtgaaaactttagcaaggttttaagctttttagtgtttaccgtctctgagaggcatccctatccttcgaaagcatcggtttcgaagatgccgtaggtcctagagctgaaaaacattgggcattcggtcagggattcagatgaaatcgacaccaggtcttgtggataatcggctaacttaggattgggggttattattatacatcgagatctcagcactcgtttcctgctggcgttcccggccctctggatgctcctcgcagacgatgcgtccgaagcgggctccgcatcgactacatctccatccctggtctgcacagctctgtcaggacccagatgctgcgtcctttgcacaggtgcgttgcgccgctgcatcgtcttcttcacatcctgtagcaagaagccaaggagtcgg

SEQ ID NO: 4280 - DNA, 2153 bp, Zea Mays
ctctcccttcggcccttcccttcacgtcaaggaagcaatctcccccagttcgttcaccccctttccccattcacactcgctcccatatccactgcccccattgccattgctgcccccaaccccaagctccagatctcggtcccaagacctggaatggctgaatccatgcccccaccactatcctcactccgctcgcactcccctgcattgctataaatcccactgcatcttggctctggcccatctaatccgccaaggaaccatggcccgagctcccaaatccgccggcattgccctctccctcctgctgctggcagccgccgccaaagcctcggcctttcctctcctcaactcctcgctccccgaccccgctgccgtcgtcgccgacttgcacagcaaggtggcaacgtcgcggcggcggatgcaggagtccggcggcggcggcggcggcggcggcggcgggtgcttgacgggcaacccaatcgacgactgctggcggtgcgcggggacggactggcggcaggaccggcagcggctggcggactgcggcatcgggttcgggcgcaacgcgctgggcggcaagggcgggccggtgtacgtggtgacggacccgtcggaccgcgaccccgtgaacccgtcccctggcacgctccggcacgccgccatccaggagggcccgctgtggatcgtgttcgcgtcggacatggccatccggctgaacgaggagctgctggtgaacagctacaagacgatcgacgggcgcggcgcgcgcgtgcacgtgggcggcggcggcgcgtgcatcacgctgcagtacgtgtcgaacgtgatcatccacaacgtgcacgtgcacgactgcgtgccggcggggaacgccgacgtgcggtcgtcgccgacgcactacgggtggcgcacgcggtcggacggcgacggcatctcgctgttcggcgcgcgggacgtgtgggtggaccactgcgcgctgtggcggtgcgcggacgggctggtggacgccatcatggggtccaccgccatcaccgtgtccaacagctacttcgcgcaccacgacgaggtgatgctgctgggcgccagcgacgcgtacctgcccgactccgggatgcaggtcaccatcgccttcaaccggttcggcccggggctggtgcagcggatgccccgctgccgacgcggctacttccacatcgtcaacaacgactacacgtcgtgggagatgtacgccatcggcggcagcgccggccccaccatcaacagccagggcaaccgctacatcgcgccggccgaccccaacgccaaggaggtgacgaagcgggtggagacggcggaggggcagtgggccgggtggaactggcggacggagggcgacatgatggtgaacggcgccttcttcgtgccttccggcgaggggatggaggacatctacggcaaggcctccagcaccgaccccaagtcgtccgcgctcgtcgacgtgctcacgcagaacgccggcgtcctcggcgaccccagttgctagtgctccgccgcgcgcccatcatcggtccttggttctgctatctctgctctgggcgggaatttgccgttccggcttcccctcctcttgtggctttccctgatccattaccagtcctgacgagacgagacgagacgagccggtccagtggaacacaatacaaaggtggtgccgcggcagacctggcagacgattaaactcactactaggaatgtacactgtaccacgttagaaccccctacccacccacccagttcattagtaataatctctatataggcggtgcattactagttctgccgtggcagcaccggatcaaggcatgtttggattgctacctaatttactatactttgcctgattcgaggaatgtctgattcgaggaatgtctgcttgagtttggatgcataccaatttccagtctttgtcccagtactgcatggaacatctgacatgagttcatgacatttttagtctttgtcccagtgcggcggtaggcagtcgtagtcactctgcgtctccgcatgcgcgccaccggccgatggttttgtcgcccggaaggatggccggatcctgcgctcttttgcatataaacaaacaaacaaatgcccttttcaccttttgtcaacttgtc

SEQ ID NO: 4281 - DNA, 2242 bp, Zea Mays
ctctcccttcggcccttcccttcacgtcaaggaagcaatctcccccagttcgttcaccccctttccccattcacactcgctcccatatccactgcccccattgccattgctgcccccaaccccaagctccagatctcggtcccaagacctggaatggctgaatccatgcccccaccactatcctcactccgctcgcactcccctgcattgctataaatcccactgcatcttggctctggcccatctaatccgccaaggaaccatggcccgagctcccaaatccgccggcattgccctctccctcctgctgctggcagccgccgccaaagcctcggcctttcctctcctcaactcctcgctccccgaccccgctgccgtcgtcgccgacttgcacaggtggcaacgtcgcggcggcggatgcaggagtccggcggcggcggcggcggcggcggcggcgggtgcttgacgggcaacccaatcgacgactgctggcggtgcgcggggacggactggcggcaggaccggcagcggctggcggactgcggcatcgggttcgggcgcaacgcgctgggcggcaagggcgggccggtgtacgtggtgacggacccgtcggaccgcgaccccgtgaacccgtcccctggcacgctccggcacgccgccatccaggagggcccgctgtggatcgtgttcgcgtcggacatggccatccggctgaacgaggagctgctggtgaacagctacaagacgatcgacgggcgcggcgcgcgcgtgcacgtgggcggcggcggcgcgtgcatcacgctgcagtacgtgtcgaacgtgatcatccacaacgtgcacgtgcacgactgcgtgccggcggggaacgccgacgtgcggtcgtcgccgacgcactacgggtggcgcacgcggtcggacggcgacggcatctcgctgttcggcgcgcgggacgtgtgggtggaccactgcgcgctgtggcggtgcgcggacgggctggtggacgccatcatggggtccaccgccatcaccgtgtccaacagctacttcgcgcaccacgacgaggtgatgctgctgggcgccagcgacgcgtacctgcccgactccgggatgcaggtcaccatcgccttcaaccggttcggcccggggctggtgcagcggatgccccgctgccgacgcggctacttccacatcgtcaacaacgactacacgtcgtgggagatgtacgccatcggcggcagcgccggccccaccatcaacagccagggcaaccgctacatcgcgccggccgaccccaacgccaaggaggtgacgaagcgggtggagacggcggaggggcagtgggccgggtggaactggcggacggagggcgacatgatggtgaacggcgccttcttcgtgccttccggcgaggggatggaggacatctacggcaaggcctccagcaccgaccccaagtcgtccgcgctcgtcgacgtgctcacgcagaacgccggcgtcctcggcgaccccaggtacggaacacgtcagccgcggacgggtggacccccgcgcgtctttctatatacgcggcgcttttgttaacttcctccaacggccatccccagttgctagtgctccgccgcgcgcccatcatcggtccttggttctgctatctctgctctgggcgggaatttgccgttccggcttcccctcctcttgtggctttccctgatccattaccagtcctgacgagacgagacgagacgagccggtccagtggaacacaatacaaaggtggtgccgcggcagacctggcagacgattaaactcactactaggaatgtacactgtaccacgttagaaccccctacccacccacccagttcattagtaataatctctatataggcggtgcattactagttctgccgtggcagcaccggatcaaggcatgtttggattgctacctaatttactatactttgcctgattcgaggaatgtctgattcgaggaatgtctgcttgagtttggatgcataccaatttccagtctttgtcccagtactgcatggaacatctgacatgagttcatgacatttttagtctttgtcccagtgcggcggtaggcagtcgtagtcactctgcgtctccgcatgcgcgccaccggccgatggttttgtcgcccggaaggatggccggatcctgcgctcttttgcatataaacaaacaaacaaatgcccttttcaccttttgtcaacttgtc

SEQ ID NO: 4282 - DNA, 2035 bp, Zea Mays
ctctcccttcggcccttcccttcacgtcaaggaagcaatctcccccagttcgttcaccccctttccccattcacactcgctcccatatccactgcccccattgccattgctgcccccaaccccaagctccagatctcggtcccaagacctggaatggctgaatccatgcccccaccactatcctcactccgctcgcactcccctgcattgctataaatcccactgcatcttggctctggcccatctaatccgccaaggaaccatggcccgagctcccaaatccgccggcattgccctctccctcctgctgctggcagccgccgccaaagcctcggcctttcctctcctcaactcctcgctccccgaccccgctgccgtcgtcgccgacttgcacaggtggcaacgtcgcggcggcggatgcaggagtccggcggcggcggcggcggcggcggcggcgggtgcttgacgggcaacccaatcgacgactgctggcggtgcgcggggacggactggcggcaggaccggcagcggctggcggactgcggcatcgggttcgggcgcaacgcgctgggcggcaagggcgggccggtgtacgtggtgacggacccgtcggaccgcgaccccgtgaacccgtcccctggcacgctccggcacgccgccatccaggagggcccgctgtggatcgtgttcgcgtcggacatggccatccggctgaacgaggagctgctggtgaacagctacaagacgatcgacgggcgcggcgcgcgcgtgcacgtgggcggcggcggcgcgtgcatcacgctgcagtacgtgtcgaacgtgatcatccacaacgtgcacgtgcacgactgcgtgccggcggggaacgccgacgtgcggtcgtcgccgacgcactacgggtggcgcacgcggtcggacggcgacggcatctcgctgttcggcgcgcgggacgtgtgggtggaccactgcgcgctgtggcggtgcgcggacgggctggtggacgccatcatggggtccaccgccatcaccgtgtccaacagctacttcgcgcaccacgacgaggtgatgctgctgggcgccagcgacgcgtacctgcccgactccgggatgcaggtcaccatcgccttcaaccggttcggcccggggctggtgcagcggatgccccgctgccgacgcggctacttccacatcgtcaacaacgactacacgtcgtgggagatgtacgccatcggcggcagcgccggccccaccatcaacagccagggcaaccgctacatcgcgccggccgaccccaacgccaaggaggtgacgaagcgggtggagacggcggaggggcagtgggccgggtggaactggcggacggagggcgacatgatggtgaacggcgccttcttcgtgccttccggcgaggggatggaggacatctacggcaaggcctccagcaccgaccccaagtcgtccgcgctcgtcgacgtgctcacgcagaacgccggcgtcctcggcgaccccaggaacgacgccgaagaaaccgggtacaggggcgtcaactacgccggcgggagaactggcggcggcggcggctacggatacggctacctcgggatggtctacgccggcggcggcgaccagagatggagatcgcactcggcgctgtcactggtttcttcagctatcaccgtcgttgcgctcggatgcttgcatttgttgtaacatgtagacgtgtgattctcagttggaaaagttagcaagatggtggggaagattgtagctggggtagcagtaggaggagcgggggtaggcaggcaacagaaaccctgtgtgaagttgcacatgggtattgggtgggaggatattgccaagccagtcactgtacttcttacaaggagaaatggacgactcattctaactttagaacctctgggctctggtctctctgtgatctccatgtcattataattctgggaacagaaaatgtaatgggaaagcaactttagccaacaaaaaagtgacacagaagtagcgccgtgcttgaatc

SEQ ID NO: 4283 - DNA, 1166 bp, Zea Mays
atccggcagcagtgtgggcactccacatttgctatcaatgcctcaccatgctcaggatcatcatccacagagcaaagcattccgtcaaggggcagtagaatctgagtgaacccaatgacgagtcacagagtggaaggcatcttgtaggggtttcagtagaaccattttattcttgatctcctgctaatatgccaacccatcaacatacatgtgactcaaatctttgtaaagaaaattgataacccaccaaagacatatgaatctcgaccaagcgacttagattgtagcatttcatcgccaacatgaagaaaatggtactccctagaagtacacataaatacataatgatacagaaaggagaaacccattacaaatgctaagttattggtcaatgcatgaaaaggttgtgacatatagtacagtgatattaagaaaaaaatacacaatgagcggaatatggaagtgctggaagctaaaaaaacaaatcgggttagctcataatacaatgtgcctctgaaggagtttagctaagactcataatatttttagttttgtgtcccaatatctacaaatacaaatatcctagcaaaagtggtctcatgttgacttatccagacgaaatgatgtgcaatttatattggaaaatacaaccatttagtgattccgtatgtagagattctatcttagtttcaggggcacattgttaaattttatttgcgggggcagtcaatataaatgtacaagcaaaggaaactgagttctaagcttatatgccatcaattctactaaaccgatgccatcttgtgaaacaactatatatcgtatccgtgttgaagctgttgtgtactatgtacaaagagtaattccatgaaattggtaagctgtttttaaagaacatgaaataggtaatcttaaggtagcaactcagtgctcagatgagtactccaaatgaataagtgatgtcattctgaaaatggcactcctagaaatatgaccatctgcacagtacatgtcaggaacatcatatcaaggccaagagtaccaactttaggcatgtaattcctcattattttgtatcttccccacaagccgatgattgtttctgtcaggtcttacacaaaatagtaacaaccattgcttaacgcatatctgaacaatgagttatc

SEQ ID NO: 4284 - DNA, 2498 bp, Zea Mays
ccgcgtccccgtcagcctgtcatcccgtgggcgcgcggctgtcgacctgcgcatcagcttctatgattagccaggagcaataatttattactcctatttgccaggcgacgttcgtccaattcgacccggcaggcagcaggcagcagctgtgctcctgtgggtgggtgggtcatgggtgaccacatgcatcgatggagccagggccgccgtgtgcgcagccaactctacctatccccgcccccgggatgggcgatggcaactatcctatcgcaacaatatcctggggtgggggctataaaacggagcggcccgcgtggggcgcgcctccatcagccgcagtcgcgtcgcgtcgcgtcgcgtccagtccaatcctcggagcctcacacgggcggacgagcgggagcttctcccaatctcccctgccctgccctgccctgccgccgcgcttagcttcgcatcttcccctcctcctcctcctccttcctcggccaagcgaggagcgaggcgcgggcgcgagcgcgtcgttgagatggattcggaggcggtgcagcacggctgcgcgcattacagccgtgggtgcagcgtcgtggcgccctgctgcggccaggccttcggctgccgccattgccacaacgacgccaagaactcgctggaggtcgacccgcgcgaccggcacgagatcccccgccacgaaataaagaaggtcagcgttccctccctctgctcaaagagcaatctcctgcctgtttcaaccattgcctatctcgtgttcgtctttgttattaccgtgagcaaagaaaggaagaaacaaacaagagcgccgccttctctcttctccttctccatgtaatggagcatttgttccgccgcgtagtcgagtgcaagcagcggttttcctcttttggaaacccacccccacgcacggttccgttccaatctcgcccttccaattgaccaacacaaacctttcctaagatttcttgtcctccttacccttctacagacaagtacgaaacgcaatcgcacaaggttatactactactagcttttagtgttctagcgaccttagatttttttttttggttaggcatccctgatttttctcacacttaaaagcttcttcagataaggccatatcagctcagctcagtgctctgggagccgttctgcacttcacttgcgtgtcactaaaaacttgactgctttccgcgatgtgctccgcaccaagtggccggcactgcgtggtccacaggatttttcaagagaaagccggggtcacgggtgccacttgaagccaaggacaggcgtctgggattggagaatatatgagaaagggataccgtcagaggcacatctcaccgtcaaactgaacagggtgatctgttctctctgctccaaggaacaggacgtgcaacagaactgctccagctgtggggcctgcatgggcaagtacttctgtaaagtatgcaagttcttcgatgatgatgtctcaaagggccagtaccactgtgacggatgtggaatatgtagaaccggcggcgtggagaactttttccactgtgataaatgtgggtgttgctacagcaatgtcttgaaggattcccaccactgcgtcgaaagagcaatgcatcacaactgccccgtctgctttgagtatctgttcgactccacgaaggacatcagcgtgctgcaatgtgggcataccatccatttggagtgcatgaacgagatgagagcacaccatcacttctcatgcccagtgtgctcgaggtccgcctgcgacatgtcggccacatggcggaagctcgacgaggaggtcgcggccacgccgatgcctgacatctaccagaagcacatggtgtggatcctgtgcaacgactgcagcgcgacctcgagcgtgcggttccacgtgctggggcacaagtgccccgcgtgcagctcgtacaacacccgggagacgagggctgcgtgccccaggatctgaggcgaaccagaggccatgtcacaaaatgccagggagatgccgtccaacgatcatctgtctgcaggacgttgctgcgcttaaggttaaaggctagcgcgagaccaggcctggtagtccagtcttgagtttggtgctggagcatttgtaatgttccggtaaaatgtaatgcgtccatgagtgctgtccaggcagtaagcacacctgtggatcggggccggcgcaaggtccctaggcaagctgcaggattagtggggctattcatgtttagggcgcgaatgcaacgaaattacccgtgggccgtgggctcggtatgtaacagaaccgattatttctattacaataataacatgcagttctattgggccgagcctaatcaggcaccacgaatgtgaataattgcacatggcgcatatatggcgggcagtagatacatataaaatggagaaaatccgtttattgccatcaaaacttatactgatcactacaataccatctaaaatgatgtgctcccttc

SEQ ID NO: 4285 - DNA, 2632 bp, Zea Mays
ccgcgtccccgtcagcctgtcatcccgtgggcgcgcggctgtcgacctgcgcatcagcttctatgattagccaggagcaataatttattactcctatttgccaggcgacgttcgtccaattcgacccggcaggcagcaggcagcagctgtgctcctgtgggtgggtgggtcatgggtgaccacatgcatcgatggagccagggccgccgtgtgcgcagccaactctacctatccccgcccccgggatgggcgatggcaactatcctatcgcaacaatatcctggggtgggggctataaaacggagcggcccgcgtggggcgcgcctccatcagccgcagtcgcgtcgcgtcgcgtcgcgtccagtccaatcctcggagcctcacacgggcggacgagcgggagcttctcccaatctcccctgccctgccctgccctgccgccgcgcttagcttcgcatcttcccctcctcctcctcctccttcctcggccaagcgaggagcgaggcgcgggcgcgagcgcgtcgttgagatggattcggaggcggtgcagcacggctgcgcgcattacagccgtgggtgcagcgtcgtggcgccctgctgcggccaggccttcggctgccgccattgccacaacgacgccaagaactcgctggaggtcgacccgcgcgaccggcacgagatcccccgccacgaaataaagaaggtcagcgttccctccctctgctcaaagagcaatctcctgcctgtttcaaccattgcctatctcgtgttcgtctttgttattaccgtgagcaaagaaaggaagaaacaaacaagagcgccgccttctctcttctccttctccatgtaatggagcatttgttccgccgcgtagtcgagtgcaagcagcggttttcctcttttggaaacccacccccacgcacggttccgttccaatctcgcccttccaattgaccaacacaaacctttcctaagatttcttgtcctccttacccttctacagacaagtacgaaacgcaatcgcacaaggttatactactactagcttttagtgttctagcgaccttagatttttttttttggttaggcatccctgatttttctcacacttaaaagcttcttcagataaggccatatcagctcagctcagtgctctgggagccgttctgcacttcacttgcgtgtcactaaaaacttgactgctttccgcgatgtgctccgcaccaagtggccggcactgcgtggtccacaggatttttcaagagaaagccggggtcacgggtgccacttgaagccaaggacaggcgtctgggattggagaatatatgagaaagggataccgtcagaggcacatctcaccgtcaaactgaacagggtctaactgcttccagctgatttgattgagtttgagtgctgcatagttgaggacctggatatagtgacgtgtcctgacaggtgtctttggacctattagcagtgaatctgacgtcgatcggctaaagcaatcatgtgatctgttctctctgctccaaggaacaggacgtgcaacagaactgctccagctgtggggcctgcatgggcaagtacttctgtaaagtatgcaagttcttcgatgatgatgtctcaaagggccagtaccactgtgacggatgtggaatatgtagaaccggcggcgtggagaactttttccactgtgataaatgtgggtgttgctacagcaatgtcttgaaggattcccaccactgcgtcgaaagagcaatgcatcacaactgccccgtctgctttgagtatctgttcgactccacgaaggacatcagcgtgctgcaatgtgggcataccatccatttggagtgcatgaacgagatgagagcacaccatcacttctcatgcccagtgtgctcgaggtccgcctgcgacatgtcggccacatggcggaagctcgacgaggaggtcgcggccacgccgatgcctgacatctaccagaagcacatggtgtggatcctgtgcaacgactgcagcgcgacctcgagcgtgcggttccacgtgctggggcacaagtgccccgcgtgcagctcgtacaacacccgggagacgagggctgcgtgccccaggatctgaggcgaaccagaggccatgtcacaaaatgccagggagatgccgtccaacgatcatctgtctgcaggacgttgctgcgcttaaggttaaaggctagcgcgagaccaggcctggtagtccagtcttgagtttggtgctggagcatttgtaatgttccggtaaaatgtaatgcgtccatgagtgctgtccaggcagtaagcacacctgtggatcggggccggcgcaaggtccctaggcaagctgcaggattagtggggctattcatgtttagggcgcgaatgcaacgaaattacccgtgggccgtgggctcggtatgtaacagaaccgattatttctattacaataataacatgcagttctattgggccgagcctaatcaggcaccacgaatgtgaataattgcacatggcgcatatatggcgggcagtagatacatataaaatggagaaaatccgtttattgccatcaaaacttatactgatcactacaataccatctaaaatgatgtgctcccttc

SEQ ID NO: 4286 - DNA, 1658 bp, Zea Mays
catcccgtgggcgcgcggctgtcgacctgcgcatcagcttctatgattagccaggagcaataatttattactcctatttgccaggcgacgttcgtccaattcgacccggcaggcagcaggcagcagctgtgctcctgtgggtgggtgggtcatgggtgaccacatgcatcgatggagccagggccgccgtgtgcgcagccaactctacctatccccgcccccgggatgggcgatggcaactatcctatcgcaacaatatcctggggtgggggctataaaacggagcggcccgcgtggggcgcgcctccatcagccgcagtcgcgtcgcgtcgcgtcgcgtccagtccaatcctcggagcctcacacgggcggacgagcgggagcttctcccaatctcccctgccctgccctgccctgccgccgcgcttagcttcgcatcttcccctcctcctcctcctccttcctcggccaagcgaggagcgaggcgcgggcgcgagcgcgtcgttgagatggattcggaggcggtgcagcacgggtgatctgttctctctgctccaaggaacaggacgtgcaacagaactgctccagctgtggggcctgcatgggcaagtacttctgtaaagtatgcaagttcttcgatgatgatgtctcaaagggccagtaccactgtgacggatgtggaatatgtagaaccggcggcgtggagaactttttccactgtgataaatgtgggtgttgctacagcaatgtcttgaaggattcccaccactgcgtcgaaagagcaatgcatcacaactgccccgtctgctttgagtatctgttcgactccacgaaggacatcagcgtgctgcaatgtgggcataccatccatttggagtgcatgaacgagatgagagcacaccatcacttctcatgcccagtgtgctcgaggtccgcctgcgacatgtcggccacatggcggaagctcgacgaggaggtcgcggccacgccgatgcctgacatctaccagaagcacatggtgtggatcctgtgcaacgactgcagcgcgacctcgagcgtgcggttccacgtgctggggcacaagtgccccgcgtgcagctcgtacaacacccgggagacgagggctgcgtgccccaggatctgaggcgaaccagaggccatgtcacaaaatgccagggagatgccgtccaacgatcatctgtctgcaggacgttgctgcgcttaaggttaaaggctagcgcgagaccaggcctggtagtccagtcttgagtttggtgctggagcatttgtaatgttccggtaaaatgtaatgcgtccatgagtgctgtccaggcagtaagcacacctgtggatcggggccggcgcaaggtccctaggcaagctgcaggattagtggggctattcatgtttagggcgcgaatgcaacgaaattacccgtgggccgtgggctcggtatgtaacagaaccgattatttctattacaataataacatgcagttctattgggccgagcctaatcaggcaccacgaatgtgaataattgcacatggcgcatatatggcgggcagtagatacatataaaatggagaaaatccgtttattgccatcaaaacttatactgatcactacaataccatctaaaatgatgtgctcccttc

SEQ ID NO: 4287 - DNA, 2681 bp, Zea Mays
ccgccgtgtgcgcagccaactctacctatccccgcccccgggatgggcgatggcaactatcctatcgcaacaatatcctggggtgggggctataaaacggagcggcccgcgtggggcgcgcctccatcagccgcagtcgcgtcgcgtcgcgtcgcgtccagtccaatcctcggagcctcacacgggcggacgagcgggagcttctcccaatctcccctgccctgccctgccctgccgccgcgcttagcttcgcatcttcccctcctcctcctcctccttcctcggccaagcgaggagcgaggcgcgggcgcgagcgcgtcgttgagatggattcggaggcggtgcagcacggctgcgcgcattacagccgtgggtgcagcgtcgtggcgccctgctgcggccaggccttcggctgccgccattgccacaacgacgccaagaactcgctggaggtcgacccgcgcgaccggcacgagatcccccgccacgaaataaagaaggtcagcgttccctccctctgctcaaagagcaatctcctgcctgtttcaaccattgcctatctcgtgttcgtctttgttattaccgtgagcaaagaaaggaagaaacaaacaagagcgccgccttctctcttctccttctccatgtaatggagcatttgttccgccgcgtagtcgagtgcaagcagcggttttcctcttttggaaacccacccccacgcacggttccgttccaatctcgcccttccaattgaccaacacaaacctttcctaagatttcttgtcctccttacccttctacagacaagtacgaaacgcaatcgcacaaggttatactactactagcttttagtgttctagcgaccttagatttttttttttggttaggcatccctgatttttctcacacttaaaagcttcttcagataaggccatatcagctcagctcagtgctctgggagccgttctgcacttcacttgcgtgtcactaaaaacttgactgctttccgcgatgtgctccgcaccaagtggccggcactgcgtggtccacaggatttttcaagagaaagccggggtcacgggtgccacttgaagccaaggacaggcgtctgggattggagaatatatgagaaagggataccgtcagaggcacatctcaccgtcaaactgaacagggtctaactgcttccagctgatttgattgagtttgagtgctgcatagttgaggacctggatatagtgacgtgtcctgacaggtgtctttggacctattagcagtgaatctgacgtcgatcggctaaagcaatcatgttcgattcttatccttttttttttgagagtatatgcctgattcgataaacgttcctatcctgtttcctgatgatgcatatatgttgtttcgattcatatagaatcataccatccatctattttgtttaaaaaaaaaatttctgggtggccatgggcacagcatgcctgttcttaagataacgattccagtaactgttcccttctgtcactgaactcatatgaatcgagacttaactggagctgttgcgcaggtgatctgttctctctgctccaaggaacaggacgtgcaacagaactgctccagctgtggggcctgcatgggcaagtacttctgtaaagtatgcaagttcttcgatgatgatgtctcaaagggccagtaccactgtgacggatgtggaatatgtagaaccggcggcgtggagaactttttccactgtgataaatgtgggtgttgctacagcaatgtcttgaaggattcccaccactgcgtcgaaagagcaatgcatcacaactgccccgtctgctttgagtatctgttcgactccacgaaggacatcagcgtgctgcaatgtgggcataccatccatttggagtgcatgaacgagatgagagcacaccatcacttctcatgcccagtgtgctcgaggtccgcctgcgacatgtcggccacatggcggaagctcgacgaggaggtcgcggccacgccgatgcctgacatctaccagaagcacatggtgtggatcctgtgcaacgactgcagcgcgacctcgagcgtgcggttccacgtgctggggcacaagtgccccgcgtgcagctcgtacaacacccgggagacgagggctgcgtgccccaggatctgaggcgaaccagaggccatgtcacaaaatgccagggagatgccgtccaacgatcatctgtctgcaggacgttgctgcgcttaaggttaaaggctagcgcgagaccaggcctggtagtccagtcttgagtttggtgctggagcatttgtaatgttccggtaaaatgtaatgcgtccatgagtgctgtccaggcagtaagcacacctgtggatcggggccggcgcaaggtccctaggcaagctgcaggattagtggggctattcatgtttagggcgcgaatgcaacgaaattacccgtgggccgtgggctcggtatgtaacagaaccgattatttctattacaataataacatgcagttctattgggccgagcctaatcaggcaccacgaatgtgaataattgcacatggcgcatatatggcgggcagtagatacatataaaatggagaaaatccgtttattgccatcaaaacttatactgatcactacaataccatctaaaatgatgtgctcccttc

SEQ ID NO: 4288 - DNA, 1610 bp, Zea Mays
cgtgtgcgcagccaactctacctatccccgcccccgggatgggcgatggcaactatcctatcgcaacaatatcctggggtgggggctataaaacggagcggcccgcgtggggcgcgcctccatcagccgcagtcgcgtcgcgtcgcgtcgcgtccagtccaatcctcggagcctcacacgggcggacgagcgggagcttctcccaatctcccctgccctgccctgccctgccgccgcgcttagcttcgcatcttcccctcctcctcctcctccttcctcggccaagcgaggagcgaggcgcgggcgcgagcgcgtcgttgagatggattcggaggcggtgcagcacggctgcgcgcattacagccgtgggtgcagcgtcgtggcgccctgctgcggccaggccttcggctgccgccattgccacaacgacgccaagaactcgctggaggtcgacccgcgcgaccggcacgagatcccccgccacgaaataaagaaggtgatctgttctctctgctccaaggaacaggacaactgctccagctgtggggcctgcatgggcaagtacttctgtaaagtatgcaagttcttcgatgatgatgtctcaaagggccagtaccactgtgacggatgtggaatatgtagaaccggcggcgtggagaactttttccactgtgataaatgtgggtgttgctacagcaatgtcttgaaggattcccaccactgcgtcgaaagagcaatgcatcacaactgccccgtctgctttgagtatctgttcgactccacgaaggacatcagcgtgctgcaatgtgggcataccatccatttggagtgcatgaacgagatgagagcacaccatcacttctcatgcccagtgtgctcgaggtccgcctgcgacatgtcggccacatggcggaagctcgacgaggaggtcgcggccacgccgatgcctgacatctaccagaagcacatggtgtggatcctgtgcaacgactgcagcgcgacctcgagcgtgcggttccacgtgctggggcacaagtgccccgcgtgcagctcgtacaacacccgggagacgagggctgcgtgccccaggatctgaggcgaaccagaggccatgtcacaaaatgccagggagatgccgtccaacgatcatctgtctgcaggacgttgctgcgcttaaggttaaaggctagcgcgagaccaggcctggtagtccagtcttgagtttggtgctggagcatttgtaatgttccggtaaaatgtaatgcgtccatgagtgctgtccaggcagtaagcacacctgtggatcggggccggcgcaaggtccctaggcaagctgcaggattagtggggctattcatgtttagggcgcgaatgcaacgaaattacccgtgggccgtgggctcggtatgtaacagaaccgattatttctattacaataataacatgcagttctattgggccgagcctaatcaggcaccacgaatgtgaataattgcacatggcgcatatatggcgggcagtagatacatataaaatggagaaaatccgtttattgccatcaaaacttatactgatcactacaataccatctaaaatgatgtgctcccttc

SEQ ID NO: 4289 - DNA, 1640 bp, Zea Mays
ccactgcccgccgtgtcaaaagaggcctgcccaagacctagaggctagagcctcggcgtacgtacgctcctagcagtggtacatcaccgctacgattccgggcggatgaagccatctgtgggaggcagaaatcaaggcggcgtccgtgcgtgagcacctcacaccaggaagatggcgcactcaacctttcttctgctgtgccatcgccatcacccgcacgggagaactttggaaacgcgcctcaattattgccccttttttttcattccgagtctactattgtacctctccgtgggggcgatccgccatttgtgccaattctagcatcagcgtccgatcgaccaggagtgtgaagtaggtgtgggagatcaagggcacgagcgacccggccaagtgtggattttaaaatcaagttccttacagttggtggaaagaaactaaagttgacaatatgggataccgctggccaggagaggtttaggacaataactagttcttactacagaggtgctcagggaattattttagtatgatgtcacaaagagagagagtttctcaaatttggctgatgtttggactaaggaaatagaagcaaactcaacaaacaaagactgcataaaaatgcttgttggaaacaaagttgacaaggatgatgaaagaatggtcacagaagaagaaggtcttgcttttgctgaagaatctggttgtctgtttcttgagagcagtgcaaaaacacgagaaaatgttgagaaatgttttgaagaacttgcattgaagatccttgaggtccctagtctcctggaggaagggtcttcttcggttgtcaagaggaacatcctgaaacagaagcaggaaagtcatgcaaagaacggcagtggatgctgtcaatagatgtgctgatccacgcgacaaggttggctgttttcgtgtgagctgccctgacgttctgctgtacatgagttgtatctacatggtcttgtgagtaaaacagggttaaagaatcagcttgtttggcggggagggggagtgagcataattgatttgtacaaaggacatggcagtttggtgtcattgattttctctctctctcttatcatctccggtttagcgaagcaattttgttgtcgtccctatggaatcctctctcgccacagtattgtactagctgacctgttggggcaactcgtgtgagcattgggcagaccaactccagcaacgctatacatacgggcgtgtataacactttacagtgtagatgtactatttgcagagtggagtttgaaatagagtgatactttgaaatagagagtgatactgggagtggaataggaaggcttagtagtagcgccgatgttggttagtagtcgttggctatatcattttctaccgtgtttggttgggaagtaaatgggatggtttggtaacaaaaatacctagggatacaatcatttcatgtgagaaatatttctgttagggcttgtttaggagctagaatactagagaggattcgataccagaggatattagaggggctaaaatctctctgctatattcaattatgaatatatgattttagtccctccaatcctcttcggtattcttctcccaaacaagcccttagatgctaacaaaatcttaga

SEQ ID NO: 4290 - DNA, 1378 bp, Zea Mays
attccgagtctactattgtacctctccgtgggggcgatccgccatttgtgccaattctagcatcagcgtccgatcgaccaggagtgtgaagtaggtgtgggagatcaagggcacgagcgacccggccaagtgtggattttaaaatcaagttccttacagttggtggaaagaaactaaagttgacaatatgggataccgctggccaggagaggtttaggacaataactagttcttactacagaggtgctcagggaattattttagtatatgatgtcacaaagagagagagtttctcaaatttggctgatgtttggactaaggaaatagaagcaaactcaacaaacaaagactgcataaaaatgcttgttggaaacaaagttgacaaggatgatgaaagaatggtcacagaagaagaaggtcttgcttttgctgaagaatctggttgtctgtttcttgagagcagtgcaaaaacacgagaaaatgttgagaaatgttttgaagaacttgcattgaagatccttgaggtccctagtctcctggaggaagggtcttcttcggttgtcaagaggaacatcctgaaacagaagcaggaaagtcatgcaaagaacggcagtggatgctgtcaatagatgtgctgatccacgcgacaaggttggctgttttcgtgtgagctgccctgacgttctgctgtacatgagttgtatctacatggtcttgtgagtaaaacagggttaaagaatcagcttgtttggcggggagggggagtgagcataattgatttgtacaaaggacatggcagtttggtgtcattgattttctctctctctcttatcatctccggtttagcgaagcaattttgttgtcgtccctatggaatcctctctcgccacagtattgtactagctgacctgttggggcaactcgtgtgagcattgggcagaccaactccagcaacgctatacatacgggcgtgtataacactttacagtgtagatgtactatttgcagagtggagtttgaaatagagtgatactttgaaatagagagtgatactgggagtggaataggaaggcttagtagtagcgccgatgttggttagtagtcgttggctatatcattttctaccgtgtttggttgggaagtaaatgggatggtttggtaacaaaaatacctagggatacaatcatttcatgtgagaaatatttctgttagggcttgtttaggagctagaatactagagaggattcgataccagaggatattagaggggctaaaatctctctgctatattcaattatgaatatatgattttagtccctccaatcctcttcggtattcttctcccaaacaagcccttagatgctaacaaaatcttaga

SEQ ID NO: 4291 - DNA, 1309 bp, Zea Mays
cttttgggaaattttgcccatggtgtaactgatgtaccttgccctagaccttgtgcacaggtgtggattttaaaatcaagttccttacagttggtggaaagaaactaaagttgacaatatgggataccgctggccaggagaggtttaggacaataactagttcttactacagaggtgctcagggaattattttagtatatgatgtcacaaagagagagagtttctcaaatttggctgatgtttggactaaggaaatagaagcaaactcaacaaacaaagactgcataaaaatgcttgttggaaacaaagttgacaaggatgatgaaagaatggtcacagaagaagaaggtcttgcttttgctgaagaatctggttgtctgtttcttgagagcagtgcaaaaacacgagaaaatgttgagaaatgttttgaagaacttgcattgaagatccttgaggtccctagtctcctggaggaagggtcttcttcggttgtcaagaggaacatcctgaaacagaagcaggaaagtcatgcaaagaacggcagtggatgctgtcaatagatgtgctgatccacgcgacaaggttggctgttttcgtgtgagctgccctgacgttctgctgtacatgagttgtatctacatggtcttgtgagtaaaacagggttaaagaatcagcttgtttggcggggagggggagtgagcataattgatttgtacaaaggacatggcagtttggtgtcattgattttctctctctctcttatcatctccggtttagcgaagcaattttgttgtcgtccctatggaatcctctctcgccacagtattgtactagctgacctgttggggcaactcgtgtgagcattgggcagaccaactccagcaacgctatacatacgggcgtgtataacactttacagtgtagatgtactatttgcagagtggagtttgaaatagagtgatactttgaaatagagagtgatactgggagtggaataggaaggcttagtagtagcgccgatgttggttagtagtcgttggctatatcattttctaccgtgtttggttgggaagtaaatgggatggtttggtaacaaaaatacctagggatacaatcatttcatgtgagaaatatttctgttagggcttgtttaggagctagaatactagagaggattcgataccagaggatattagaggggctaaaatctctctgctatattcaattatgaatatatgattttagtccctccaatcctcttcggtattcttctcccaaacaagcccttagatgctaacaaaatcttaga

SEQ ID NO: 4292 - DNA, 1303 bp, Zea Mays
ctgtgttgcttgcttctggtgtgtgacactcttagagcaactccaaaagactaggtgtggattttaaaatcaagttccttacagttggtggaaagaaactaaagttgacaatatgggataccgctggccaggagaggtttaggacaataactagttcttactacagaggtgctcagggaattattttagtatatgatgtcacaaagagagagagtttctcaaatttggctgatgtttggactaaggaaatagaagcaaactcaacaaacaaagactgcataaaaatgcttgttggaaacaaagttgacaaggatgatgaaagaatggtcacagaagaagaaggtcttgcttttgctgaagaatctggttgtctgtttcttgagagcagtgcaaaaacacgagaaaatgttgagaaatgttttgaagaacttgcattgaagatccttgaggtccctagtctcctggaggaagggtcttcttcggttgtcaagaggaacatcctgaaacagaagcaggaaagtcatgcaaagaacggcagtggatgctgtcaatagatgtgctgatccacgcgacaaggttggctgttttcgtgtgagctgccctgacgttctgctgtacatgagttgtatctacatggtcttgtgagtaaaacagggttaaagaatcagcttgtttggcggggagggggagtgagcataattgatttgtacaaaggacatggcagtttggtgtcattgattttctctctctctcttatcatctccggtttagcgaagcaattttgttgtcgtccctatggaatcctctctcgccacagtattgtactagctgacctgttggggcaactcgtgtgagcattgggcagaccaactccagcaacgctatacatacgggcgtgtataacactttacagtgtagatgtactatttgcagagtggagtttgaaatagagtgatactttgaaatagagagtgatactgggagtggaataggaaggcttagtagtagcgccgatgttggttagtagtcgttggctatatcattttctaccgtgtttggttgggaagtaaatgggatggtttggtaacaaaaatacctagggatacaatcatttcatgtgagaaatatttctgttagggcttgtttaggagctagaatactagagaggattcgataccagaggatattagaggggctaaaatctctctgctatattcaattatgaatatatgattttagtccctccaatcctcttcggtattcttctcccaaacaagcccttagatgctaacaaaatcttaga

SEQ ID NO: 4293 - DNA, 1212 bp, Zea Mays
gcacccgcaccactgtgccgcgcttgggagagctggccaggagaggtttaggacaataactagttcttactacagaggtgctcagggaattattttagtatatgatgtcacaaagagagagagtttctcaaatttggctgatgtttggactaaggaaatagaagcaaactcaacaaacaaagactgcataaaaatgcttgttggaaacaaagttgacaaggatgatgaaagaatggtcacagaagaagaaggtcttgcttttgctgaagaatctggttgtctgtttcttgagagcagtgcaaaaacacgagaaaatgttgagaaatgttttgaagaacttgcattgaagatccttgaggtccctagtctcctggaggaagggtcttcttcggttgtcaagaggaacatcctgaaacagaagcaggaaagtcatgcaaagaacggcagtggatgctgtcaatagatgtgctgatccacgcgacaaggttggctgttttcgtgtgagctgccctgacgttctgctgtacatgagttgtatctacatggtcttgtgagtaaaacagggttaaagaatcagcttgtttggcggggagggggagtgagcataattgatttgtacaaaggacatggcagtttggtgtcattgattttctctctctctcttatcatctccggtttagcgaagcaattttgttgtcgtccctatggaatcctctctcgccacagtattgtactagctgacctgttggggcaactcgtgtgagcattgggcagaccaactccagcaacgctatacatacgggcgtgtataacactttacagtgtagatgtactatttgcagagtggagtttgaaatagagtgatactttgaaatagagagtgatactgggagtggaataggaaggcttagtagtagcgccgatgttggttagtagtcgttggctatatcattttctaccgtgtttggttgggaagtaaatgggatggtttggtaacaaaaatacctagggatacaatcatttcatgtgagaaatatttctgttagggcttgtttaggagctagaatactagagaggattcgataccagaggatattagaggggctaaaatctctctgctatattcaattatgaatatatgattttagtccctccaatcctcttcggtattcttctcccaaacaagcccttagatgctaacaaaatcttaga

SEQ ID NO: 4294 - DNA, 1411 bp, Zea Mays
caaaggtatctaggtgcttcaccatgttacctctgtctactactgctagaacttgaaggtttctaagttatctattaacggcataaattatgttaccttgttttctgatattttcaatattccaaaaacttggaggccatcgtgtgctttttgtttatgtttatttgtgggttggatctctcaagagcttgtggttgcactgtagcctgttgaggcgtgcctgccatcaagctggccaggagaggtttaggacaataactagttcttactacagaggtgctcagggaattattttagtatatgatgtcacaaagagagagagtttctcaaatttggctgatgtttggactaaggaaatagaagcaaactcaacaaacaaagactgcataaaaatgcttgttggaaacaaagttgacaaggatgatgaaagaatggtcacagaagaagaaggtcttgcttttgctgaagaatctggttgtctgtttcttgagagcagtgcaaaaacacgagaaaatgttgagaaatgttttgaagaacttgcattgaagatccttgaggtccctagtctcctggaggaagggtcttcttcggttgtcaagaggaacatcctgaaacagaagcaggaaagtcatgcaaagaacggcagtggatgctgtcaatagatgtgctgatccacgcgacaaggttggctgttttcgtgtgagctgccctgacgttctgctgtacatgagttgtatctacatggtcttgtgagtaaaacagggttaaagaatcagcttgtttggcggggagggggagtgagcataattgatttgtacaaaggacatggcagtttggtgtcattgattttctctctctctcttatcatctccggtttagcgaagcaattttgttgtcgtccctatggaatcctctctcgccacagtattgtactagctgacctgttggggcaactcgtgtgagcattgggcagaccaactccagcaacgctatacatacgggcgtgtataacactttacagtgtagatgtactatttgcagagtggagtttgaaatagagtgatactttgaaatagagagtgatactgggagtggaataggaaggcttagtagtagcgccgatgttggttagtagtcgttggctatatcattttctaccgtgtttggttgggaagtaaatgggatggtttggtaacaaaaatacctagggatacaatcatttcatgtgagaaatatttctgttagggcttgtttaggagctagaatactagagaggattcgataccagaggatattagaggggctaaaatctctctgctatattcaattatgaatatatgattttagtccctccaatcctcttcggtattcttctcccaaacaagcccttagatgctaacaaaatcttaga

SEQ ID NO: 4295 - DNA, 888 bp, Zea Mays
ataatcctctcctaaccgaacaaggatccttgaggtccctagtctcctggaggaagggtcttcttcggttgtcaagaggaacatcctgaaacagaagcaggaaagtcatgcaaagaacggcagtggatgctgtcaatagatgtgctgatccacgcgacaaggttggctgttttcgtgtgagctgccctgacgttctgctgtacatgagttgtatctacatggtcttgtgagtaaaacagggttaaagaatcagcttgtttggcggggagggggagtgagcataattgatttgtacaaaggacatggcagtttggtgtcattgattttctctctctctcttatcatctccggtttagcgaagcaattttgttgtcgtccctatggaatcctctctcgccacagtattgtactagctgacctgttggggcaactcgtgtgagcattgggcagaccaactccagcaacgctatacatacgggcgtgtataacactttacagtgtagatgtactatttgcagagtggagtttgaaatagagtgatactttgaaatagagagtgatactgggagtggaataggaaggcttagtagtagcgccgatgttggttagtagtcgttggctatatcattttctaccgtgtttggttgggaagtaaatgggatggtttggtaacaaaaatacctagggatacaatcatttcatgtgagaaatatttctgttagggcttgtttaggagctagaatactagagaggattcgataccagaggatattagaggggctaaaatctctctgctatattcaattatgaatatatgattttagtccctccaatcctcttcggtattcttctcccaaacaagcccttagatgctaacaaaatcttaga

SEQ ID NO: 4296 - DNA, 1145 bp, Zea Mays
ccggcagtctgcgatcaaaccgcacgcaagcgaaccacagcgtgctcgccatctcactgactgtgacgacggcaacaagccagtgagcagctcgccatggcagcagtgtccaccgcgccggcgctcgaaggccgcatcgcgctcgtcaccggtggctcccggggcatcggccgcgaggtgtcgtcccacctcgccgcgctcggcgcgcgtgtcgtggtcaactacgccaccaacccggccaaggccgaggagctcgtcgcggagctcgcctcgcgcggcctccgcgccgtggccgtgcgcgcggacgtctccgacccggccgccgtgcgcgcgctcttcgaccgcgccgaggaggcattcgggtccccgccccacgtagtggtcgcctgcgcgggcatcatggacgccaagtaccccgcgctggccgacactgccgtcgaggacttcgacgccacgttcgcggtgaacacgcgcggcaagttcctggtgtgccgggaggccgcccggcgcatcccccccaacagcggtgggcgcatcatgacgttctcgtccacgacggttgccgtgctgccgccgggctacgcggcgtacgctgcgtccaacgccgctgtggaggcgatgacgagggtcctggccaaggaggtggcggcgaaggggatcacggccaacgtggtggcgccgggccctgtgcgcacggagctcttccttgccgggaaggatgaggcgttcctagagaggataaagaactccatgggtatagccgagacgacagacatagcgcccgtggtggcgttcctggcgagcgaggcctcgggctgggtgaacgggcaggttatcagggtcaatgggggcgtcgcatgagtgcggcgttgttattattacctcattatctgccatggctttccaaggatgttgttttcctgacgtgtctatctacgtgactgaatgaaaaaggttgtacatctcgggctccatagaagtagttttcagttgtacatttctacggttctttgggagaaatatcgtagcaaagtattatgctcacaattttcaggcagtcaccttcgcctattatcatcatccgcgccttcatcgaacacaccagatgagccaacacggaagtcgagctgcttctgatgtttctg

SEQ ID NO: 4297 - DNA, 818 bp, Zea Mays
cttcaacggacgatgtttttggggcctttttcctttttcctcgtttcactttagtttagtttgtttagttttcttattttaccttcttttgttcgtccttttgtttaattttcatcgcttcactttattaggttggccattatattgggctctacgaaagacatgggacatataaccgggcgcatgaagacaagagcgagcttccaacgcactgttctaccagcaataaagtcactgggttgcagttggcacagggtactcacgcccaccgagtctcatctctcgagaacatgcagggtagacttatttgcgcagctagcatccaatttgttggtctccatagacgacggcggccttctactcgcagggacaaggaaataacaagtcggcacagacaaccgtattgtctgtctaacttttgctaaacattcaaatttgtcatatccttcaaaaatcaaaaagttacttggaatggaaacgacgacgactcccgcaaaagtctactatatatgtatagctagcttgctagccctgatgtgttcagtttggtctttcttcttgtcgcaatgaccgtgtgattcatcaaactaaaacagtgatatatctctcatcatatgatatgacgaatttgaactttaagttttatacagcggtaaagtatgcaattaagtatatctataatttttttgagaatttttataacttttgctaaaattatacacaaatagcaatttgaaccatggttgatggcactaacccacattcgcacctacctagccaacagatcacatatgtttctgttttatactctattcaag

SEQ ID NO: 4298 - DNA, 1059 bp, Zea Mays
ccaaattaaaatttacagtgaaagatgaagcaggtcgtgtaagtaactggagttgccaaaactgatacggtagtcggattaacaaaactcgaagtcgctctcaagaaaatgaccacagatgagcatgaagtatggacagaatgcaatagcaaaccgaataatcctatctcacaaaaagcgaagataaagaaaatgagctcacgaagaagaaggcatgcatcatgcaccgctctcttccaagtgtcaacaaagtggcaagcactagttcacttccctggtcatcgtttcacacgcatccaagaagctctacgtgctctggtctttgacggttttagaccatgcagagacactcagctgccaagccatgcacggctgcaccctataaatacacggcctccagttcactccacacagcacgcaagcacacacaacaaccacactcttgcaccgagctagcagccaagatggcgaccaaacacctggctctttgcctccttgttctctttagcataggcatgggcatggtggcggtggtggtggtggccaaggtgggtctggctatggctctggttcaggatatggatcaggtgaaggatacggacaaggtggtggtggctctggctatggatctggatccggctccggttatggaggcggcaacgacaacggacattattaggctctttttaagagctagatacatgttatacaaatatgtcaccagacatgagtctgtcttgttgcatgggatgctagctgtgtccatcgtgtgtgtaacaccgcaaggcttgtgatttgtcctgtaaactgcttgccgctttacattactggcaacaactaagtgataaataaaaatcatctatggaattatagtatgaacacttgagataaggcttgtgtgatgtggcttttgtgctacaaagtgaacccaacaagagctataatcattttcggcggccactactattttccgcatccagaggacaaccgcaaccgccgaaagtaaacgttattttcggcggctgtcctctggccaccgaaaatagacgttattttcgg

SEQ ID NO: 4299 - DNA, 1402 bp, Zea Mays
aagatgaagcaggtcgtgtaagtaactggagttgccaaaactgatacggtagtcggattaacaaaactcgaagtcgctctcaagaaaatgaccacagatgagcatgaagtatggacagaatgcaatagcaaaccgaataatcctatctcacaaaaagcgaagataaagaaaatgagctcacgaagaagaaggcatgcatcatgcaccgctctcttccaagtgtcaacaaagtggcaagcactagttcacttccctggtcatcgtttcacacgcatccaagaagctctacgtgctctggtctttgacggttttagaccatgcagagacactcagctgccaagccatgcacggctgcaccctataaatacacggcctccagttcactccacacagcacgcaagcacacacaacaaccacactcttgcaccgagctagcagccaagatggcgaccaaacacctggctctttgcctccttgttctctttagcataggcatgggcatggccaccgctgctgcaaaccgcaaactgggctatgggtccggatcagggtatggtgagggcggtggcagcggaggtgctgctggagggtatggacatggtggtggcggcggcggcggtggtggtgagggtgcgggagctggtggctctgggtatgggtccgggcaaggatctggctacggagctggcagcggtgctgccggtggatatgggagtggcggaggtggtggaggtggcggtggccagggtggtggttccggatatggccatggaggtggtgaaggatacggctctgggtctggctttggtggtggtgctgccggcggcggcggtggacatggtggcggtggtggtggtggccaaggtgggtctggctatggctctggttcaggatatggatcaggtgaaggatacggacaaggtggtgctcatggaggaggctatggaagtggtggtggctctggctatggatctggatccggctccggttatggaggcggcaacgacaacggacattattaggctctttttaagagctagatacatgttatacaaatatgtcaccagacatgagtctgtcttgttgcatgggatgctagctgtgtccatcgtgtgtgtaacaccgcaaggcttgtgatttgtcctgtaaactgcttgccgctttacattactggcaacaactaagtgataaataaaaatcatctatggaattatagtatgaacacttgagataaggcttgtgtgatgtggcttttgtgctacaaagtgaacccaacaagagctataatcattttcggcggccactactattttccgcatccagaggacaaccgcaaccgccgaaagtaaacgttattttcggcggctgtcctctggccaccgaaaatagacgttattttcgg

SEQ ID NO: 4300 - DNA, 1312 bp, Zea Mays
aataatcctatctcacaaaaagcgaagataaagaaaatgagctcacgaagaagaaggcatgcatcatgcaccgctctcttccaagtgtcaacaaagtggcaagcactagttcacttccctggtcatcgtttcacacgcatccaagaagctctacgtgctctggtctttgacggttttagaccatgcagagacactcagctgccaagccatgcacggctgcaccctataaatacacggcctccagttcactccacacagcacgcaagcacacacaacaaccacactcttgcaccgagctagcagccaagatggcgaccaaacacctggctctttgcctccttgttctctttagcataggcatgggcatggccaccgctgctgcaaaccgcaaactgggttatggccccgggggaggaggtggcggtggtggtagcggtggcggtggaggcggtggttacggaggaccaggctatgggtccggatcagggtatggtgagggcggtggcagcggaggtgctgctggagggtatggacatggtggtggcggcggcggcggtggtggtgagggtgcgggagctggtggctctgggtatgggtccgggcaaggatctggctacggagctggcagcggtgctgccggtggatatgggagtggcggaggtggtggaggtggcggtggccagggtggtggttccggatatggccatggaggtggtgaaggatacggctctgggtctggctttggtggtggtgctgccggcggcggcggtggacatggtggcggtggtggtggtggccaaggtgggtctggctatggctctggttcaggatatggatcaggtgaaggatacggacaaggtggtggtggctctggctatggatctggatccggctccggttatggaggcggcaacgacaacggacattattaggctctttttaagagctagatacatgttatacaaatatgtcaccagacatgagtctgtcttgttgcatgggatgctagctgtgtccatcgtgtgtgtaacaccgcaaggcttgtgatttgtcctgtaaactgcttgccgctttacattactggcaacaactaagtgataaataaaaatcatctatggaattatagtatgaacacttgagataaggcttgtgtgatgtggcttttgtgctacaaagtgaacccaacaagagctataatcattttcggcggccactactattttccgcatccagaggacaaccgcaaccgccgaaagtaaacgttattttcggcggctgtcctctggccaccgaaaatagacgttattttcgg

SEQ ID NO: 4301 - DNA, 3008 bp, Zea Mays
cgagctgagtccaccagaccaccacccatgacagtccataaccctctcgtttattttgcgccatcttcctcgcctcctccacagcaagtccacctcccgactctaccaaaatcccaaaccctagcgcccagcctcatcagatccctctccaccttcagcccttgagcgctgtacgcaccatgcggatccgcaagagcgcctcccgcctcctaggctctgcgtattccgcctccgctgcatcgcccgttgattcgacgcctccgttcagcccgcttccgccgccgccgccgccgccgccgccacacctggcgccgtgctccgcgcccgaatactgcggagggctcggcttctcgagcccctcttcttcttctgcggagccctgcgagctcagccgctcgccatgggacctcatcgccgagctctccgtctccgacccacaggtcagcgccgcggctccccacactctcctcctcactctctgctctcagttgtgcggttcggggtgactctgtgcttcatgcgccgcaaactcgctgctttggtgagtcgcagcagcagcgttgcccctgtcgctgtgttcggttcgtctatgtcgctagggttggccggcgggtcttaatagccgtccagcgggctgtttcggctgcagatactcgcctggctagtgcctaggagcggttagctactcttccctcgtgctaatttcgggaccgcggcccgccaagatttggaatcgctgcggcggcggccggggccgagccctagatccgtgcccccatttcgtcccttctgcggttagggaatgcgtctgtgcgtgcttttgtttcgattaatcagcttgtttggctgtttcattgaattaggtggaggatgacatcgtagacaagtacttcgtccatgtcgcaacgcgttcgagctggctcttctcagccaccgttccagccgcctccgccaagaagaagagtagtagcacgagtggggatagcaagcacaagcagcagctgcgccgtgacgctgtgaataagtctgcaacgagtaaagagaaggttggcgaggctaataagaaggcaaaggtcaagaaagaggaggaggggcaggatggggataggggagcgcgggtctggctgtgcaagaagaatgacggcaaacggtggcactgcaaccggccagtgagccaacccaacaccctctgtgagtaccattctgtgcagaagcgctcctacttggaggccccctctgtggcaaaattggaggaggctccggcgccggcgccagcagctgcccccaagtcctccgcacgcaacaagccgaggaagaagaagcctggcagtgacgtgagtgcgactgagggcttctactactacgctgggttcggcccattccggtcaacgaagaggcagtgtaaaagcggcggcacgaacgaacctgcgcctgcaaaggaagacgacgagggtaatcaggcaaaacatgcttctccgggtcagaaggctgaggtcgatgagggtcatcatgatgacaccaccaccaaccagaccgccactgcagcctatggtgatacgtctagctgcgaagatgacatagcagggacgatcgccggcgtggatgaggggagcagcgacgacgacgacttcgatggacttggtatctctggccacagcatgaacgggaatggcgatcccaaagctagcagtggtgatgtcaagacgaagatcccgtggaagcggtggaggaagcccgtgaaggcgcggtcgctcaagtccttgatgtaagcacctacgttacgttacgtaacgtaacgtacgtgcatcagcgacgacgtcgaagaaatgctagctgcaggtggaggacgaactcgtggacaagtactttgtgcatgtcacgacccgggcgagctggctcttttcatccaccgtgtcagccaccacatccaccaagaagaagaagaagctgcctgctgcagtctacgaggatagcacgcagctgaggcgtgaggccgcgaaaaaaactgcaacgaatagggaggagggcgagactaagaagaaggcgaaggtgaagaaagaagaggtgcagcaggatggggcagcagcagcagcagcgcaggtctggaagtgcaagaagaacgatggcagacggtggcactgcaaccggccagtgagccaacctaacaccctctgtgagtaccatttcgtgcagaagcgctcctacttgaaccccggtttcgagttccactccacggcagaactggagggggcagcgccagcgccagcgccggtgcatgcagctagctccaagttgtccaccagcaacaagccacggaagaagaagaagcctggaaacgacttcagtgcgaccgagggcttctactactacgctggctttggcccgttccggaccaagaggcagtgtagaagcggcggcacgaacgagcctctgcctgcaaagcaagaagaggaggaggaaacacctgaatatgcttctcatcatacagaagaagaagaaaaagaagccaaagttgctggattcaccaatcaggctgcatctcaagatgacgtgtcgagttgtgacgacgacattgcagggatcgcgggcgtcgacgaagagagcagcgatggtgactacgatgggattggtctcggtggctgcaacgtggatggagctgctgatccccaggctagcatcggtgaggtgaggaggaaggccccctggaagcggtggaggaagcctgtgaaggcgcggtcgctcaagtctttgatgtgagcacgcaagcgcccgcgttactcttccatctccgtggtgtagatgtagaagataagttaatcggcagcttggcttattcgcttgctaactcctgttccttctgatttgtagctgttgttgattgacggactgtttgacttcttcgtgttggttggttgttccatggttgtacaacgttggttgccaacttgccattcgttttcatgttggagtattgggtcttggaaagttggaagcaatatcgtgattcg

SEQ ID NO: 4302 - DNA, 1471 bp, Zea Mays
aaacggagcctacggaatcggacgcacctacccgtcaccctctctcgttcattttgcgccatcttcctcgcctcctccacaagtccacctcccgactctaccaaaatcccaaaccctagacctccaggctcagatccctccccccaccttcaccccttcagagacgaacgcaacatgcggatccgcaagagtgcctctcgcctcctaggctctgcgtactccgcctccgccgccccgaccgttgatgcggcgcctcggctcgacctgctgccgccgccgcaccccgcgccgtgctccgcacccgaatcctgcggcgggtccgccttctcgagcccctctgtctccactgcggagccctgtgagctcagccgttccccatgggacctcatcgccgacctctccctctccgacaaaaaggtggaggacgaactcgtggacaagtactttgtgcatgtcacgacccgggcgagctggctcttttcatccaccgtgtcagccaccacatccaccaagaagaagaagaagctgcctgctgcagtctacgaggatagcacgcagctgaggcgtgaggccgcgaaaaaaactgcaacgaatagggaggagggcgagactaagaagaaggcgaaggtgaagaaagaagaggtgcagcaggatggggcagcagcagcagcagcgcaggtctggaagtgcaagaagaacgatggcagacggtggcactgcaaccggccagtgagccaacctaacaccctctgtgagtaccatttcgtgcagaagcgctcctacttgaaccccggtttcgagttccactccacggcagaactggagggggcagcgccagcgccagcgccggtgcatgcagctagctccaagttgtccaccagcaacaagccacggaagaagaagaagcctggaaacgacttcagtgcgaccgagggcttctactactacgctggctttggcccgttccggaccaagaggcagtgtagaagcggcggcacgaacgagcctctgcctgcaaagcaagaagaggaggaggaaacacctgaatatgcttctcatcatacagaagaagaagaaaaagaagccaaagttgctggattcaccaatcaggctgcatctcaagatgacgtgtcgagttgtgacgacgacattgcagggatcgcgggcgtcgacgaagagagcagcgatggtgactacgatgggattggtctcggtggctgcaacgtggatggagctgctgatccccaggctagcatcggtgaggtgaggaggaaggccccctggaagcggtggaggaagcctgtgaaggcgcggtcgctcaagtctttgatctgttgttgattgacggactgtttgacttcttcgtgttggttggttgttccatggttgtacaacgttggttgccaacttgccattcgttttcatgttggagtattgggtcttggaaagttggaagcaatatcgtgattcg

SEQ ID NO: 4303 - DNA, 1362 bp, Zea Mays
atggaacacagggtgaatctgtgctgctggtgatattgctccagtttgtgaagcagctgttcaacacagcttctaagagattagagattggggtagttgacttgacaaacctcttttcacacgaactgaaaaactaatccatcagtaaaccttgatgtttctgatgttgagaggctgaaagagcagtatgcatgttgcacagaagatcagttggcttttgaaggctatagaaagctcttgccaaccagaaaggcacttcctgatgggcaggtcataacaattgagaaagagaggtacattgttggtgaagctttatttcaaccacatatattgggcttggaagattatggtatcgttcaccagctagttactagcgcctcaaatgtttcatcagagtaccatcgtcagctgcttgaaaataccatgttatgtggtggcaccacatcaatgactggctttgaggacaggttccagagagaagcaaatctgtctgcttcagcaatctttccatcacttgtgaagcccccctgaatacatgtccgagaacctagcaaggtactcggcctggttgggtggtgcgatattggccaaggtcgttttccctgaaaaccagcatatcaccaagggcgagtatgatgagacggggcgtctattgtgcaccagaagtgcttttagagacaaactgccttgaactagcacggttgtgcaccatttgctgctgttcatgtcacagctgtgctcgtacctgaatgttgcaggtgccgatgcttgagtccactgtacgccagccacagttcataccgctagccacagttcatacctgactgttgcgaagtgttggtgcatctaggtcggttgggtttatttagagtgcaatagagggtaacattgacgtgtattcgttaggagttttagccaattgcccatttgcacctgtagtattagagaattagctgagatttccttttcaacttacattatgatccattatctcttcagctactgctagtgaaagagttgtttgggtcatgcccacaaactaagcatgtcacaggttcttaggcatatgtttttgttaggagccaagtagccaacggcatcctctccccctgccggccagagggtgcacgtaacattccatcgctcttcaacggctcccccttgggagcactctgcattgagaaaggggcttctctagggtgaaaatgggtcgggtacgccctatgggtaccgtgtcgggtactgaatgtgaatacagatagtgtaaatatctgttttttatgcgagtttgagtatttttatattcgtgatgaatatgggtaatatccgaatagtgtatcttttgattcgggttggatacgg

SEQ ID NO: 4304 - DNA, 1678 bp, Zea Mays
agtgcatatagactggtcattttacgattagggattattttggccgccgtcgctgcccttcctagtcgctgtcgcgacctcatctgcttccagagtccggcctcgtctgcttgcagcgtcgccgaccagatccacccgcacgcggccgtccgcgcctcgtccatcgcagcggccgcccgcacgcgtccatgacctcgtcggcttccggcgccggccagatccgcccagcctctccgcccccgccgaccgcgctgcagccctctccgcggtgcctcggcccctcccgtcgcggctacctccagccgccggtcaacctgccgacgtggccacctccggccgcccagatccgctgcaccacctccagacgccagccgccgaccgcccagaccccctgctccaccagggagagtcgccagccgctacctctagccgccggtcgcgtagatcccctgctccaccagggagtcggccgcccagatcccctgctccaccagggagagccaccagccgctccaccactgtgtcccaaccctaggccgagggattgcgcgcctccctgacgtgagccgcgactgggtgaacacaggtcataacaattgagaaagagaggtacattgttggtgaagctttatttcaaccacatatattgggcttggaagattatggtatcgttcaccagctagttactagcgcctcaaatgtttcatcagagtaccatcgtcagctgcttgaaaataccatgttatgtggtggcaccacatcaatgactggctttgaggacaggttccagagagaagcaaatctgtctgcttcagcaatctttccatcacttgtgaagcccccctgaatacatgtccgagaacctagcaaggtactcggcctggttgggtggtgcgatattggccaaggtcgttttccctgaaaaccagcatatcaccaagggcgagtatgatgagacggggcgtctattgtgcaccagaagtgcttttagagacaaactgccttgaactagcacggttgtgcaccatttgctgctgttcatgtcacagctgtgctcgtacctgaatgttgcaggtgccgatgcttgagtccactgtacgccagccacagttcataccgctagccacagttcatacctgactgttgcgaagtgttggtgcatctaggtcggttgggtttatttagagtgcaatagagggtaacattgacgtgtattcgttaggagttttagccaattgcccatttgcacctgtagtattagagaattagctgagatttccttttcaacttacattatgatccattatctcttcagctactgctagtgaaagagttgtttgggtcatgcccacaaactaagcatgtcacaggttcttaggcatatgtttttgttaggagccaagtagccaacggcatcctctccccctgccggccagagggtgcacgtaacattccatcgctcttcaacggctcccccttgggagcactctgcattgagaaaggggcttctctagggtgaaaatgggtcgggtacgccctatgggtaccgtgtcgggtactgaatgtgaatacagatagtgtaaatatctgttttttatgcgagtttgagtatttttatattcgtgatgaatatgggtaatatccgaatagtgtatcttttgattcgggttggatacgg

SEQ ID NO: 4305 - DNA, 2880 bp, Zea Mays
agtgcatatagactggtcattttacgattagggattattttggccgccgtcgctgcccttcctagtcgctgtcgcgacctcatctgcttccagagtccggcctcgtctgcttgcagcgtcgccgaccagatccacccgcacgcggccgtccgcgcctcgtccatcgcagcggccgcccgcacgcgtccatgacctcgtcggcttccggcgccggccagatccgcccagcctctccgcccccgccgaccgcgctgcagccctctccgcggtgcctcggcccctcccgtcgcggctacctccagccgccggtcaacctgccgacgtggccacctccggccgcccagatccgctgcaccacctccagacgccagccgccgaccgcccagaccccctgctccaccagggagagtcgccagccgctacctctagccgccggtcgcgtagatcccctgctccaccagggagtcggccgcccagatcccctgctccaccagggagagccaccagccgctccaccactgtgtcccaaccctaggccgagggattgcgcgcctccctgacgtgagccgcgactgggtgaacacagatattgctccagtttgtgaagcagctgttcaacacagcttctaagagattagagattggggtagttgacttgacaaacctcttttcacacgaactgaaaaactaatccatcagtaaaccttgatgtttctgatgttgagaggctgaaagagcagtatgcatgttgcacagaagatcagttggcttttgaaggctatagaaagctcttgccaaccagaaaggcacttcctgatgggcaggtcataacaattgagaaagagaggtacattgttggtgaagctttatttcaaccacatatattgggcttggaagattatggtatcgttcaccagctagttactagcgcctcaaatgtttcatcagagtaccatcgtcagctgcttgaaaataccatgttatgtggtggcaccacatcaatgactggttagttgccttttgtttttgatgtgcacctttgctttattcaaccttgtgagtcataggtcaaatagcgaaagggcctctaacgtaatggttaaggcttccgagtagcatctccaggtcctggttcgatccctaacttcgggcttggttaaaaaaatcccctcgctgtgtcccacccgttcttgggttatgtcctgcgcgccaccctcccgctgggccgttgtagagtgggcagaatggattttatcagtcgaaaccatgattcggtctcttcttaatttaatatcgggagggcggtctttccctaccggccgagtttttttagctataggtcaaatgcatatcaattagctgtatagggtaagtaatatcattttgttttaaacttttgtggatttaacatatgttttctagttgaacgcagcttcattcaagatgaaaatctgccttcggtatgaactgattgtatggatgccaacctatgcaccactagtccgggacattctctgttgttatgttccctaataataaagagtgccagctttgatgttctgttagaactttgaagtttcatttgatacttgtcctttggataagtagtcaaacattgtagtgaatatgggtagcaatagcacaactggaggtggaaagtatgttggttaagtaagaattaggtagcaatagcacaactggaagtgggaagtatgttggttaagtaagaattaggtagcaatagcacaactggaagtgggaagtatgttggttaagtaagaattaggtagcaatagcaacaggcaacagctacatttcatgccatggttacagctttgcatgttcaattggctctcttggacagttgtgtatacaacttgtggatctttatgcatatttaatctaaactcttgtagttttgcttagactcatttaatcactaaggtttatctcactttttttcttcctcaaggctttgaggacaggttccagagagaagcaaatctgtctgcttcagcaatctttccatcacttgtgaagcccccctgaatacatgtccgagaacctagcaaggtactcggcctggttgggtggtgcgatattggccaaggtcgttttccctgaaaaccagcatatcaccaagggcgagtatgatgagacggggcgtctattgtgcaccagaagtgcttttagagacaaactgccttgaactagcacggttgtgcaccatttgctgctgttcatgtcacagctgtgctcgtacctgaatgttgcaggtgccgatgcttgagtccactgtacgccagccacagttcataccgctagccacagttcatacctgactgttgcgaagtgttggtgcatctaggtcggttgggtttatttagagtgcaatagagggtaacattgacgtgtattcgttaggagttttagccaattgcccatttgcacctgtagtattagagaattagctgagatttccttttcaacttacattatgatccattatctcttcagctactgctagtgaaagagttgtttgggtcatgcccacaaactaagcatgtcacaggttcttaggcatatgtttttgttaggagccaagtagccaacggcatcctctccccctgccggccagagggtgcacgtaacattccatcgctcttcaacggctcccccttgggagcactctgcattgagaaaggggcttctctagggtgaaaatgggtcgggtacgccctatgggtaccgtgtcgggtactgaatgtgaatacagatagtgtaaatatctgttttttatgcgagtttgagtatttttatattcgtgatgaatatgggtaatatccgaatagtgtatcttttgattcgggttggatacgg

SEQ ID NO: 4306 - DNA, 1835 bp, Zea Mays
agtgcatatagactggtcattttacgattagggattattttggccgccgtcgctgcccttcctagtcgctgtcgcgacctcatctgcttccagagtccggcctcgtctgcttgcagcgtcgccgaccagatccacccgcacgcggccgtccgcgcctcgtccatcgcagcggccgcccgcacgcgtccatgacctcgtcggcttccggcgccggccagatccgcccagcctctccgcccccgccgaccgcgctgcagccctctccgcggtgcctcggcccctcccgtcgcggctacctccagccgccggtcaacctgccgacgtggccacctccggccgcccagatccgctgcaccacctccagacgccagccgccgaccgcccagaccccctgctccaccagggagagtcgccagccgctacctctagccgccggtcgcgtagatcccctgctccaccagggagtcggccgcccagatcccctgctccaccagggagagccaccagccgctccaccactgtgtcccaaccctaggccgagggattgcgcgcctccctgacgtgagccgcgactgggtgaacacagatattgctccagtttgtgaagcagctgttcaacacagcttctaagagattagagattggggctgaaagagcagtatgcatgttgcacagaagatcagttggcttttgaaggctatagaaagctcttgccaaccagaaaggcacttcctgatgggcaggtcataacaattgagaaagagaggtacattgttggtgaagctttatttcaaccacatatattgggcttggaagattatggtatcgttcaccagctagttactagcgcctcaaatgtttcatcagagtaccatcgtcagctgcttgaaaataccatgttatgtggtggcaccacatcaatgactggctttgaggacaggttccagagagaagcaaatctgtctgcttcagcaatctttccatcacttgtgaagcccccctgaatacatgtccgagaacctagcaaggtactcggcctggttgggtggtgcgatattggccaaggtcgttttccctgaaaaccagcatatcaccaagggcgagtatgatgagacggggcgtctattgtgcaccagaagtgcttttagagacaaactgccttgaactagcacggttgtgcaccatttgctgctgttcatgtcacagctgtgctcgtacctgaatgttgcaggtgccgatgcttgagtccactgtacgccagccacagttcataccgctagccacagttcatacctgactgttgcgaagtgttggtgcatctaggtcggttgggtttatttagagtgcaatagagggtaacattgacgtgtattcgttaggagttttagccaattgcccatttgcacctgtagtattagagaattagctgagatttccttttcaacttacattatgatccattatctcttcagctactgctagtgaaagagttgtttgggtcatgcccacaaactaagcatgtcacaggttcttaggcatatgtttttgttaggagccaagtagccaacggcatcctctccccctgccggccagagggtgcacgtaacattccatcgctcttcaacggctcccccttgggagcactctgcattgagaaaggggcttctctagggtgaaaatgggtcgggtacgccctatgggtaccgtgtcgggtactgaatgtgaatacagatagtgtaaatatctgttttttatgcgagtttgagtatttttatattcgtgatgaatatgggtaatatccgaatagtgtatcttttgattcgggttggatacgg

SEQ ID NO: 4307 - DNA, 1620 bp, Zea Mays
cgtcgtcgctctcgcggtctcgcccccggcggccccccacgagtgtggcaacaaaagggtctcggttcggagttggactcggagtcggccagaacaatccagcgagctcgaaaaaaagggtacgaataggaaccccaatccagggccggagggcgaacgaactcaaaagcaagccgttccagtccaatccgccccagtccaaatctaatcgccgggtttaggcacaaggggcgggacgcggcgaggtttagtcggggtttgttttgtcccttccgtgcgattctgctctccgcgcgggaggcaagtactgacggaagcgaagaccaaggcggaggaggggggtccccggcggtggaagtggaacgcgccgatgcgcaagtttcaggactccatcaaggccctccaggccgacatcgatcacgccaatgcgatggcgtcggaattcctgagggactacgacggctcggtcatccagatgcgggtggcgtacagcgccgtcgcgcatttcctcctgcagtggaccgactgcaagctcgccggcgcgctcggcctcctcaaggttatgctatacaaggtgtgcgcggacggctcgtcggcgcttcctgattgggagatggaggccagcatcagggagttctacggcgtcattttcccgtcgctgctgcagcttccgagtggcatcaccgagctggacgacaggaagcagaggaagctctgcctgaagaaattcaggagcagggatgagcagctctcggaggtggacacggagagggagctcgagtgcgggatctgcctcgaggttagccccaaggtcgtgctgcccgactgtgcccacatgctctgcatgcggtgctttgaggattggtacgagtatgggtacaatttcatacccatgagtgggtacgagttttttaacgagtataattttatctcacgtacgagtataggtaagcactacttaatgggtacatatccgttgctatctctacacatgctgccatggcaaacgttggaggagggcagccgaccagcgaattttctggaaagaatcaagcgtggacttggacgaaggcaacaaggtgatcaaggagatcaacacctcaaagaaagacattagaagacccattgaattcctatcaagatcaagcaacagtccaagacacaagatagaagaagcctaaaataagaagcatgaagacaccaagaaaatagtactacatagagcatcagattttgcaccagatatatgtagtgctagtattaaagaaagggcttgaagattaagtacactagacatgtaagtgtgcaacagacatgtgaaccagatgccataccaaacatggcatccagcaagccctacagtgggtacatgggagtctacaacgcactagacgtgttaggtgacacactgaatcctgcaccaaacaacatgctcaaaaaggttgcaaatgcaaccaagacgagtaacactccctagacatgtgtagtgtggcactaatgaccacatcagatgcataagcttcaacattcggtaatggctagttcacaggctagctaatgtgaaactcgttgggcttgcccggtgtgccactagacatgttcggtcctacgcataaaagt

SEQ ID NO: 4308 - DNA, 2099 bp, Zea Mays
aggaagacgaaggccgccgccggcccgccgcgcgtagcgcacgagcagacacccgccctctccgttgacctgtcaattagctctactttacccctacccaacccaatccactcctaccggccaccgcccttgtcaatattttctcggggcggattccaacgagcgatcgcgagcatatccgtcccacgcccggacgtcccatgtgcagagcaggcgcggcatctctgagcatcagaagcgccatgcactgcttccggttcgcgagctgggagcgggacgccgacgagcggcgcgagtcggcggcggcggcgaccacggggcggtccttgtccgcgcggtccaacggcagcaccacgtccacggaccgcgacgtgcggcggtcggcgtccgagtgctccctgaaggcgtcggagctcagcagcgccagctccttgggccggggccggcagctgtcgctgtcgcagcggccgccgaacacgctccgcgtcttcaccttccaggagctcaagtcggccacccgcgggttcagccgcgcgctcatgctcggcgagggcggcttcggctgcgtctaccgcggcaccgtccggagcgcgctcgagccgcgcaggagcctcgacgtcgccatcaagcagctcggccgcaagggcctgcaggggcacaaggagtggatgacggaggtgaacgtgctcggcgtggtggaccacgccaacctggtcaagctcataggatactgcgctgaggacgatgagagggggatgcagctgctgctggtctacgagttcatgcccaacggcagcctggcggaccatctctcctcgaggtcaccgcggccggcgtcgtgggccatgaggctcagggtggcgcttgacacggctcgagggttgaagtatctccacgaagaatccgaattcaagattatatttcgcgacctgaagccttccaacattcttctcgacgacaactggaacgccaaactgtcagacttcggcttggcgagattaggacctcaagaaggaagccatgtctccacagtggtggtggggacaattggatacgcagctcctgaatacatccacacaggacgcctcagcaccaagaacgacatatggagcttcggcgtcgtgctccttgagctccttacaggccggcgacctctggaccgaaacaggccaagaggcgagcagaatctcgtggactggatgaagccctactcttccgacgccaagaagctcgaggctgcaattgacccaaggctccaggggaactacagcaaaagatcagctgcccagcttgcgtcggtggcgaataagtgcctggtgcgccatgccaggcaccgtcccaagatgagcgaggtactggagatggtgcggaagatcgttgagaacagcgaaaccggaacgccggagcatcccctgatcagcaattcagaggagttagttagtgacgaaaggaagcggaaacgccttggcttgaaaagaaggattgcagatattaaagctggggaagggagatggtttgcatggcaaaggtggacgcctaagcttgtgagaacacagtgattcagatcatcggtagataaggcgtttcttgcatggcttgacttgcatagttagtagcaaaaacggtacaggtgatatgcataaaaggaggagaaattgcttgtgcagttccatataaattgccagagcatgctcctggactccaggcagactgcaaaattgctccatacacagtttcaccagatgcttttggcttacaaaacggtcatgaggttttcaaccaaatctgtcatacaggcagtagctggtaaagcaattcctgaagaaagctcctccagatgtcaatgtatctgcctgctgttcaagcaacgaacacatggttgccattaatttctcctctgctttaccgaactcttagaccacatacagataggagaatctcgagacaacatctacatcccatcttttctctcttctatcactagatcatgttcgccaactgagttgtaccttgcaatttggattccaataagcataaatgatgcctttgacagtgcttcagtgggcagaactcactagcgacaaatgcagattcagaga

SEQ ID NO: 4309 - DNA, 1508 bp, Zea Mays
ggaagacgaaggccgccgccggcccgccgcgcgtagcgcacgagcagacacccgccctctccgttgacctgtcaattagctctactttacccctacccaacccaatccactcctaccggccaccgcccttgtcaatattttctcggggcggattccaacgagcgatcgcgagcatatccgtcccacgcccggacgtcccatgtgcagagcaggcgcggcatctctgagcatcagaagcgccatgcactgcttccggttcgcgagctgggagcgggacgccgacgagcggcgcgagtcggcggcggcggcgaccacggggcggtccttgtccgcgcggtccaacggcagcaccacgtccacggaccgcgacgtgcggcggtcggcgtccgagtgctccctgaaggcgtcggagctcagcagcgccagctccttgggccggggccggcagctgtcgctgtcgcagcggccgccgaacacgctccgcgtcttcaccttccaggagctcaagtcggccacccgcgggttcagccgcgcgctcatgctcggcgagggcggcttcggctgcgtctaccgcggcaccgtccggagcgcgctcgagccgcgcaggagcctcgacgtcgccatcaagcagctcggccgcaagggcctgcaggggcacaaggagtggatgacggaggtgaacgtgctcggcgtggtggaccacgccaacctggtcaagctcataggatactgcgctgaggacgatgagagggggatgcagctgctgctggtctacgagttcatgcccaacggcagcctggcggaccatctctcctcgaggtcaccgcggccggcgtcgtgggccatgaggctcagggtggcgcttgacacggctcgagggttgaagtatctccacgaagaatccgaattcaagattatatttcgcgacctgaagccttccaacattcttctcgacgacaactggaacgccaaactgtcagacttcggcttggcgagattaggacctcaagaaggaagccatgtctccacagtggtacaggtgatatgcataaaaggaggagaaattgcttgtgcagttccatataaattgccagagcatgctcctggactccaggcagactgcaaaattgctccatacacagtttcaccagatgcttttggcttacaaaacggtcatgaggttttcaaccaaatctgtcatacaggcagtagctggtaaagcaattcctgaagaaagctcctccagatgtcaatgtatctgcctgctgttcaagcaacgaacacatggttgccattaatttctcctctgctttaccgaactcttagaccacatacagataggagaatctcgagacaacatctacatcccatcttttctctcttctatcactagatcatgttcgccaactgagttgtaccttgcaatttggattccaataagcataaatgatgcctttgacagtgcttcagtgggcagaactcactagcgacaaatgcagattcagaga

SEQ ID NO: 4310 - DNA, 1659 bp, Zea Mays
gcgagcatatccgtcccacgcccggacgtcccatgtgcagagcaggcgcggcatctctgagcatcagaagcgccatgcactgcttccggttcgcgagctgggagcgggacgccgacgagcggcgcgagtcggcggcggcggcgaccacggggcggtccttgtccgcgcggtccaacggcagcaccacgtccacggaccgcgacgtgcggcggtcggcgtccgagtgctccctgaaggcgtcggagctcagcagcgccagctccttgggccggggccggcagctgtcgctgtcgcagcggccgccgaacacgctccgcgtcttcaccttccaggagctcaagtcggccacccgcgggttcagccgcgcgctcatgctcggcgagggcggcttcggctgcgtctaccgcggcaccgtccggagcgcgctcgagccgcgcaggagcctcgacgtcgccatcaagcagctcggccgcaagggcctgcaggggcacaaggagtggatgacggaggtgaacgtgctcggcgtggtggaccacgccaacctggtcaagctcataggatactgcgctgaggacgatgagagggggatgcagctgctgctggtctacgagttcatgcccaacggcagcctggcggaccatctctcctcgaggtcaccgcggccggcgtcgtgggccatgaggctcagggtggcgcttgacacggctcgagggttgaagtatctccacgaagaatccgaattcaagattatatttcgcgacctgaagccttccaacattcttctcgacgacaactggaacgccaaactgtcagacttcggcttggcgagattaggacctcaagaaggaagccatgtctccacagtggtggtggggacaattggatacgcagctcctgaatacatccacacaggacgcctcagcaccaagaacgacatatggagcttcggcgtcgtgctccttgagctccttacaggccggcgacctctggaccgaaacaggccaagaggcgagcagaatctcgtggactggatgaagccctactcttccgacgccaagaagctcgaggctgcaattgacccaaggctccaggggaactacagcaaaagatcagctgcccagcttgcgtcggtggcgaataagtgcctggtgcgccatgccaggcaccgtcccaagatgagcgaggtacaggtgatatgcataaaaggaggagaaattgcttgtgcagttccatataaattgccagagcatgctcctggactccaggcagactgcaaaattgctccatacacagtttcaccagatgcttttggcttacaaaacggtcatgaggttttcaaccaaatctgtcatacaggcagtagctggtaaagcaattcctgaagaaagctcctccagatgtcaatgtatctgcctgctgttcaagcaacgaacacatggttgccattaatttctcctctgctttaccgaactcttagaccacatacagataggagaatctcgagacaacatctacatcccatcttttctctcttctatcactagatcatgttcgccaactgagttgtaccttgcaatttggattccaataagcataaatgatgcctttgacagtgcttcagtgggcagaactcactagcgacaaatgcagattcagaga

SEQ ID NO: 4311 - DNA, 1868 bp, Zea Mays
ggcggggacgtaacgccattgacagcgattgcgtgtacggtgaaggttggttgggaggttggaggggtaagggaagggccggcttgaaaaaaaaatgtttgctgccatggctgcctcatcgactccctgggcgtgacgacgtcgttgctctcgtgggcgtggtcgtgctcgtgcctgcctgccactggcctaatttctccagatttgagcaggcgcggcatctctgagcatcagaagcgccatgcactgcttccggttcgcgagctgggagcgggacgccgacgagcggcgcgagtcggcggcggcggcgaccacggggcggtccttgtccgcgcggtccaacggcagcaccacgtccacggaccgcgacgtgcggcggtcggcgtccgagtgctccctgaaggcgtcggagctcagcagcgccagctccttgggccggggccggcagctgtcgctgtcgcagcggccgccgaacacgctccgcgtcttcaccttccaggagctcaagtcggccacccgcgggttcagccgcgcgctcatgctcggcgagggcggcttcggctgcgtctaccgcggcaccgtccggagcgcgctcgagccgcgcaggagcctcgacgtcgccatcaagcagctcggccgcaagggcctgcaggggcacaaggagtggatgacggaggtgaacgtgctcggcgtggtggaccacgccaacctggtcaagctcataggatactgcgctgaggacgatgagagggggatgcagctgctgctggtctacgagttcatgcccaacggcagcctggcggaccatctctcctcgaggtcaccgcggccggcgtcgtgggccatgaggctcagggtggcgcttgacacggctcgagggttgaagtatctccacgaagaatccgaattcaagattatatttcgcgacctgaagccttccaacattcttctcgacgacaactggaacgccaaactgtcagacttcggcttggcgagattaggacctcaagaaggaagccatgtctccacagtggtggtggggacaattggatacgcagctcctgaatacatccacacaggacgcctcagcaccaagaacgacatatggagcttcggcgtcgtgctccttgagctccttacaggccggcgacctctggaccgaaacaggccaagaggcgagcagaatctcgtggactggatgaagccctactcttccgacgccaagaagctcgaggctgcaattgacccaaggctccaggggaactacagcaaaagatcagctgcccagcttgcgtcggtggcgaataagtgcctggtgcgccatgccaggcaccgtcccaagatgagcgaggtactggagatggtgcggaagatcgttgagaacagcgaaaccggaacgccggagcatcccctgatcagcaattcagaggagttagttagtgacgaaaggaagcggaaacgccttggcttgaaaagaaggattgcagatattaaagctggggaagggagatggtttgcatggcaaaggtggacgcctaagcttgtgagaacacagtgattcagatcatcggtagataaggcgtttcttgcatggcttgacttgcatagttagtagcaaaaacggtaagtcacctgggttttcttttagcaaacaagtcacagagcatggcaattgtaaacaaacggtttggtgcagtccatggcagacaccactaataaataatggataggttcacattttctgggatcacaaataggctgataggaaaccttctccacaaactcggggggttccatgtttcttattaagctcaagcagtcattttctcgtgtagaaggcatatcgtatagtttactcggttttgtag

SEQ ID NO: 4312 - DNA, 2093 bp, Zea Mays
ggcggggacgtaacgccattgacagcgattgcgtgtacggtgaaggttggttgggaggttggaggggtaagggaagggccggcttgaaaaaaaaatgtttgctgccatggctgcctcatcgactccctgggcgtgacgacgtcgttgctctcgtgggcgtggtcgtgctcgtgcctgcctgccactggcctaatttctccagatttggcgcggcatctctgagcatcagaagcgccatgcactgcttccggttcgcgagctgggagcgggacgccgacgagcggcgcgagtcggcggcggcggcgaccacggggcggtccttgtccgcgcggtccaacggcagcaccacgtccacggaccgcgacgtgcggcggtcggcgtccgagtgctccctgaaggcgtcggagctcagcagcgccagctccttgggccggggccggcagctgtcgctgtcgcagcggccgccgaacacgctccgcgtcttcaccttccaggagctcaagtcggccacccgcgggttcagccgcgcgctcatgctcggcgagggcggcttcggctgcgtctaccgcggcaccgtccggagcgcgctcgagccgcgcaggagcctcgacgtcgccatcaagcagctcggccgcaagggcctgcaggggcacaaggagtggatgacggaggtgaacgtgctcggcgtggtggaccacgccaacctggtcaagctcataggatactgcgctgaggacgatgagagggggatgcagctgctgctggtctacgagttcatgcccaacggcagcctggcggaccatctctcctcgaggtcaccgcggccggcgtcgtgggccatgaggctcagggtggcgcttgacacggctcgagggttgaagtatctccacgaagaatccgaattcaagattatatttcgcgacctgaagccttccaacattcttctcgacgacaactggaacgccaaactgtcagacttcggcttggcgagattaggacctcaagaaggaagccatgtctccacagtggtggtggggacaattggatacgcagctcctgaatacatccacacaggacgcctcagcaccaagaacgacatatggagcttcggcgtcgtgctccttgagctccttacaggccggcgacctctggaccgaaacaggccaagaggcgagcagaatctcgtggactggatgaagccctactcttccgacgccaagaagctcgaggctgcaattgacccaaggctccaggggaactacagcaaaagatcagctgcccagcttgcgtcggtggcgaataagtgcctggtgcgccatgccaggcaccgtcccaagatgagcgaggtactggagatggtgcggaagatcgttgagaacagcgaaaccggaacgccggagcatcccctgatcagcaattcagaggagttagttagtgacgaaaggaagcggaaacgccttggcttgaaaagaaggattgcagatattaaagctggggaagggagatggtttgcatggcaaaggtggacgcctaagcttgtgagaacacagtgattcagatcatcggtagataaggcgtttcttgcatggcttgacttgcatagttagtagcaaaaacggtacaggtgatatgcataaaaggaggagaaattgcttgtgcagttccatataaattgccagagcatgctcctggactccaggcagactgcaaaattgctccatacacagtttcaccagatgcttttggcttacaaaacggtcatgaggttttcaaccaaatctgtcatacaggcagtagctggtaaagcaattcctgaagaaagctcctccagatgtcaatgtatctgcctgctgttcaagcaacgaacacatggttgccattaatttctcctctgctttaccgaactcttagaccacatacagataggagaatctcgagacaacatctacatcccatcttttctctcttctatcactagatcatgttcgccaactgagttgtaccttgcaatttggattccaataagcataaatgatgcctttgacagtgcttcagtgggcagaactcactagcgacaaatgcagattcagaga

SEQ ID NO: 4313 - DNA, 1997 bp, Zea Mays
ggcggggacgtaacgccattgacagcgattgcgtgtacggtgaaggttggttgggaggttggaggggtaagggaagggccggcttgaaaaaaaaatgtttgctgccatggctgcctcatcgactccctgggcgtgacgacgtcgttgctctcgtgggcgtggtcgtgctcgtgcctgcctgccactggcctaatttctccagatttggcgcggcatctctgagcatcagaagcgccatgcactgcttccggttcgcgagctgggagcgggacgccgacgagcggcgcgagtcggcggcggcggcgaccacggggcggtccttgtccgcgcggtccaacggcagcaccacgtccacggaccgcgacgtgcggcggtcggcgtccgagtgctccctgaaggcgtcggagctcagcagcgccagctccttgggccggggccggcagctgtcgctgtcgcagcggccgccgaacacgctccgcgtcttcaccttccaggagctcaagtcggccacccgcgggttcagccgcgcgctcatgctcggcgagggcggcttcggctgcgtctaccgcggcaccgtccggagcgcgctcgagccgcgcaggagcctcgacgtcgccatcaagcagctcggccgcaagggcctgcaggggcacaaggagtggatgacggaggtgaacgtgctcggcgtggtggaccacgccaacctggtcaagctcataggatactgcgctgaggacgatgagagggggatgcagctgctgctggtctacgagttcatgcccaacggcagcctggcggaccatctctcctcgaggtcaccgcggccggcgtcgtgggccatgaggctcagggtggcgcttgacacggctcgagggttgaagtatctccacgaagaatccgaattcaagattatatttcgcgacctgaagccttccaacattcttctcgacgacaactggaacgccaaactgtcagacttcggcttggcgagattaggacctcaagaaggaagccatgtctccacagtggtggtggggacaattggatacgcagctcctgaatacatccacacaggacgcctcagcaccaagaacgacatatggagcttcggcgtcgtgctccttgagctccttacaggccggcgacctctggaccgaaacaggccaagaggcgagcagaatctcgtggactggatgaagccctactcttccgacgccaagaagctcgaggctgcaattgacccaaggctccaggggaactacagcaaaagatcagctgcccagcttgcgtcggtggcgaataagtgcctggtgcgccatgccaggcaccgtcccaagatgagcgaggtactggagatggtgcggaagatcgttgagaacagcgaaaccggaacgccggagcatcccctgatcagcaattcagaggagttagttagtgacgaaaggaagcggaaacgccttggcttgaaaagaaggattgcagatattaaagctggggaagggagatggtttgcatggcaaaggtacaggtgatatgcataaaaggaggagaaattgcttgtgcagttccatataaattgccagagcatgctcctggactccaggcagactgcaaaattgctccatacacagtttcaccagatgcttttggcttacaaaacggtcatgaggttttcaaccaaatctgtcatacaggcagtagctggtaaagcaattcctgaagaaagctcctccagatgtcaatgtatctgcctgctgttcaagcaacgaacacatggttgccattaatttctcctctgctttaccgaactcttagaccacatacagataggagaatctcgagacaacatctacatcccatcttttctctcttctatcactagatcatgttcgccaactgagttgtaccttgcaatttggattccaataagcataaatgatgcctttgacagtgcttcagtgggcagaactcactagcgacaaatgcagattcagaga

SEQ ID NO: 4314 - DNA, 1111 bp, Zea Mays
gagggacacactgacgtcgacaggtacgtgcgtaacaatcacgtggcaacacgttgctccaaagcctccaacaccgagccccagcacccattaacgcttccaaaaataactgcagctgggcctgcgctcgcgaaggtacgccgaacgcgaccaatcaaccctcacgtacttcctatcctatatatcggcccgccgatcccgctgccttaacttgcatattttcttgacacttgacagccaccacacactagagagagagaaggagaacgcgcgtcgtatatgggtcaagaagaggccgtggcagcgaacggcaccggcaccggcgtcggccgcggcaggccgcacgccgtggtgatgccgtacccgctgcagggccacgtgatcccggcggtgcacctggcgctgcggctggccgagcgcgggtgctctcccaccccgccgtcgccgccttcctcacgcactgcggctggaactccgtcctggagagcgtctgggcgggggtgcccatgctctgcttcccgctgctcacggaccagctcaccaaccgccgcctcgtcgtgcgggagtggggcgccggcgtctccatcggggaccgcggcgcggtgcacgccgacgaggtcagggcgcggattcaagggatcatggccggggaacacggcctcaagctcagggaccaggtcaggaagctgagggccacactcgaggctgccgtggcgcccggtggctcgtcgcggcgcaacttcgacgacttcgtcgacgagctcaagcgaaagctcaaggacgccagctgagctggccccagaatacagctgcgatgtaggccttgtatccttagcgacagcgtgtattgcgtcacataaacttgtcttgatcgaagcgtgtatgcagtgtacggtaggacaatattgttctgcaggcttgctcaagtgatatgttgtacctgtgttaccaatgtaaacatgaatcgtgtcacgaatttcaagttagcttgatcagtctatagttttacgaagggctcgtttggtaaagctccgagagtcgatgtatagtgattccgaatgattaaaagtgaaatttatctgacgaaaaatgtttggcaaataacgtgtga

SEQ ID NO: 4315 - DNA, 3324 bp, Zea Mays
ttttagctcatttcctggatatctaccagaattctgtaaccaaaattgaagatgttttttttgaagataaggttggttgggaattctccagctatcctcctctttctcgcacacgtccatatctctggaatactctccaccgcctactctttttcttatcccaacagctagaagctaccatattctatttcttttctctcatatgaatagagatagatgttcctggttggagaattcctcacgtcacctgcaactcgaactgctgcacggcttcaccacgtttaactcccccaggaaaacccccagccgtcacctgccccagcgttcgctctccatgtttcttagccccggcatccaccctgtacttgctcgtttccaagctgtgctccagcgagcttctctgtagttcttccccaatcgctcgctctcagcctgtccggtcctgcgtacttcaacacctttctccagccgtccgagctccacctcgtcgtcgtcctactgtttcagcgtcgtatccctctacctcatcacagcagcaccggtgctctcgtcgtcgctgagctcttggcgcgccatgacatcatcgtcgttttctcgccggccgcgcttgacccacagctccttcgcgtcgtcgtcttggacaacccgtagcctctgctccgacctcgtcgcactcgcgctcctcacacccgacaagccgtcgtgctcggcgtgttttctccgtgcggccttacgggttcctctcgcttcatcggcttgtcgcgtgttagagcagaacaccaagaagaattgatctttgtaaaggaggaacctgctccagtgctgttgatccagtgatggactccatctaactgcttatcagagtagaagggttttagatcttctcctgcaataagaatgaggactcgttctggaaaggatcatggtgctggtgcttcccagaggaatatcgatgcccccaatccatctccgacatcagctttggatgatgttgtggctcagcttgtgaatgtgagcactgttcttcagcaaatagcccagcctacaacatcaactcagtatggtcgtcatgattctaatgctgctattctctataaagagtttctcagcacgcaaccaccaatgttcactatagcggaagatccattggaggcagaagattggcttcgtaccattgagcagaagttgggactcatctgttgtgatgacgttcagaaaactcagtgtgcagcacaacaactccagggtcaagctggggcctggtgggctgaatactttgcactgcagccagagggacatcaaatttcttgggctgagttccgtgaggtatttcggacgcattatattccgaaagccctgatggagatcaaattcaatgagttcttagatttgaagcaaggcgaagaagagagtgtaatggaatattttgagaggttcactcgcctatctcagtacgtcttggattttgtaaataccaatgagaagaaaaggttctacttcctacgtggcctcaacaagaagcttcagggcttgatggcaaccagtttggctgaaagatataatgaggtggtcagtcaggctgttttgggggataacaagattcgacttcatcaggagtctaaaagaaagaaaattgtggaagaatcctctggtaaaatcaaacagtgccggagggttgtttatcaatctgtttattatcctcgttcttctccaccccagctgtctagctctcctcagtcatgtgaaaaacaagttgtcattcctttcattccacatgagccggatgccccagacattcgttctaaagatatttcagacaatgttaattcatgtgagaattgtggtaagtcagggcactctacacaagattgtcactttcctaagctagtgaatgagcggttgtcgctcgtgaatctccctcgaggtaaccagcaaaaagcgaggaagaataaggttgttcttaaactgggtcaagttcattatactaagatcaaagctattcctgagggtgaaccggttatgatgggtacttttccggtcgccaatcgtttagctggtatcctgtttgattccggtgcttcccataccttcataaatcggatgtttgtattaaagcaccaattgtctttggaggtagtagagaatgggtattgtatacaatctcctggaggacgcttgcatactaaagaaatggtatatcagatacccataaagctaggtggtcacatgtttcctaccaacatgctagttcttccaaatcaagatatagatgttatccttggcatgaattggcttagtcaacatggggcggtaatcaacgctctacaacggacaatacaattggattcgcctaacggtaactacaagttgctgatctgattatcgacacctaagagagcagtggagagagtgtgtgctatcaccgttaaagaagtaaaggatatacctgttgtcaaggaatttccagatgtgtttcctgaagatttgcctggtttgcctccagaaagggacgtggaatttgtgattgaattgcagccgggtactacacccatatctagaaggtcatacagaatggcacccaaggagttagcagaactgaagactcaattgcaggacttgctcaacaaagggttcattcgcccaagttcatcaccttggggctgtcctgccatctttgtgaaaaagaaggatcaaacactccggttatgtgttgattaccggccacttaacgaggtgaccattaaaaacaaatatcctctccctcgtattgatttgttgtttgatcaactttctggagctaaagtgttttctaagattgaccttagatcgggttatcaccagataagaattcgtcctgaagatgttcccaagactgctttcactacccgatatggtctctatgaatatttggttatgtcctttggtctaaccaatgctccagctcatttcatgtacttaatgaactcggtgttcatgcccgagcttgacaagtttgtggtggtctttattgatgacatcttgatatactcgaagaccaaagaagatcatgcagagcacttgcgtatcgttctaacaagattacgagaacaccaactttatgccaaattcagcaagtgtgaattttggttggataccattccgttcttgggtcatatcttgtctgccgaaggtgttgcagtcgacccaagtaaagtcaaggacattctggaatggaagccacccaccacagtgcatcaagtccgaagtttccttggaatggcggggtattaccgtcgttttattccagatttctccaagatagctaagcctattactgagttgctc

SEQ ID NO: 4316 - DNA, 1073 bp, Zea Mays
ctctccaccgcctactctttttcttatcccaacagctagaagctaccatattctatttcttttctctcatatgaatagagatagatgttcctggttggagaattcctcacgtcacctgcaactcgaactgctgcacggcttcaccacgtttaactcccccaggaaaacccccagccgtcacctgccccagcgttcgctctccatgtttcttagccccggcatccaccctgtacttgctcgtttccaagctgtgctccagcgagcttctctgtagttcttccccaatcgctcgctctcagcctgtccggtcctgcgtacttcaacacctttctccagccgtccgagctccacctcgtcgtcgtcctactgtttcagcgtcgtatccctctacctcatcacagcagcaccggtgctctcgtcgtcgctgagctcttggcgcgccatgacatcatcgtcgttttctcgccggccgcgcttgacccacagctccttcgcgtcgtcgtcttggacaacccgtagcctctgctccgacctcgtcgcactcgcgctcctcacacccgacaagccgtcgtgctcggcgtgttttctccgtgcggccttacgggttcctctcgcttcatcggcttgtcgcgtgttagagcaggaaagatttttgatgccttggctttattagttgctccttatggaggtcttgaagcttagattacttatgtgaatcttttatggaaaggcttcacctttccaagtattgtagttaagttatgcactctaaagactatcaggacttgtaataatttcattcccttttatgttgtaagacttgagttctagaatgtaaagtgtattttgtaaaagtcttcctctctatctccaatgtgtgtatcaattgtgattactgtaatatgcctgttatgtgggagatccttgggatgatgagttcaagttgatgaactcgatagccttgttaaattacccggtacacgtgcatagcaatctgaggccattaaggcaaggattggtgcatgtgggcctggtaatttgggagggctgtcacagcgtggtatcggagcgat

SEQ ID NO: 4317 - DNA, 2152 bp, Zea Mays
cagacgggggttcatcctacttcgctttcgctcgtcgcgcgcctcgcgctcgattgagctcaccttagccagcgtgtactctctccctccggccctccccgattctcaccaggagcgacggcgactccggtgcgccgctgcttgcgagggcgaaggccggcgtgtggcgcgcggctgcaggcgagggcgaaggctggcgcacggctgcaggcgacgccgcctcgcacttgattcaactcgccccttcaattgcggcgacgctggtcgagcgactgagcccttcgctaggtcttcattgggttcttcgtcggcgagaacccgcaccagcatcaccaggcatttagaaaggaaggctgtatgaaggctagtaattttcagttaagatcatcaaggcttccttggttagagtcatggctgcttcctcctggattcccagtcgccatgaatagtagctactttttggggggacagggactatccacattgaaatttagagtacggtgctctcagctacagctttctactaattcagttcataataagaaagagaaagagaaatattcttgttttgatcagtcaacatcatatctgcatgtacaatgtcttagggacttcccgactgaaaaactttctggagaggtagttgtgcaagagcgaaagtggccatagccaccagctgggatacaattcttcagtatgataatccagtgactgaatcagttgcctcttttgcagattggaggcagtaatttcttgagaaaagcacctgctcttcagacgttaacctgtctatgcgatgggttgttctttgttggaaaattatcatttcaaataatgaatggttttggaatgacagtgccctctcaattcatagaaagaaatgcagttaaggaagtactacaaattattcaagttgctagggataggaatattcctatttattatccaacagatctctggtgcttgaaaaatggcgacagtgaaatatcaggggtcatcaactctaccggacaattggctggctggacaccagctgatataggaccatcgacattggagaagatttcttctataattacatcatacaagaagatactgtggattggccctacaaactacggtttgacagaaaaaaattcagttggtggaacacagttgggtgaaatactggaaagtgcaagctctgatggctgtgatgttattttagtgggggatgcagcatgcaaggcagtaaaaagaaaaacagattcctcaccgcaatatacagaatttcaaaagtccactgttgtttgggaattcctcaaaggaaggatattgcctggtatagcagcattggataaagaaatggtttgtttctttttcaaatggctaaaagttgtgaaagttcaaatttccttgggtttgagatgaatgaaaagcttgtcattaggtgcctccaaggtatggcttcagatgagaaaaggaacctatattttgtgtcaacaaatgcaacgtccacatttcgttccatagtttcaagttatcctggacggttgactcttgtcacaatacagtgcccaaatcctgacttcaacaaagagcaaaataggtggagaatggtgcgaagaatgctcattgaagctatcgtcgaccttcttcataccaatggacaggtttatctgcagtcagatgtggagtccgttctgctcgtgatgaaggagcagttcctctcctacagcaagggtcagcttgtcacggacggcgatggtggcaactgcatcgataacccgttcggcgtggtatccgactgggagcgccatgtcctcgctcgcggagctcccatgtacagggcgatgttaaagaaaatgtgattccatttcctccgtctctgaggtctgaacattgcattgttttgtcaccatggctgcttcggacatggacaacgttcatggattcactcggttagataaaactctcttcttttcggagaaaactacatgacaaaaaaattgtgtggttaaatcttaaaatcgaatcaatccaatgggagaaacgcatatcttcccaattgtggctatgtcatctgccgccggagaggccgatgtcagacatggtggcaacgcttatcgccgccctggactgccgaactgaccacgagtcgaagagccgccgg

SEQ ID NO: 4318 - DNA, 2426 bp, Zea Mays
cagacgggggttcatcctacttcgctttcgctcgtcgcgcgcctcgcgctcgattgagctcaccttagccagcgtgtactctctccctccggccctccccgattctcaccaggagcgacggcgactccggtgcgccgctgcttgcgagggcgaaggccggcgtgtggcgcgcggctgcaggcgagggcgaaggctggcgcacggctgcaggcgacgccgcctcgcacttgattcaactcgccccttcaattgcggcgacgctggtcgagcgactgagcccttcgctaggtcttcattgggttcttcgtcggcgagaacccgcaccagcatcagcatcaccaggcatttagaaaggaaggctgtatgaaggctagtaattttcagttaagatcatcaaggcttccttggttagagtcatggctgcttcctcctggattcccagtcgccatgaatagtagctactttttggggggacagggactatccacattgaaatttagagtacggtgctctcagctacagctttctactaattcagttcataataagaaagagaaagagaaatattcttgttttgatcagtcaacatcatatctgcatgtacaatgtcttagggacttcccgactgaaaaactttctggagaggtagttgtggtgcgtcttgattcttcacttatcttggggcacttaggaccatgcacttcctcacttgaaagagctttgctaactatcaaatacttgtgcaaagcaagagcgaaagtggccatagccaccagctgggatacaattcttcagtatgataatccagtgactgaatcagttgcctcttttgcagagtacatgtcatcccttcttcaagtagaagtcatcccagtagatggtgcacctagttcaacatcatttaagcaagaagagtgggctcagaacagtattattttgtttgaaaatcttctgaacttcacaggagaagttgctaattgcaaagatttttctcagaagcttgcttcagattggaggcagtaatttcttgagaaaagcacctgctcttcagacgttaacctgtctatgcgatgggttgttctttgttggaaaattatcatttcaaataatgaatggttttggaatgacagtgccctctcaattcatagaaagaaatgcagttaaggaagtactacaaattattcaagttgctagggataggaatattcctatttattatccaacagatctctggtgcttgaaaaatggcgacagtgaaatatcaggggtcatcaactctaccggacaattggctggctggacaccagctgatataggaccatcgacattggagaagatttcttctataattacatcatacaagaagatactgtggattggccctacaaactacggtttgacagaaaaaaattcagttggtggaacacagttgggtgaaatactggaaagtgcaagctctgatggctgtgatgttattttagtgggggatgcagcatgcaaggcagtaaaaagaaaaacagattcctcaccgcaatatacagaatttcaaaagtccactgttgtttgggaattcctcaaaggaaggatattgcctggtatagcagcattggataaagaaatggtttgtttctttttcaaatggctaaaagttgtgaaagttcaaatttccttgggtttgagatgaatgaaaagcttgtcattaggtgcctccaaggtatggcttcagatgagaaaaggaacctatattttgtgtcaacaaatgcaacgtccacatttcgttccatagtttcaagttatcctggacggttgactcttgtcacaatacagtgcccaaatcctgacttcaacaaagagcaaaataggtggagaatggtgcgaagaatgctcattgaagctatcgtcgaccttcttcataccaatggacaggtttatctgcagtcagatgtggagtccgttctgctcgtgatgaaggagcagttcctctcctacagcaagggtcagcttgtcacggacggcgatggtggcaactgcatcgataacccgttcggcgtggtatccgactgggagcgccatgtcctcgctcgcggagctcccatgtacagggcgatgttaaagaaaatgtgattccatttcctccgtctctgaggtctgaacattgcattgttttgtcaccatggctgcttcggacatggacaacgttcatggattcactcggttagataaaactctcttcttttcggagaaaactacatgacaaaaaaattgtgtggttaaatcttaaaatcgaatcaatccaatgggagaaacgcatatcttcccaattgtggctatgtcatctgccgccggagaggccgatgtcagacatggtggcaacgcttatcgccgccctggactgccgaactgaccacgagtcgaagagccgccgg

SEQ ID NO: 4319 - DNA, 2585 bp, Zea Mays
cagacgggggttcatcctacttcgctttcgctcgtcgcgcgcctcgcgctcgattgagctcaccttagccagcgtgtactctctccctccggccctccccgattctcaccaggagcgacggcgactccggtgcgccgctgcttgcgagggcgaaggccggcgtgtggcgcgcggctgcaggcgagggcgaaggctggcgcacggctgcaggcgacgccgcctcgcacttgattcaactcgccccttcaattgcggcgacgctggtcgagcgactgagcccttcgctaggtcttcattgggttcttcgtcggcgagaacccgcaccagcatcagcatcaccaggcatttagaaaggaaggctgtatgaaggctagtaattttcagttaagatcatcaaggcttccttggttagagtcatggctgcttcctcctggattcccagtcgccatgaatagtagctactttttggggggacagggactatccacattgaaatttagagtacggtgctctcagctacagctttctactaattcagttcataataagaaagagaaagagaaatattcttgttttgatcagtcaacatcatatctgcatgtacaatgtcttagggacttcccgactgaaaaactttctggagaggtagttgtggtgcgtcttgattcttcacttatcttggggcacttaggaccatgcacttcctcacttgaaagagctttgctaactatcaaatacttgtgcaaagcaagagcgaaagtggccatagccaccagctgggatacaattcttcagtatgataatccagtgactgaatcagttgcctcttttgcagagtacatgtcatcccttcttcaagtagaagtcatcccagtagatggtgcacctagttcaacatcatttaagcaagaagagtgggctcagaacagtattattttgtttgaaaatcttctgaacttcacaggagaagttgctaattgcaaagatttttctcagaagcttgcttcaggtgccatgatatttgtcaatgattctttctcactgtctcataagattcttgcatcaactgttgggatcacgtgcttctgctatgcgtctcttgctggtttccattttgaagaggagcttatgaaattgataaagatcacggactccacgaggcgcccatatattgccattattggaggcagtaatttcttgagaaaagcacctgctcttcagacgttaacctgtctatgcgatgggttgttctttgttggaaaattatcatttcaaataatgaatggttttggaatgacagtgccctctcaattcatagaaagaaatgcagttaaggaagtactacaaattattcaagttgctagggataggaatattcctatttattatccaacagatctctggtgcttgaaaaatggcgacagtgaaatatcaggggtcatcaactctaccggacaattggctggctggacaccagctgatataggaccatcgacattggagaagatttcttctataattacatcatacaagaagatactgtggattggccctacaaactacggtttgacagaaaaaaattcagttggtggaacacagttgggtgaaatactggaaagtgcaagctctgatggctgtgatgttattttagtgggggatgcagcatgcaaggcagtaaaaagaaaaacagattcctcaccgcaatatacagaatttcaaaagtccactgttgtttgggaattcctcaaaggaaggatattgcctggtatagcagcattggataaagaaatggtttgtttctttttcaaatggctaaaagttgtgaaagttcaaatttccttgggtttgagatgaatgaaaaggtgcctccaaggtatggcttcagatgagaaaaggaacctatattttgtgtcaacaaatgcaacgtccacatttcgttccatagtttcaagttatcctggacggttgactcttgtcacaatacagtgcccaaatcctgacttcaacaaagagcaaaataggtggagaatggtgcgaagaatgctcattgaagctatcgtcgaccttcttcataccaatggacaggtttatctgcagtcagatgtggagtccgttctgctcgtgatgaaggagcagttcctctcctacagcaagggtcagcttgtcacggacggcgatggtggcaactgcatcgataacccgttcggcgtggtatccgactgggagcgccatgtcctcgctcgcggagctcccatgtacagggcgatgttaaagaaaatgtgattccatttcctccgtctctgaggtctgaacattgcattgttttgtcaccatggctgcttcggacatggacaacgttcatggattcactcggttagataaaactctcttcttttcggagaaaactacatgacaaaaaaattgtgtggttaaatcttaaaatcgaatcaatccaatgggagaaacgcatatcttcccaattgtggctatgtcatctgccgccggagaggccgatgtcagacatggtggcaacgcttatcgccgccctggactgccgaactgaccacgagtcgaagagccgccgg

SEQ ID NO: 4320 - DNA, 2025 bp, Zea Mays
cagacgggggttcatcctacttcgctttcgctcgtcgcgcgcctcgcgctcgattgagctcaccttagccagcgtgtactctctccctccggccctccccgattctcaccaggagcgacggcgactccggtgcgccgctgcttgcgagggcgaaggccggcgtgtggcgcgcggctgcaggcgagggcgaaggctggcgcacggctgcaggcgacgccgcctcgcacttgattcaactcgccccttcaattgcggcgacgctggtcgagcgactgagcccttcgctaggtcttcattgggttcttcgtcggcgagaacccgcaccagcatcaccaggcatttagaaaggaaggctgtatgaaggctagtaattttcagttaagatcatcaaggcttccttggttagagtcatggctgcttcctcctggattcccagtcgccatgaatagtagctactttttggggggacagggactatccacattgaaatttagagtacggtgctctcagctacagctttctactaattcagttcataataagaaagagaaagagaaatattcttgttttgatcagtcaacatcatatctgcatgtacaatgtcttagggacttcccgactgaaaaactttctggagaggtagttgtgcaagagcgaaagtggccatagccaccagctgggatacaattcttcagtatgataatccagtgactgaatcagttgcctcttttgcagattggaggcagtaatttcttgagaaaagcacctgctcttcagacgttaacctgtctatgcgatgggttgttctttgttggaaaattatcatttcaaataatgaatggttttggaatgacagtgccctctcaattcatagaaagaaatgcagttaaggaagtactacaaattattcaagttgctagggataggaatattcctatttattatccaacagatctctggtgcttgaaaaatggcgacagtgaaatatcaggggtcatcaactctaccggacaattggctggctggacaccagctgatataggaccatcgacattggagaagatttcttctataattacatcatacaagaagatactgtggattggccctacaaactacggtttgacagaaaaaaattcagttggtggaacacagttgggtgaaatactggaaagtgcaagctctgatggctgtgatgttattttagtgggggatgcagcatgcaaggcagtaaaaagaaaaacagattcctcaccgcaatatacagaatttcaaaagtccactgttgtttgggaattcctcaaaggaaggatattgcctggtatagcagcattggataaaatattttgtgtcaacaaatgcaacgtccacatttcgttccatagtttcaagttatcctggacggttgactcttgtcacaatacagtgcccaaatcctgacttcaacaaagagcaaaataggtggagaatggtgcgaagaatgctcattgaagctatcgtcgaccttcttcataccaatggacaggtttatctgcagtcagatgtggagtccgttctgctcgtgatgaaggagcagttcctctcctacagcaagggtcagcttgtcacggacggcgatggtggcaactgcatcgataacccgttcggcgtggtatccgactgggagcgccatgtcctcgctcgcggagctcccatgtacagggcgatgttaaagaaaatgtgattccatttcctccgtctctgaggtctgaacattgcattgttttgtcaccatggctgcttcggacatggacaacgttcatggattcactcggttagataaaactctcttcttttcggagaaaactacatgacaaaaaaattgtgtggttaaatcttaaaatcgaatcaatccaatgggagaaacgcatatcttcccaattgtggctatgtcatctgccgccggagaggccgatgtcagacatggtggcaacgcttatcgccgccctggactgccgaactgaccacgagtcgaagagccgccgg

SEQ ID NO: 4321 - DNA, 2600 bp, Zea Mays
cagacgggggttcatcctacttcgctttcgctcgtcgcgcgcctcgcgctcgattgagctcaccttagccagcgtgtactctctccctccggccctccccgattctcaccaggagcgacggcgactccggtgcgccgctgcttgcgagggcgaaggccggcgtgtggcgcgcggctgcaggcgagggcgaaggctggcgcacggctgcaggcgacgccgcctcgcacttgattcaactcgccccttcaattgcggcgacgctggtcgagcgactgagcccttcgctaggtcttcattgggttcttcgtcggcgagaacccgcaccagcatcaccaggcatttagaaaggaaggctgtatgaaggctagtaattttcagttaagatcatcaaggcttccttggttagagtcatggctgcttcctcctggattcccagtcgccatgaatagtagctactttttggggggacagggactatccacattgaaatttagagtacggtgctctcagctacagctttctactaattcagttcataataagaaagagaaagagaaatattcttgttttgatcagtcaacatcatatctgcatgtacaatgtcttagggacttcccgactgaaaaactttctggagaggtagttgtggtgcgtcttgattcttcacttatcttggggcacttaggaccatgcacttcctcacttgaaagagctttgctaactatcaaatacttgtgcaaagcaagagcgaaagtggccatagccaccagctgggatacaattcttcagtatgataatccagtgactgaatcagttgcctcttttgcagagtacatgtcatcccttcttcaagtagaagtcatcccagtagatggtgcacctagttcaacatcatttaagcaagaagagtgggctcagaacagtattattttgtttgaaaatcttctgaacttcacaggagaagttgctaattgcaaagatttttctcagaagcttgcttcaggtgccatgatatttgtcaatgattctttctcactgtctcataagattcttgcatcaactgttgggatcacgtgcttctgctatgcgtctcttgctggtttccattttgaagaggagcttatgaaattgataaagatcacggactccacgaggcgcccatatattgccattattggaggcagtaatttcttgagaaaagcacctgctcttcagacgttaacctgtctatgcgatgggttgttctttgttggaaaattatcatttcaaataatgaatggttttggaatgacagtgccctctcaattcatagaaagaaatgcagttaaggaagtactacaaattattcaagttgctagggataggaatattcctatttattatccaacagatctctggtgcttgaaaaatggcgacagtgaaatatcaggggtcatcaactctaccggacaattggctggctggacaccagctgatataggaccatcgacattggagaagatttcttctataattacatcatacaagaagatactgtggattggccctacaaactacggtttgacagaaaaaaattcagttggtggaacacagttgggtgaaatactggaaagtgcaagctctgatggctgtgatgttattttagtgggggatgcagcatgcaaggcagtaaaaagaaaaacagattcctcaccgcaatatacagaatttcaaaagtccactgttgtttgggaattcctcaaaggaaggatattgcctggtatagcagcattggataaagtaagccatggaaatggtttgtttctttttcaaatggctaaaagttgtgaaagttcaaatttccttgggtttgagatgaatgaaaagcttgtcattaggtgcctccaaggtatggcttcagatgagaaaaggaacctatattttgtgtcaacaaatgcaacgtccacatttcgttccatagtttcaagttatcctggacggttgactcttgtcacaatacagtgcccaaatcctgacttcaacaaagagcaaaataggtggagaatggtgcgaagaatgctcattgaagctatcgtcgaccttcttcataccaatggacaggtttatctgcagtcagatgtggagtccgttctgctcgtgatgaaggagcagttcctctcctacagcaagggtcagcttgtcacggacggcgatggtggcaactgcatcgataacccgttcggcgtggtatccgactgggagcgccatgtcctcgctcgcggagctcccatgtacagggcgatgttaaagaaaatgtgattccatttcctccgtctctgaggtctgaacattgcattgttttgtcaccatggctgcttcggacatggacaacgttcatggattcactcggttagataaaactctcttcttttcggagaaaactacatgacaaaaaaattgtgtggttaaatcttaaaatcgaatcaatccaatgggagaaacgcatatcttcccaattgtggctatgtcatctgccgccggagaggccgatgtcagacatggtggcaacgcttatcgccgccctggactgccgaactgaccacgagtcgaagagccgccgg

SEQ ID NO: 4322 - DNA, 2311 bp, Zea Mays
cagacgggggttcatcctacttcgctttcgctcgtcgcgcgcctcgcgctcgattgagctcaccttagccagcgtgtactctctccctccggccctccccgattctcaccaggagcgacggcgactccggtgcgccgctgcttgcgagggcgaaggccggcgtgtggcgcgcggctgcaggcgagggcgaaggctggcgcacggctgcaggcgacgccgcctcgcacttgattcaactcgccccttcaattgcggcgacgctggtcgagcgactgagcccttcgctaggtcttcattgggttcttcgtcggcgagaacccgcaccagcatcaccaggcatttagaaaggaaggctgtatgaaggctagtaattttcagttaagatcatcaaggcttccttggttagagtcatggctgcttcctcctggattcccagtcgccatgaatagtagctactttttggggggacagggactatccacattgaaatttagagtacggtgctctcagctacagctttctactaattcagttcataataagaaagagaaagagaaatattcttgttttgatcagtcaacatcatatctgcatgtacaatgtcttagggacttcccgactgaaaaactttctggagaggtagttgtggtgcgtcttgattcttcacttatcttggggcacttaggaccatgcacttcctcacttgaaagagctttgctaactatcaaatacttgtgcaaagcaagagcgaaagtggccatagccaccagctgggatacaattcttcagtatgataatccagtgactgaatcagttgcctcttttgcagattggaggcagtaatttcttgagaaaagcacctgctcttcagacgttaacctgtctatgcgatgggttgttctttgttggaaaattatcatttcaaataatgaatggttttggaatgacagtgccctctcaattcatagaaagaaatgcagttaaggaagtactacaaattattcaagttgctagggataggaatattcctatttattatccaacagatctctggtgcttgaaaaatggcgacagtgaaatatcaggggtcatcaactctaccggacaattggctggctggacaccagctgatataggaccatcgacattggagaagatttcttctataattacatcatacaagaagatactgtggattggccctacaaactacggtttgacagaaaaaaattcagttggtggaacacagttgggtgaaatactggaaagtgcaagctctgatggctgtgatgttattttagtgggggatgcagcatgcaaggcagtaaaaagaaaaacagattcctcaccgcaatatacagaatttcaaaagtccactgttgtttgggaattcctcaaaggaaggatattgcctggtatagcagcattggataaatgttacccctaccggattccatggagtactgtcttctgtgaacctacactacccttagtggttgatatcggaagtggaaatggtttgtttctttttcaaatggctaaaagttgtgaaagttcaaatttccttgggtttgagatgaatgaaaaggtgcctccaaggtatggcttcagatgagaaaaggaacctatattttgtgtcaacaaatgcaacgtccacatttcgttccatagtttcaagttatcctggacggttgactcttgtcacaatacagtgcccaaatcctgacttcaacaaagagcaaaataggtggagaatggtgcgaagaatgctcattgaagctatcgtcgaccttcttcataccaatggacaggtttatctgcagtcagatgtggagtccgttctgctcgtgatgaaggagcagttcctctcctacagcaagggtcagcttgtcacggacggcgatggtggcaactgcatcgataacccgttcggcgtggtatccgactgggagcgccatgtcctcgctcgcggagctcccatgtacagggcgatgttaaagaaaatgtgattccatttcctccgtctctgaggtctgaacattgcattgttttgtcaccatggctgcttcggacatggacaacgttcatggattcactcggttagataaaactctcttcttttcggagaaaactacatgacaaaaaaattgtgtggttaaatcttaaaatcgaatcaatccaatgggagaaacgcatatcttcccaattgtggctatgtcatctgccgccggagaggccgatgtcagacatggtggcaacgcttatcgccgccctggactgccgaactgaccacgagtcgaagagccgccgg

SEQ ID NO: 4323 - DNA, 2420 bp, Zea Mays
cagacgggggttcatcctacttcgctttcgctcgtcgcgcgcctcgcgctcgattgagctcaccttagccagcgtgtactctctccctccggccctccccgattctcaccaggagcgacggcgactccggtgcgccgctgcttgcgagggcgaaggccggcgtgtggcgcgcggctgcaggcgagggcgaaggctggcgcacggctgcaggcgacgccgcctcgcacttgattcaactcgccccttcaattgcggcgacgctggtcgagcgactgagcccttcgctaggtcttcattgggttcttcgtcggcgagaacccgcaccagcatcaccaggcatttagaaaggaaggctgtatgaaggctagtaattttcagttaagatcatcaaggcttccttggttagagtcatggctgcttcctcctggattcccagtcgccatgaatagtagctactttttggggggacagggactatccacattgaaatttagagtacggtgctctcagctacagctttctactaattcagttcataataagaaagagaaagagaaatattcttgttttgatcagtcaacatcatatctgcatgtacaatgtcttagggacttcccgactgaaaaactttctggagaggtagttgtggtgcgtcttgattcttcacttatcttggggcacttaggaccatgcacttcctcacttgaaagagctttgctaactatcaaatacttgtgcaaagcaagagcgaaagtggccatagccaccagctgggatacaattcttcagtatgataatccagtgactgaatcagttgcctcttttgcagagtacatgtcatcccttcttcaagtagaagtcatcccagtagatggtgcacctagttcaacatcatttaagcaagaagagtgggctcagaacagtattattttgtttgaaaatcttctgaacttcacaggagaagttgctaattgcaaagatttttctcagaagcttgcttcagattggaggcagtaatttcttgagaaaagcacctgctcttcagacgttaacctgtctatgcgatgggttgttctttgttggaaaattatcatttcaaataatgaatggttttggaatgacagtgccctctcaattcatagaaagaaatgcagttaaggaagtactacaaattattcaagttgctagggataggaatattcctatttattatccaacagatctctggtgcttgaaaaatggcgacagtgaaatatcaggggtcatcaactctaccggacaattggctggctggacaccagctgatataggaccatcgacattggagaagatttcttctataattacatcatacaagaagatactgtggattggccctacaaactacggtttgacagaaaaaaattcagttggtggaacacagttgggtgaaatactggaaagtgcaagctctgatggctgtgatgttattttagtgggggatgcagcatgcaaggcagtaaaaagaaaaacagattcctcaccgcaatatacagaatttcaaaagtccactgttgtttgggaattcctcaaaggaaggatattgcctggtatagcagcattggataaagaaatggtttgtttctttttcaaatggctaaaagttgtgaaagttcaaatttccttgggtttgagatgaatgaaaagcttgtcattaggtgcctccaaggtatggcttcagatgagaaaaggaacctatattttgtgtcaacaaatgcaacgtccacatttcgttccatagtttcaagttatcctggacggttgactcttgtcacaatacagtgcccaaatcctgacttcaacaaagagcaaaataggtggagaatggtgcgaagaatgctcattgaagctatcgtcgaccttcttcataccaatggacaggtttatctgcagtcagatgtggagtccgttctgctcgtgatgaaggagcagttcctctcctacagcaagggtcagcttgtcacggacggcgatggtggcaactgcatcgataacccgttcggcgtggtatccgactgggagcgccatgtcctcgctcgcggagctcccatgtacagggcgatgttaaagaaaatgtgattccatttcctccgtctctgaggtctgaacattgcattgttttgtcaccatggctgcttcggacatggacaacgttcatggattcactcggttagataaaactctcttcttttcggagaaaactacatgacaaaaaaattgtgtggttaaatcttaaaatcgaatcaatccaatgggagaaacgcatatcttcccaattgtggctatgtcatctgccgccggagaggccgatgtcagacatggtggcaacgcttatcgccgccctggactgccgaactgaccacgagtcgaagagccgccgg

SEQ ID NO: 4324 - DNA, 2485 bp, Zea Mays
cagacgggggttcatcctacttcgctttcgctcgtcgcgcgcctcgcgctcgattgagctcaccttagccagcgtgtactctctccctccggccctccccgattctcaccaggagcgacggcgactccggtgcgccgctgcttgcgagggcgaaggccggcgtgtggcgcgcggctgcaggcgagggcgaaggctggcgcacggctgcaggcgacgccgcctcgcacttgattcaactcgccccttcaattgcggcgacgctggtcgagcgactgagcccttcgctaggtcttcattgggttcttcgtcggcgagaacccgcaccagcatcaccaggcatttagaaaggaaggctgtatgaaggctagtaattttcagttaagatcatcaaggcttccttggttagagtcatggctgcttcctcctggattcccagtcgccatgaatagtagctactttttggggggacagggactatccacattgaaatttagagtacggtgctctcagctacagctttctactaattcagttcataataagaaagagaaagagaaatattcttgttttgatcagtcaacatcatatctgcatgtacaatgtcttagggacttcccgactgaaaaactttctggagaggtagttgtggtgcgtcttgattcttcacttatcttggggcacttaggaccatgcacttcctcacttgaaagagctttgctaactatcaaatacttgtgcaaagcaagagcgaaagtggccatagccaccagctgggatacaattcttcagtatgataatccagtgactgaatcagttgcctcttttgcagagtacatgtcatcccttcttcaagtagaagtcatcccagtagatggtgcacctagttcaacatcatttaagcaagaagagtgggctcagaacagtattattttgtttgaaaatcttctgaacttcacaggagaagttgctaattgcaaagatttttctcagaagcttgcttcagattggaggcagtaatttcttgagaaaagcacctgctcttcagacgttaacctgtctatgcgatgggttgttctttgttggaaaattatcatttcaaataatgaatggttttggaatgacagtgccctctcaattcatagaaagaaatgcagttaaggaagtactacaaattattcaagttgctagggataggaatattcctatttattatccaacagatctctggtgcttgaaaaatggcgacagtgaaatatcaggggtcatcaactctaccggacaattggctggctggacaccagctgatataggaccatcgacattggagaagatttcttctataattacatcatacaagaagatactgtggattggccctacaaactacggtttgacagaaaaaaattcagttggtggaacacagttgggtgaaatactggaaagtgcaagctctgatggctgtgatgttattttagtgggggatgcagcatgcaaggcagtaaaaagaaaaacagattcctcaccgcaatatacagaatttcaaaagtccactgttgtttgggaattcctcaaaggaaggatattgcctggtatagcagcattggataaatgttacccctaccggattccatggagtactgtcttctgtgaacctacactacccttagtggttgatatcggaagtggaaatggtttgtttctttttcaaatggctaaaagttgtgaaagttcaaatttccttgggtttgagatgaatgaaaaggtgcctccaaggtatggcttcagatgagaaaaggaacctatattttgtgtcaacaaatgcaacgtccacatttcgttccatagtttcaagttatcctggacggttgactcttgtcacaatacagtgcccaaatcctgacttcaacaaagagcaaaataggtggagaatggtgcgaagaatgctcattgaagctatcgtcgaccttcttcataccaatggacaggtttatctgcagtcagatgtggagtccgttctgctcgtgatgaaggagcagttcctctcctacagcaagggtcagcttgtcacggacggcgatggtggcaactgcatcgataacccgttcggcgtggtatccgactgggagcgccatgtcctcgctcgcggagctcccatgtacagggcgatgttaaagaaaatgtgattccatttcctccgtctctgaggtctgaacattgcattgttttgtcaccatggctgcttcggacatggacaacgttcatggattcactcggttagataaaactctcttcttttcggagaaaactacatgacaaaaaaattgtgtggttaaatcttaaaatcgaatcaatccaatgggagaaacgcatatcttcccaattgtggctatgtcatctgccgccggagaggccgatgtcagacatggtggcaacgcttatcgccgccctggactgccgaactgaccacgagtcgaagagccgccgg

SEQ ID NO: 4325 - DNA, 2444 bp, Zea Mays
cagacgggggttcatcctacttcgctttcgctcgtcgcgcgcctcgcgctcgattgagctcaccttagccagcgtgtactctctccctccggccctccccgattctcaccaggagcgacggcgactccggtgcgccgctgcttgcgagggcgaaggccggcgtgtggcgcgcggctgcaggcgagggcgaaggctggcgcacggctgcaggcgacgccgcctcgcacttgattcaactcgccccttcaattgcggcgacgctggtcgagcgactgagcccttcgctaggtcttcattgggttcttcgtcggcgagaacccgcaccagaaagagaaatattcttgttttgatcagtcaacatcatatctgcatgtacaatgtcttagggacttcccgactgaaaaactttctggagaggtagttgtggtgcgtcttgattcttcacttatcttggggcacttaggaccatgcacttcctcacttgaaagagctttgctaactatcaaatacttgtgcaaagcaagagcgaaagtggccatagccaccagctgggatacaattcttcagtatgataatccagtgactgaatcagttgcctcttttgcagagtacatgtcatcccttcttcaagtagaagtcatcccagtagatggtgcacctagttcaacatcatttaagcaagaagagtgggctcagaacagtattattttgtttgaaaatcttctgaacttcacaggagaagttgctaattgcaaagatttttctcagaagcttgcttcaggtgccatgatatttgtcaatgattctttctcactgtctcataagattcttgcatcaactgttgggatcacgtgcttctgctatgcgtctcttgctggtttccattttgaagaggagcttatgaaattgataaagatcacggactccacgaggcgcccatatattgccattattggaggcagtaatttcttgagaaaagcacctgctcttcagacgttaacctgtctatgcgatgggttgttctttgttggaaaattatcatttcaaataatgaatggttttggaatgacagtgccctctcaattcatagaaagaaatgcagttaaggaagtactacaaattattcaagttgctagggataggaatattcctatttattatccaacagatctctggtgcttgaaaaatggcgacagtgaaatatcaggggtcatcaactctaccggacaattggctggctggacaccagctgatataggaccatcgacattggagaagatttcttctataattacatcatacaagaagatactgtggattggccctacaaactacggtttgacagaaaaaaattcagttggtggaacacagttgggtgaaatactggaaagtgcaagctctgatggctgtgatgttattttagtgggggatgcagcatgcaaggcagtaaaaagaaaaacagattcctcaccgcaatatacagaatttcaaaagtccactgttgtttgggaattcctcaaaggaaggatattgcctggtatagcagcattggataaatgttacccctaccggattccatggagtactgtcttctgtgaacctacactacccttagtggttgatatcggaagtggaaatggtttgtttctttttcaaatggctaaaagttgtgaaagttcaaatttccttgggtttgagatgaatgaaaagcttgtcattaggtgcctccaaggtatggcttcagatgagaaaaggaacctatattttgtgtcaacaaatgcaacgtccacatttcgttccatagtttcaagttatcctggacggttgactcttgtcacaatacagtgcccaaatcctgacttcaacaaagagcaaaataggtggagaatggtgcgaagaatgctcattgaagctatcgtcgaccttcttcataccaatggacaggtttatctgcagtcagatgtggagtccgttctgctcgtgatgaaggagcagttcctctcctacagcaagggtcagcttgtcacggacggcgatggtggcaactgcatcgataacccgttcggcgtggtatccgactgggagcgccatgtcctcgctcgcggagctcccatgtacagggcgatgttaaagaaaatgtgattccatttcctccgtctctgaggtctgaacattgcattgttttgtcaccatggctgcttcggacatggacaacgttcatggattcactcggttagataaaactctcttcttttcggagaaaactacatgacaaaaaaattgtgtggttaaatcttaaaatcgaatcaatccaatgggagaaacgcatatcttcccaattgtggctatgtcatctgccgccggagaggccgatgtcagacatggtggcaacgcttatcgccgccctggactgccgaactgaccacgagtcgaagagccgccgg

SEQ ID NO: 4326 - DNA, 2070 bp, Zea Mays
aacccgcaccagggacttcccgactgaaaaactttctggagaggtagttgtggtgcgtcttgattcttcacttatcttggggcacttaggaccatgcacttcctcacttgaaagagctttgctaactatcaaatacttgtgcaaagcaagagcgaaagtggccatagccaccagctgggatacaattcttcagtatgataatccagtgactgaatcagttgcctcttttgcagagtacatgtcatcccttcttcaagtagaagtcatcccagtagatggtgcacctagttcaacatcatttaagcaagaagagtgggctcagaacagtattattttgtttgaaaatcttctgaacttcacaggagaagttgctaattgcaaagatttttctcagaagcttgcttcaggtgccatgatatttgtcaatgattctttctcactgtctcataagattcttgcatcaactgttgggatcacgtgcttctgctatgcgtctcttgctggtttccattttgaagaggagcttatgaaattgataaagatcacggactccacgaggcgcccatatattgccattattggaggcagtaatttcttgagaaaagcacctgctcttcagacgttaacctgtctatgcgatgggttgttctttgttggaaaattatcatttcaaataatgaatggttttggaatgacagtgccctctcaattcatagaaagaaatgcagttaaggaagtactacaaattattcaagttgctagggataggaatattcctatttattatccaacagatctctggtgcttgaaaaatggcgacagtgaaatatcaggggtcatcaactctaccggacaattggctggctggacaccagctgatataggaccatcgacattggagaagatttcttctataattacatcatacaagaagatactgtggattggccctacaaactacggtttgacagaaaaaaattcagttggtggaacacagttgggtgaaatactggaaagtgcaagctctgatggctgtgatgttattttagtgggggatgcagcatgcaaggcagtaaaaagaaaaacagattcctcaccgcaatatacagaatttcaaaagtccactgttgtttgggaattcctcaaaggaaggatattgcctggtatagcagcattggataaatgttacccctaccggattccatggagtactgtcttctgtgaacctacactacccttagtggttgatatcggaagtggaaatggtttgtttctttttcaaatggctaaaagttgtgaaagttcaaatttccttgggtttgagatgaatgaaaagcttgtcattaggtgcctccaaggtatggcttcagatgagaaaaggaacctatattttgtgtcaacaaatgcaacgtccacatttcgttccatagtttcaagttatcctggacggttgactcttgtcacaatacagtgcccaaatcctgacttcaacaaagagcaaaataggtggagaatggtgcgaagaatgctcattgaagctatcgtcgaccttcttcataccaatggacaggtttatctgcagtcagatgtggagtccgttctgctcgtgatgaaggagcagttcctctcctacagcaagggtcagcttgtcacggacggcgatggtggcaactgcatcgataacccgttcggcgtggtatccgactgggagcgccatgtcctcgctcgcggagctcccatgtacagggcgatgttaaagaaaatgtgattccatttcctccgtctctgaggtctgaacattgcattgttttgtcaccatggctgcttcggacatggacaacgttcatggattcactcggttagataaaactctcttcttttcggagaaaactacatgacaaaaaaattgtgtggttaaatcttaaaatcgaatcaatccaatgggagaaacgcatatcttcccaattgtggctatgtcatctgccgccggagaggccgatgtcagacatggtggcaacgcttatcgccgccctggactgccgaactgaccacgagtcgaagagccgccgg

SEQ ID NO: 4327 - DNA, 1161 bp, Zea Mays
gatcattgtggtttatggttcgcattggaatttatgtgttgttcgtgcttgatgaattttctccaaatgaacaagggagacaatgagaggcaatgttgaagctgtcgatcccgggaataaagctgctgcggaaccggtgggagatgtagctgcgccatcgtcaaggatggctaggaggctactacatggatcatggtgccctcctcggtgtcaggggatatgcttgaatcagagtaggggtaggtaagggtgaggattgtccatttatcgccttcaatttcttcaataccattgatatttaagtcgtctcatcgagcttctttatatattattccgcaacttaatctattttcttgtcccaaaaatcatcaccacatctagttaccttatgttgttttgatttgttggtcgctgctccctggagaacgttcatgctatggacacaaactcaagtggacgtggtgttcgacaattcaaaatatacctattgcatatattggaaaaggaaaccccaggcgtttcaaagttagagtttcacaacttgcagcgaatttgggttctttttaatttgttgctttagtattgaattaacgtatgatcattgtggtttatggttcgcattggaatttatgtgttgttcgtgcttgatgaattttctccaaaagaacaagggagacaatgagaggtgtgtaatatgaactctacctaatgccttgttgctctacaaaatgtcccatatgtattcttctgtactctaatcttgtttgttgttgttggtcatccttatactttcccccactattgcaaggcgatgttgaagctgtcgatcccgggaataaagctgttgcggaaccggtgggagatgtagctgctgcggaacacgaaagggtgcatcactggaataagctcgagaccacaagtgtcatatctcctctaatctttactctctcaggttccagttgaatatgttcattgctacaatgaagccgttttgttgtttgctgtccgccgccgtattcggggtcttcgcctgcctctatgggctcagggcggacaggggcctacaagatctcctcgggccaaggaatcgttcccctccggcgacctccctcctccctttcgtctcaggccttccactgtatctccatcaaagcgaaggat

SEQ ID NO: 4328 - DNA, 2672 bp, Zea Mays
taaatgagtgttaaaatagcaaaaaaaaaaaaaaattatcgccccatgcgcccggccaattttctagtatatggatagggtttagacttcacagttctcctgcctaccccgtccctccccaagcgcgccgtctagggtttcacagccgtgccccgatccattcgagcgccccgcaccgccgccatggagtttgacgaatacgagtacttggagaaggcggtagagcccgctcccccacaggccaatggttccggctccggctccggcgagaaggaccgcggctcgcgccgccgcgagggcggcgaggaccgcatatcgaagcgctctcgctcgggggaggaccgcgaccgggacaggcaccgcagcggccgggagcaccgtgaccgggacaaggatgacgtgaaggaggagaggagccgcgaaagccgcgggaaggacagggacagggaagggagagaacgggagaaggagaggggtgacaggcaccggctgagagagagggaagtggaacgggagcggaggagccggagccgctcggagcggcgccgtgccgaggaagaggagatggttagggagctggagcgggagcgcgagcgcagcgagcgacatcactatcgcgaccgtgatgtcagatatgatacgatagagccgtcttcagatggtatctgcaattgggcctgactcaagatatcaggcgtaggaaagatgacggggcagagccagaagttgatccagaaagggaccagaggactgtatttgccttccagctatctttgaaggcagacgagagagatgtttatgagttcttctcaagggctgggaaggttcgtgatgttcgtcttatcatggaccggaactcaagacgttctaaaggagttgggattgcacactgaaatttaataatttggtctacctgctgggattatcggcaatttacaagtttctaggcaataaagggggcacccaagaaccaagttcgaaaacctccactagttttgatcaaaatgcctgaagttttctgtgaaaatttgaaatatcttaacatatgatgccccacttattgtttttcttttcttttacaggaagacaactttttttggatgctttgatgattgtactaaacatatatctcaattcacaggtacattgagttttacgacgttatgtctgttccaatggcaattgctctgtctggtcaaccgctgcttggacaagcagtgatggttaaaccatctgaggctgaaaagaacttagttcagtcaaatgcgacatcaggtggtgcggcttcaggtggagcaagaaagttgtatgttggcaatcttcactcaaatattactgaagaccaattgagacaggtatttgaaccatttgggcaagtagagcttgtacagcttcctgtagatccaatgactggattgtgcaaaggttatggttttattcagtttgcacggcttgaagatgcaaaagctgcacagagcttgaatgggcagcttgatatcgctggcagagttattaaggtttcagctgttaccgatcatgtgggaatgcaagctagtggagcaactactggagatttagatgacgatgaaggcactaaatgcaagttccagagctgctctaatgctcaaattggacaggagtggtactgcgaccagcttaactcgtggtattggtgctgctggtgtggctgtaccagctacttctgttattggggctccaggagctgcttctcttctaccaccaacagttgctgctgttggatcagttcctggggcacctgtgcttcctgttaccactcagaatgtgaccatgtctacacctacagaattcttgttgcttaaaaacatgtttgacccagcattggagacagatcctgattttgacttggatattcgagatgatgtccaagatgagtgttccaagtttggtgcagtgaagcatatttttgttgacaaaaatactgcaggctttgtgtatctgcagttcgatagcgtgactgcagcagcaaaggcccaaaatgcccttcacggaagatggttcgctgggaagatgattacagcgacatttatgtacgaagttcccaaacttgtgagcatatgccgggaagagttggccagacctgcatagttcgtttggagtattcgcaagtgctgtatcgttggatggtagacgaacaccttattgattgtatgacagggtagttgcagcaccgggcgtcactatcagtacaatgcttgatgtactttatttacggcgtcgcagtgaccaaaccttatttttgtccaccgaatgaaatgccctatcatctccaggcttgttggcatatggttgattttctggacgatcaccataacacatttttgtcagatttccaatgtgctttattttttattctcttatgtttcaggatgttttgatatgttcttgctttcaccaagaagtttgccatttcaatccgtttcattttattttattcgactgatacagtttattgtttttctgttctcttttagggctagtttgacatccacatttttccatgggatttctaatttttcaagggaaaatgaactaatttcttttgggaaaatgaaaaacacttggcgaaacgaggtttccaaactaggccttaacaagaaattcaccggcgaaggaaaacaacaacaagctcc

SEQ ID NO: 4329 - DNA, 2564 bp, Zea Mays
atagggtttagacttcacagttctcctgcctaccccgtccctccccaagcgcgccgtctagggtttcacagccgtgccccgatccattcgagcgccccgcaccgccgccatggagtttgacgaatacgagtacttggagaaggcggtagagcccgctcccccacaggccaatggttccggctccggctccggcgagaaggaccgcggctcgcgccgccgcgagggcggcgaggaccgcatatcgaagcgctctcgctcgggggaggaccgcgaccgggacaggcaccgcagcggccgggagcaccgtgaccgggacaaggatgacgtgaaggaggagaggagccgcgaaagccgcgggaaggacagggacagggaagggagagaacgggagaaggagaggggtgacaggcaccggctgagagagagggaagtggaacgggagcggaggagccggagccgctcggagcggcgccgtgccgaggaagaggagatggttagggagctggagcgggagcgcgagcgcagcgagcgacatcactatcgcgaccgtgatgtcaggcgtaggaaagatgacggggcagagccagaagttgatccagaaagggaccagaggactgtatttgccttccagctatctttgaaggcagacgagagagatgtttatgagttcttctcaagggctgggaaggttcgtgatgttcgtcttatcatggaccggaactcaagacgttctaaaggagttgggattgcacactgaaatttaataatttggtctacctgctgggattatcggcaatttacaagtttctaggcaataaagggggcacccaagaaccaagttcgaaaacctccactagttttgatcaaaatgcctgaagttttctgtgaaaatttgaaatatcttaacatatgatgccccacttattgtttttcttttcttttacaggaagacaactttttttggatgctttgatgattgtactaaacatatatctcaattcacaggtacattgagttttacgacgttatgtctgttccaatggcaattgctctgtctggtcaaccgctgcttggacaagcagtgatggttaaaccatctgaggctgaaaagaacttagttcagtcaaatgcgacatcaggtggtgcggcttcaggtggagcaagaaagttgtatgttggcaatcttcactcaaatattactgaagaccaattgagacaggtatttgaaccatttgggcaagtagagcttgtacagcttcctgtagatccaatgactggattgtgcaaaggttatggttttattcagtttgcacggcttgaagatgcaaaagctgcacagagcttgaatgggcagcttgatatcgctggcagagttattaaggtttcagctgttaccgatcatgtgggaatgcaagctagtggagcaactactggagatttagatgacgatgaaggtggaggcttggcactaaatgcaagttccagagctgctctaatgctcaaattggacaggagtggtactgcgaccagcttaactcgtggtattggtgctgctggtgtggctgtaccagctacttctgttattggggctccaggagctgcttctcttctaccaccaacagttgctgctgttggatcagttcctggggcacctgtgcttcctgttaccactcagaatgtgaccatgtctacacctacagaattcttgttgcttaaaaacatgtttgacccagcattggagacagatcctgattttgacttggatattcgagatgatgtccaagatgagtgttccaagtttggtgcagtgaagcatatttttgttgacaaaaatactgcaggctttgtgtatctgcagttcgatagcgtgactgcagcagcaaaggcccaaaatgcccttcacggaagatggttcgctgggaagatgattacagcgacatttatgtccgctctggagtacagtacgaagttcccaaacttgtgagcatatgccgggaagagttggccagacctgcatagttcgtttggagtattcgcaagtgctgtatcgttggatggtagacgaacaccttattgattgtatgacagggtagttgcagcaccgggcgtcactatcagtacaatgcttgatgtactttatttacggcgtcgcagtgaccaaaccttatttttgtccaccgaatgaaatgccctatcatctccaggcttgttggcatatggttgattttctggacgatcaccataacacatttttgtcagatttccaatgtgctttattttttattctcttatgtttcaggatgttttgatatgttcttgctttcaccaagaagtttgccatttcaatccgtttcattttattttattcgactgatacagtttattgtttttctgttctcttttagggctagtttgacatccacatttttccatgggatttctaatttttcaagggaaaatgaactaatttcttttgggaaaatgaaaaacacttggcgaaacgaggtttccaaactaggccttaacaagaaattcaccggcgaaggaaaacaacaacaagctcc

SEQ ID NO: 4330 - DNA, 2708 bp, Zea Mays
atagggtttagacttcacagttctcctgcctaccccgtccctccccaagcgcgccgtctagggtttcacagccgtgccccgatccattcgagcgccccgcaccgccgccatggagtttgacgaatacgagtacttggagaaggcggtagagcccgctcccccacaggccaatggttccggctccggctccggcgagaaggaccgcggctcgcgccgccgcgagggcggcgaggaccgcatatcgaagcgctctcgctcgggggaggaccgcgaccgggacaggcaccgcagcggccgggagcaccgtgaccgggacaaggatgacgtgaaggaggagaggagccgcgaaagccgcgggaaggacagggacagggaagggagagaacgggagaaggagaggggtgacaggcaccggctgagagagagggaagtggaacgggagcggaggagccggagccgctcggagcggcgccgtgccgaggaagaggagatggttagggagctggagcgggagcgcgagcgcagcgagcgacatcactatcgcgaccgtgatgtcagatatgatacgatagagccgtcttcagatggtatctgcaattgggcctgactcaagatatcaggcgtaggaaagatgacggggcagagccagaagttgatccagaaagggaccagaggactgtatttgccttccagctatctttgaaggcagacgagagagatgtttatgagttcttctcaagggctgggaaggttcgtgatgttcgtcttatcatggaccggaactcaagacgttctaaaggagttgggattgcacactgaaatttaataatttggtctacctgctgggattatcggcaatttacaagtaagatggaatattagatcattctgatgtcagacagcagtcgaggacagtttgattccagtgtatttgacaaacccttggtgcaggtttctaggcaataaagggggcacccaagaaccaagttcgaaaacctccactagttttgatcaaaatgcctgaagttttctgtgaaaatttgaaatatcttaacatatgatgccccacttattgtttttcttttcttttacaggaagacaactttttttggatgctttgatgattgtactaaacatatatctcaattcacaggtacattgagttttacgacgttatgtctgttccaatggcaattgctctgtctggtcaaccgctgcttggacaagcagtgatggttaaaccatctgaggctgaaaagaacttagttcagtcaaatgcgacatcaggtggtgcggcttcaggtggagcaagaaagttgtatgttggcaatcttcactcaaatattactgaagaccaattgagacaggtatttgaaccatttgggcaagtagagcttgtacagcttcctgtagatccaatgactggattgtgcaaaggttatggttttattcagtttgcacggcttgaagatgcaaaagctgcacagagcttgaatgggcagcttgatatcgctggcagagttattaaggtttcagctgttaccgatcatgtgggaatgcaagctagtggagcaactactggagatttagatgacgatgaaggtggaggcttggcactaaatgcaagttccagagctgctctaatgctcaaattggacaggagtggtactgcgaccagcttaactcgtggtattggtgctgctggtgtggctgtaccagctacttctgttattggggctccaggagctgcttctcttctaccaccaacagttgctgctgttggatcagttcctggggcacctgtgcttcctgttaccactcagaatgtgaccatgtctacacctacagaattcttgttgcttaaaaacatgtttgacccagcattggagatcctgattttgacttggatattcgagatgatgtccaagatgagtgttccaagtttggtgcagtgaagcatatttttgttgacaaaaatactgcaggctttgtgtatctgcagttcgatagcgtgactgcagcagcaaaggcccaaaatgcccttcacggaagatggttcgctgggaagatgattacagcgacatttatgtccgctctggagtacagtacgaagttcccaaacttgtgagcatatgccgggaagagttggccagacctgcatagttcgtttggagtattcgcaagtgctgtatcgttggatggtagacgaacaccttattgattgtatgacagggtagttgcagcaccgggcgtcactatcagtacaatgcttgatgtactttatttacggcgtcgcagtgaccaaaccttatttttgtccaccgaatgaaatgccctatcatctccaggcttgttggcatatggttgattttctggacgatcaccataacacatttttgtcagatttccaatgtgctttattttttattctcttatgtttcaggatgttttgatatgttcttgctttcaccaagaagtttgccatttcaatccgtttcattttattttattcgactgatacagtttattgtttttctgttctcttttagggctagtttgacatccacatttttccatgggatttctaatttttcaagggaaaatgaactaatttcttttgggaaaatgaaaaacacttggcgaaacgaggtttccaaactaggccttaacaagaaattcaccggcgaaggaaaacaacaacaagctcc

SEQ ID NO: 4331 - DNA, 2365 bp, Zea Mays
atagggtttagacttcacagttctcctgcctaccccgtccctccccaagcgcgccgtctagggtttcacagccgtgccccgatccattcgagcgccccgcaccgccgccatggagtttgacgaatacgagtacttggagaaggcggtagagcccgctcccccacaggccaatggttccggctccggctccggcgagaaggaccgcggctcgcgccgccgcgagggcggcgaggaccgcatatcgaagcgctctcgctcgggggaggaccgcgaccgggacaggcaccgcagcggccgggagcaccgtgaccgggacaaggatgacgtgaaggaggagaggagccgcgaaagccgcgggaaggacagggacagggaagggagagaacgggagaaggagaggggtgacaggcaccggctgagagagagggaagtggaacgggagcggaggagccggagccgctcggagcggcgccgtgccgaggaagaggagatggttagggagctggagcgggagcgcgagcgcagcgagcgacatcactatcgcgaccgtgatgtcagatatgatacgatagagccgtcttcagatggtatctgcaattgggcctgactcaagatatcaggcgtaggaaagatgacggggcagagccagaagttgatccagaaagggaccagaggactgtatttgccttccagctatctttgaaggcagacgagagagatgtttatgagttcttctcaagggctgggaaggttcgtgatgttcgtcttatcatggaccggaactcaagacgttctaaaggagttgggtacattgagttttacgacgttatgtctgttccaatggcaattgctctgtctggtcaaccgctgcttggacaagcagtgatggttaaaccatctgaggctgaaaagaacttagttcagtcaaatgcgacatcaggtggtgcggcttcaggtggagcaagaaagttgtatgttggcaatcttcactcaaatattactgaagaccaattgagacaggtatttgaaccatttgggcaagtagagcttgtacagcttcctgtagatccaatgactggattgtgcaaaggttatggttttattcagtttgcacggcttgaagatgcaaaagctgcacagagcttgaatgggcagcttgatatcgctggcagagttattaaggtttcagctgttaccgatcatgtgggaatgcaagctagtggagcaactactggagatttagatgacgatgaaggtggaggcttggcactaaatgcaagttccagagctgctctaatgctcaaattggacaggagtggtactgcgaccagcttaactcgtggtattggtgctgctggtgtggctgtaccagctacttctgttattggggctccaggagctgcttctcttctaccaccaacagttgctgctgttggatcagttcctggggcacctgtgcttcctgttaccactcagaatgtgaccatgtctacacctacagaattcttgttgcttaaaaacatgtttgacccagcattggagacagatcctgattttgacttggatattcgagatgatgtccaagatgagtgttccaagtttggtgcagtgaagcatatttttgttgacaaaaatactgcaggctttgtgtatctgcagttcgatagcgtgactgcagcagcaaaggcccaaaatgcccttcacggaagatggttcgctgggaagatgattacagcgacatttatgtccgctctggagtacagtacgaagttcccaaacttgtgagcatatgccgggaagagttggccagacctgcatagttcgtttggagtattcgcaagtgctgtatcgttggatggtagacgaacaccttattgattgtatgacagggtagttgcagcaccgggcgtcactatcagtacaatgcttgatgtactttatttacggcgtcgcagtgaccaaaccttatttttgtccaccgaatgaaatgccctatcatctccaggcttgttggcatatggttgattttctggacgatcaccataacacatttttgtcagatttccaatgtgctttattttttattctcttatgtttcaggatgttttgatatgttcttgctttcaccaagaagtttgccatttcaatccgtttcattttattttattcgactgatacagtttattgtttttctgttctcttttagggctagtttgacatccacatttttccatgggatttctaatttttcaagggaaaatgaactaatttcttttgggaaaatgaaaaacacttggcgaaacgaggtttccaaactaggccttaacaagaaattcaccggcgaaggaaaacaacaacaagctcc

SEQ ID NO: 4332 - DNA, 2626 bp, Zea Mays
atagggtttagacttcacagttctcctgcctaccccgtccctccccaagcgcgccgtctagggtttcacagccgtgccccgatccattcgagcgccccgcaccgccgccatggagtttgacgaatacgagtacttggagaaggcggtagagcccgctcccccacaggccaatggttccggctccggctccggcgagaaggaccgcggctcgcgccgccgcgagggcggcgaggaccgcatatcgaagcgctctcgctcgggggaggaccgcgaccgggacaggcaccgcagcggccgggagcaccgtgaccgggacaaggatgacgtgaaggaggagaggagccgcgaaagccgcgggaaggacagggacagggaagggagagaacgggagaaggagaggggtgacaggcaccggctgagagagagggaagtggaacgggagcggaggagccggagccgctcggagcggcgccgtgccgaggaagaggagatggttagggagctggagcgggagcgcgagcgcagcgagcgacatcactatcgcgaccgtgatgtcagatatgatacgatagagccgtcttcagatggtatctgcaattgggcctgactcaagatatcaggcgtaggaaagatgacggggcagagccagaagttgatccagaaagggaccagaggactgtatttgccttccagctatctttgaaggcagacgagagagatgtttatgagttcttctcaagggctgggaaggttcgtgatgttcgtcttatcatggaccggaactcaagacgttctaaaggagttgggattgcacactgaaatttaataatttggtctacctgctgggattatcggcaatttacaagtttctaggcaataaagggggcacccaagaaccaagttcgaaaacctccactagttttgatcaaaatgcctgaagttttctgtgaaaatttgaaatatcttaacatatgatgccccacttattgtttttcttttcttttacaggaagacaactttttttggatgctttgatgattgtactaaacatatatctcaattcacaggtacattgagttttacgacgttatgtctgttccaatggcaattgctctgtctggtcaaccgctgcttggacaagcagtgatggttaaaccatctgaggctgaaaagaacttagttcagtcaaatgcgacatcaggtggtgcggcttcaggtggagcaagaaagttgtatgttggcaatcttcactcaaatattactgaagaccaattgagacaggtatttgaaccatttgggcaagtagagcttgtacagcttcctgtagatccaatgactggattgtgcaaaggttatggttttattcagtttgcacggcttgaagatgcaaaagctgcacagagcttgaatgggcagcttgatatcgctggcagagttattaaggtttcagctgttaccgatcatgtgggaatgcaagctagtggagcaactactggagatttagatgacgatgaaggtggaggcttggcactaaatgcaagttccagagctgctctaatgctcaaattggacaggagtggtactgcgaccagcttaactcgtggtattggtgctgctggtgtggctgtaccagctacttctgttattggggctccaggagctgcttctcttctaccaccaacagttgctgctgttggatcagttcctggggcacctgtgcttcctgttaccactcagaatgtgaccatgtctacacctacagaattcttgttgcttaaaaacatgtttgacccagcattggagacagatcctgattttgacttggatattcgagatgatgtccaagatgagtgttccaagtttggtgcagtgaagcatatttttgttgacaaaaatactgcaggctttgtgtatctgcagttcgatagcgtgactgcagcagcaaaggcccaaaatgcccttcacggaagatggttcgctgggaagatgattacagcgacatttatgtccgctctggagtacagtacgaagttcccaaacttgtgagcatatgccgggaagagttggccagacctgcatagttcgtttggagtattcgcaagtgctgtatcgttggatggtagacgaacaccttattgattgtatgacagggtagttgcagcaccgggcgtcactatcagtacaatgcttgatgtactttatttacggcgtcgcagtgaccaaaccttatttttgtccaccgaatgaaatgccctatcatctccaggcttgttggcatatggttgattttctggacgatcaccataacacatttttgtcagatttccaatgtgctttattttttattctcttatgtttcaggatgttttgatatgttcttgctttcaccaagaagtttgccatttcaatccgtttcattttattttattcgactgatacagtttattgtttttctgttctcttttagggctagtttgacatccacatttttccatgggatttctaatttttcaagggaaaatgaactaatttcttttgggaaaatgaaaaacacttggcgaaacgaggtttccaaactaggccttaacaagaaattcaccggcgaaggaaaacaacaacaagctcc

SEQ ID NO: 4333 - DNA, 1674 bp, Zea Mays
aggcgtgcacagtgcgccatgttctgccgcgcctgcgctcccaccgcgtgtccgcagctctgccccacctcacatccgcgcccgcaatccacgcctccgtcgccgcagcccttcctccgcgcagcgtccgtccatccatggctctccctacacgcagcgtcgtgccgctttccacaatccgtgcctcaatccccttccttcgcgcagcacccttccatccatggctcgcttccagaaatccccctacctacggcgcagcgtcgcagtccggaatccacccccaaaatcactacccgctctgcggcgatggaagggaatcaaaacgcgtgcttcccccttccatcctcgacgttgcgcggattgcatggccatcgtttcgcgcccccaatccgtcgatgcaaggaacgcgtgcttcccccttccatcctcgacgctgcgcgaattgcagattgcggattgcatggtcatcgtttcgtcccagttcattgcccgcatcagatggaagggcgccccgatctgcctcacctccatcaatgaggtgtctgcctttcttgcatggagacgccaaagagaaggaaccagtcactaagtcggcctctgtacggtccatgaacatacatcaacggagcgtgatgtccgctccggttcagacttcacctccttgaatgtttccgacatgagcgccgagtcgataaggaggacacagtaccccagcttcattgaccgcccgtctaacctgagggtgttctcctttgctgaattgaagagtgccacccgcaacttccgccggtctctcatggttggctagggtggctttggctgtgtgtacaggggtgtcatcaagacctccgacgatctgaacgaacgaatcgagatcgctgttaagcagttgaatcgtaaaggacttcagggtccaattttgtggaaggaatgctttttctccccttgccttttcggttagaaatcttggtatttaaatcacccctttttggtttgtggttgtgccctctccccacatgaggtgatttaaataccaagatttctattattcaattgattccttgatcatttcctttccagattagtgaaaggtctcccttgctttattttcatcgaaaacaaagcgaaccacaatcttagtctccaaggtcaatttctgacggtggcactccaaaatctaatcacgatggcctaatagcttgagtgttgaacgcaatatttcagattcatacctatatgatacttggagcagcaatatgcatagtgtcgccctttttcataccctaaagtataaaatatagggcacacacttacatgtcaaaatttattattcaaaggaaataacaacgttctttttgctaaatgttctttagcaatttgattagtcaaagaggttgcttgtttttttgtgggaacgagattcgggactcaggagctcacttgctcccactatgacattgtatatgtaccagacacttgcatatactaattgttttcttttaaatgcactttacttaattatactgacatatgtcattggagctgtgatgcctcatccatccctaaagttgtatagaattcatcgcttggatcaataagtgttgtttaacaggcagaaatgggtgcttaggatcttaccactgtttatttaaaatttagatagataaagagcac

SEQ ID NO: 4334 - DNA, 1159 bp, Zea Mays
ctcgaccacgcccccgccccaccctgcgcatgcccactagaatcgccgccatgacaggcgctctctctaccccgtgttaccccctctgaattcggccctagatccttggctcacgcgtgcgaattttgtctcttactctgagtcttactggcgcaggatgagggcggcgcgtcggcgcagaagaggtccccaagcggcaagtttggtggcggcgagaccgtgctagagatcgtgtaggccagccagttcgcgcgggacatcatgacggctgtcggcgctatgaatcgggagcccccgaggaccccgaaaccggctcccaggaccaggaagccggcggcgggcgagccgacgcctctccacgcgtggcgtggccgggtgaagcagagccatcggggtggcactgtgacacggggcgctgacgcgccacgccgccgtcgcgcagccgcgtgcggtcccggatccagttcaagcccgtgtcgtcagtcaccgtcggccggccgttcgtgtctgccaaccgcgtttcccccaagaaccgaccgtgggtcaagaaggtggtgatgtttccgaactccatgttccacgcctccacctctgccgccaccgactcatgcgcgacgtcgtcgccttccaagaagcagaagtggctctacaagacgcggtcccctgtcgtggcccagcagacgccgcacaagttcctggtcaaagtcaccaccgagtgcgctgggatccaagctcaggatgcacgggaaggccctacccgcgagacccgccgccatccgtgaaggcgcaggtgtcacctgcaaaaacgcggagctgctcgttctcgccgtcaaggttggcgacaaggctcatgtcgcctatcaaagcgaggctatcgctgggcaggaaccaggatagcgacgtcggtgtcgacggtggcctgatgagcgggctgaagcagcggccaggtgttagcttgatggtgtgaacgatgtcgagcaagatatcatcgaggtgatgatcttcgtttgtcttcagcgtcatgtgaagacgagagggggtacagattggagaggagagaattgcgttgatcttcttcaaaaataagatattctcagctgggaaagctcttgtcttggggtacttgtacacacactcattacggttatctgtaattttt

SEQ ID NO: 4335 - DNA, 3159 bp, Zea Mays
atttttttcactccccctcggcccctcatctcttcctctcccataaaccctaaaccgccctattccccactcgatttcgccatggaagccgacgaggcctcggcgccgcctcccccgccgtggatgcagaacaagtcggccgcggccatcgaggcctcgtcgggcccgctttccgccgcggcctcccgcctctccgcccgctcccgtgcgctcccctcgtcccgcgacttccacttctacaacaacttcccggcattcaaatccccagtcggcgctgcggccgcgaaggccgacgcgtccctcggcgtgctcggcggggcttcgattctcccgacgcggcagcagccgttccccgtgggcggcgacctcgacgacgcgcacgactggctcgtcgccctcaacgacgacttgctcgagcggttcggcgcctccaccgacgagttcaagaccctgcggcggaaggaggagacttccgggcggagggcggcgccgcaggctggggacgggttccaagtggtgtgcgggaagaagaaaaagaaggtgggcgatggtggcgaggaacgcgtcggcagagttgaggctttcggaggttttggctctgtgaggatggtcaccaaggacaaggcggccgcgccgggggtgaaggcgaaggtgcccttccacatccgcaccatcccaaggccccaggatgtgtattgtattgtggtggacaactccagcaagccgttcgagcatatcttgcttgatcgcagcgaggatggcactcgggtcgtgcacccattggaaaaactccctgttgaacaaataatcagcagaaatgttcctgataatgagccagttaagccaccggctttagacaacactccttttacatttgttgaagacctgaaaaccttggaggtgctagccacaaagctgaaggatgcaactgagtttgctgtcgatttggaacacaaccattataggtcgtttcagggtttgacatgcttgatgcagatttcaacaagaacagaggactttattgttgacactcttaagcttcgtaaatatcttggtgattatctaagagagtttttcagagatccaaccaagaaaaaggtcgtgatataatatggcttcaacgagacttcagcatatatgtgtgcaacctttttgacacaggccaggcttcaaaggtcttacagatggaccgcaacagcttggaacatcttttgcaccatttctgtggagtagctgcaaataaagaataccaagctgcagattggagattgaggccccttcctgatgaaatgatcaaatatgctagagaggatacacactatctgctatatatatatgacctgatgagattgagactagtgaatgggtcatcatgtgaaaatgatcttcttttagaggtttgcaagcgcagcaacgaaatttgcttgcaactgtatgagaaggagcagctgactgatacatcatatctacatatacatgggttgaaagaaaacgagctgaatgcaacgcagctgtcagttctttccagtctatatcgatggagagatggcattgcccgtgctgaggatgagagcactggctatatattacccaataagactctacttgagatagcaaaggagatgcctgtgacaagtgggaagttgaaaagaatgattaaatcaagaaattcgattttggaacgaaatctcaaccatgttattaacaatataagggatgccatagcagcttctggtgcttttgaaagtatagtggagcagctgaagaagggaaaactggaagagttaacattggcagatgtgaagaacagcagtgaggacactgaaatgattcctgctgttgatgttgataacattgaagatccgagtgatgaatctgctgtagttcctgcagtgattacaaatgtcggtgctgctccctgtattacaagcgaagcttccttgggtaatatgcatttagaggaccctgtgcctaaaacaaaggactcgggtgcttcatcagggtttactggactgacagacaacaaaaagctgagcaatgaccagcagcaagcagcaaaggctactgttcaagtatcaaagaggcctacagcttttggagctctgtttggaaaggcagctgctggaagaaggccagatcttttcctaggattttcaaatgttcagggtaagactaaggtggacaagataacgtcttccgtggtacttccttttcatcatttctcaggtggtgcaaaactttcatcagccgcccttccagcgaaagaatcgttgcattctgaaccagacagcatccaacacagtgatccagcttgtcagttggaagaagtgatacagttggacatgggaacagacgagcaacaaccaccagaaaatggcaacgaggatgatggacactgtgagactgaagacacggagatgtcaaagtccccttcaggtgacccgtctgttaccgagcaacgattccgatcactcaacgaagaaagaaacgttaagcagaaccagaagacacctcgagaattcgaatttagtgttccggtggtgccttttgattatgccgaagccagaaagaatctcgtgtctagtttgcctaaagctgagaggagaaaggacgatgccgttgccagggctataaatacagacgctggagataagcagaggggttcaaaaaagccaccaggtgggggagagaacgagggaaatttccagcatccacgaagacggcaggctttcccgccttcaggcaatagaaatgctacgtatcaccagtagcaagttgagatgtataactggcgaattggattattccaaaattgtgataaaagagtaccctacgtgttgtatatttggactggggatatctcggactcatgagaaaccaccgagactgctactgcaccgcggtgccctgacgtgttgctaacacgtgctaggtgactgagaatagttgggtattgcgttattttttttaatatgttctgaacatgagaatgccctagtatttcattaggatgtgtacattttacaatgttttatggacaattactgttgtatttttacttttgaactccagagccctgttttggtcacgcactacaattttcacctaaactcttttccgaacgtttactatattgggctgtttggatccctttattta

SEQ ID NO: 4336 - DNA, 3024 bp, Zea Mays
ataaaccctaaaccgccctattccccactcgatttcgccatggaagccgacgaggcctcggcgccgcctcccccgccgtggatgcagaacaagtcggccgcggccatcgaggcctcgtcgggcccgctttccgccgcggcctcccgcctctccgcccgctcccgtgcgctcccctcgtcccgcgacttccacttctacaacaacttcccggcattcaaatccccagtcggcgctgcggccgcgaaggccgacgcgtccctcggcgtgctcggcggggcttcgattctcccgacgcggcagcagccgttccccgtgggcggcgacctcgacgacgcgcacgactggctcgtcgccctcaacgacgacttgctcgagcggttcggcgcctccaccgacgagttcaagaccctgcggcggaaggaggagacttccgggcggagggcggcgccgcaggctggggacgggttccaagtggtgtgcgggaagaagaaaaagaaggtgggcgatggtggcgaggaacgcgtcggcagagttgaggctttcggaggttttggctctgtgaggatggtcaccaaggacaaggcggccgcgccgggggtgaaggcgaaggtgcccttccacatccgcaccatcccaaggccccaggatgtgtattgtattgtggtggacaactccagcaagccgttcgagcatatcttgcttgatcgcagcgaggatggcactcgggtcgtgcacccattggaaaaactccctgttgaacaaataatcagcagaaatgttcctgataatgagccagttaagccaccggctttagacaacactccttttacatttgttgaagacctgaaaaccttggaggtgctagccacaaagctgaaggatgcaactgagtttgctgtcgatttggaacacaaccattataggtcgtttcagggtttgacatgcttgatgcagatttcaacaagaacagaggactttattgttgacactcttaagcttcgtaaatatcttggtgattatctaagagagtttttcagagatccaaccaagaaaaaggtaatgcatggtgcaggtcgtgatataatatggcttcaacgagacttcagcatatatgtgtgcaacctttttgacacaggccaggcttcaaaggtcttacagatggaccgcaacagcttggaacatcttttgcaccatttctgtggagtagctgcaaataaagaataccaagctgcagattggagattgaggccccttcctgatgaaatgatcaaatatgctagagaggatacacactatctgctatatatatatgacctgatgagattgagactagtgaatgggtcatcatgtgaaaatgatcttcttttagaggtttgcaagcgcagcaacgaaatttgcttgcaactgtatgagaaggagcagctgactgatacatcatatctacatatacatgggttgaaagaaaacgagctgaatgcaacgcagctgtcagttctttccagtctatatcgatggagagatggcattgcccgtgctgaggatgagagcactggctatatattacccaataagactctacttgagatagcaaaggagatgcctgtgacaagtgggaagttgaaaagaatgattaaatcaagaaattcgattttggaacgaaatctcaaccatgttattaacaatataagggatgccatagcagcttctggtgcttttgaaagtatagtggagcagctgaagaagggaaaactggaagagtgattacaaatgtcggtgctgctccctgtattacaagcgaagcttccttgggtaatatgcatttagaggaccctgtgcctaaaacaaaggactcgggtgcttcatcagggtttactggactgacagacaacaaaaagctgagcaatgaccagcagcaagcagcaaaggctactgttcaagtatcaaagaggcctacagcttttggagctctgtttggaaaggcagctgctggaagaaggccagatcttttcctaggattttcaaatgttcagggtaagactaaggtggacaagataacgtcttccgtggtacttccttttcatcatttctcaggtggtgcaaaactttcatcagccgcccttccagcgaaagaatcgttgcattctgaaccagacagcatccaacacagtgatccagcttgtcagttggaagaagtgatacagttggacatgggaacagacgagcaacaaccaccagaaaatggcaacgaggatgatggacactgtgagactgaagacacggagatgtcaaagtccccttcaggtgacccgtctgttaccgagcaacgattccgatcactcaacgaagaaagaaacgttaagcagaaccagaagacacctcgagaattcgaatttagtgttccggtggtgccttttgattatgccgaagccagaaagaatctcgtgtctagtttgcctaaagctgagaggagaaaggacgatgccgttgccagggctataaatacagacgctggagataagcagaggggttcaaaaaagccaccaggtgggggagagaacgagggaaatttccagcatccacgaagacggcaggctttcccgccttcaggcaatagaaatgctacgtatcaccagtagcaagttgagatgtataactggcgaattggattattccaaaattgtgataaaagagtaccctacgtgttgtatatttggactggggatatctcggactcatgagaaaccaccgagactgctactgcaccgcggtgccctgacgtgttgctaacacgtgctaggtgactgagaatagttgggtattgcgttattttttttaatatgttctgaacatgagaatgccctagtatttcattaggatgtgtacattttacaatgttttatggacaattactgttgtatttttacttttgaactccagagccctgttttggtcacgcactacaattttcacctaaactcttttccgaacgtttactatattgggctgtttggatccctttattta

SEQ ID NO: 4337 - DNA, 2374 bp, Zea Mays
ctagaagaaacaggaaacagggcaacatgtaggaaacaatgcgcacaatctgcacgggtcgatttggaacacaaccattataggtcgtttcagggtttgacatgcttgatgcagatttcaacaagaacagaggactttattgttgacactcttaagcttcgtaaatatcttggtgattatctaagagagtttttcagagatccaaccaagaaaaaggtaatgcatggtgcaggtcgtgatataatatggcttcaacgagacttcagcatatatgtgtgcaacctttttgacacaggccaggcttcaaaggtcttacagatggaccgcaacagcttggaacatcttttgcaccatttctgtggagtagctgcaaataaagaataccaagctgcagattggagattgaggccccttcctgatgaaatgatcaaatatgctagagaggatacacactatctgctatatatatatgacctgatgagattgagactagtgaatgggtcatcatgtgaaaatgatcttcttttagaggtttgcaagcgcagcaacgaaatttgcttgcaactgtatgagaaggagcagctgactgatacatcatatctacatatacatgggttgaaagaaaacgagctgaatgcaacgcagctgtcagttctttccagtctatatcgatggagagatggcattgcccgtgctgaggatgagagcactggctatatattacccaataagactctacttgagataggtttattactcaacttgattagctgtgttttttttgctttccttggataataactttgcccttgattttttgtgcttatagcaaaggagatgcctgtgacaagtgggaagttgaaaagaatgattaaatcaagaaattcgattttggaacgaaatctcaaccatgttattaacaatataagggatgccatagcagcttctggtgcttttgaaagtatagtggagcagctgaagaagggaaaactggaagagttaacattggcagatgtgaagaacagcagtgaggacactgaaatgattcctgctgttgatgttgataacattgaagatccgagtgatgaatctgctgtagttcctgcagtgattacaaatgtcggtgctgctccctgtattacaagcgaagcttccttgggtaatatgcatttagaggaccctgtgcctaaaacaaaggactcgggtgcttcatcagggtttactggactgacagacaacaaaaagctgagcaatgaccagcagcaagcagcaaaggctactgttcaagtatcaaagaggcctacagcttttggagctctgtttggaaaggcagctgctggaagaaggccagatcttttcctaggattttcaaatgttcagggtaagactaaggtggacaagataacgtcttccgtggtacttccttttcatcatttctcaggtggtgcaaaactttcatcagccgcccttccagcgaaagaatcgttgcattctgaaccagacagcatccaacacagtgatccagcttgtcagttggaagaagtgatacagttggacatgggaacagacgagcaacaaccaccagaaaatggcaacgaggatgatggacactgtgagactgaagacacggagatgtcaaagtccccttcaggtgacccgtctgttaccgagcaacgattccgatcactcaacgaagaaagaaacgttaagcagaaccagaagacacctcgagaattcgaatttagtgttccggtggtgccttttgattatgccgaagccagaaagaatctcgtgtctagtttgcctaaagctgagaggagaaaggacgatgccgttgccagggctataaatacagacgctggagataagcagaggggttcaaaaaagccaccaggtgggggagagaacgagggaaatttccagcatccacgaagacggcaggctttcccgccttcaggcaatagaaatgctacgtatcaccagtagcaagttgagatgtataactggcgaattggattattccaaaattgtgataaaagagtaccctacgtgttgtatatttggactggggatatctcggactcatgagaaaccaccgagactgctactgcaccgcggtgccctgacgtgttgctaacacgtgctaggtgactgagaatagttgggtattgcgttattttttttaatatgttctgaacatgagaatgccctagtatttcattaggatgtgtacattttacaatgttttatggacaattactgttgtatttttacttttgaactccagagccctgttttggtcacgcactacaattttcacctaaactcttttccgaacgtttactatattgggctgtttggatccctttattta

SEQ ID NO: 4338 - DNA, 1907 bp, Zea Mays
gacgcaggtgtccttgttcctgccctctcccgctatgatatgctgcggctgctgataaagcagcgaaagtgatgccccactggaaaaacgtcctgctccggctacctcctccaactcttctccctccggccgttggtggggaggaggacggaagatagcatcgccaccagcttcttttcctccctcctcctccatcatccatctctctctgcctcttccttccacctgaaggaagccggttcgggcgtcctgctctcgctcagctcggcacccccgcggaaaccgaaccaggagagcccagccccgtcttcttggttgctcgtctctctgtttgtcagcagcctgctgctgctcttgcttcggcttcagagaggcgccagggcgcccagcggattgcctccgttcttggtgctctccgaagaagagatagtagaagatagagatcggaaggattgtctcccatggggaactgcttggggggcagctcctacgtcaacaaggtctcctccaccgcaaagccagagagtcctcctaaggtgcagagcccgtcggaagtggaccggagcgacgaccgcaagctgccatcgaacccgggcgaggtagaggccctgcggcggggcgcgtcggcggcgacgcggcggaacccgctcgtggccttctccttctccgagctcaggacggtggccaacgacttccggaaggacgcgctcatcggcggcggcggattcggccgggtgtacaagggttccttcgcgccgccggccggggcggcagacccgagcggcggcaccctcccggtgccggtggccgtcaaggtgcacgacggcgacaacagcttccagggccaccgggagtggctggcggaggtgatcttcctgggccagctctcccacccgaacctggtgaagctggtcgggtactgctgcgagggcgagcaccgcgtgctggtgtacgagtacatggccctgggcagcgtggagtcgcacctcttctcgcgcacgtcgccgccgctgccgtgggccacgcggatgaagatcgcgctgggcgcggcgcgcgggctggcgttcctccacgacgcggagccccgccccgtgatctaccgcgacttcaagacctccaacatcctgctggacgcccacttcaacgccaagctctccgacttcgggctggccaaggacgggccagtcggggagcagtcgcacgtgtccacccgcgtcatgggcacctacggctacgcggcgcccgagtacatgatgacgggccacctcacggcgtccagcgacgtctacagctacggcgtcgtgctgctcgagctgctcacggggcggcgctcgctggaccgctcacgcccgccgcgggagcaggcgctcaccgactgggcgctcccggcgctgccgcacaagaagcgcgtgcagggcatcgtggacccaaggctggcgggcgccggctgggacgacccgccgcccgccagggccgtgcagaagacggccatgctcgcgtaccactgcctcaaccgcaaccccaaggcgaggccgctcatgcgcgacgtcgtcgcgtcgctggagccgctacagcagccgccggaggacccaaacgcccacgccgccttgtgatgtgagtagtgtgttgttgagacatcggagatctgccaatgcaagctgctggccggatgaagtgcagcaggaacggcggctggctggtcggggctgtccttgtccttcccggctgtccgttccgtggaacgaaaaggaacgaagcaaggtacatgatgtgactgatggaagtatgtgcgcgtgtatcatatggttggtactagcttagctaggcatgggcagagacgatacatgcatcattgcttcttcattgtttccagtttagttattggcgcgaccggttcaggttataga

SEQ ID NO: 4339 - DNA, 556 bp, Zea Mays
gacatttgaaggtgatgagcctccttaaaaaaggcggagaatggagagcaagaataataactctttcagatcatgtaaaagcttgccggattgtttagttctctttaagggtacccatacgcacgcgcttgcgcacgccaatcgtgccttaatggagaatagtgttgcagatgcaatgcacaacaaagttattgttcttgttttcgaccaagttatggataccacaccctagaagagtaggtggcagatacttcatcaagtatggaatgcctgcgatgctgagctggatacttggtgacaacatgtgcatagcaaaactattaattactgtcatatgttcctgtttcaagaacatatgcaatagtaataggtttccattagtttaaatgtcccatgcaaagaagtaaacatcacccagactttcttcttagtgcgccattatcacattcgtactcatcatgcacatgaaacttttcgttctgtacaaagccgcccactttgtaacaaagtacgttgtcatagtaactctgaaatggatttgacaccggcatttgat

SEQ ID NO: 4340 - DNA, 983 bp, Zea Mays
acgactgacagtgaaaaaataggaaatgactcgtcaacgcaactaccccaagtcgccgctgagccactctctccgtccgcgaatccgtaaatggaaggggacgaaatgctcagggtgaagctcggcaggcagggccttgaggtgtccaagcttggcttcgggtgcatgggcctcactggagtgtacaacgcccctgttcctgaccaagctgggatcgacataatcaagcacgcgtttgaggccggcatcaccttcttcgacaccgctgatgcctatgggccacacaccaacgaggtcctgctcggaaagatgggagagctcaagaagttggttgaagaagggaaagtgaggtatgttggcttatcagaggctagtgccgataccattcgacgggcacatgctgtccatccaattactgcggtgcagttggagtggtcactatggaccagagatatagaggaagatataattccagtctgcagggagcttggtattggaatagttccatatagcccacttggccgtggcttctttgctggcagggcagctgtagaacgtgttccatcagaaagtctattggaacaacaaaagccaagaaccttgacgaaaatatcggtgctgtaaaggtaaggctgagcaaggaagacctcgaagaaatctcaggcgcattccctgctggtgaggtggctgggtctagactccttggagtcttggagcctttttcctggaggctcgcaaataccccgcctccaaaatagcgagttcagatgcaaattcttggccatcctaccatttaggtcatgttatgttagatcatatctacatgatgcaaatgattgttcctgtgctcgcgcgtgaaaatgcatgtacctgaaacaaagagatgtaacagttggttctctgtgtggaacgtgctgattgctatagttgatcaaagaaatacgttggaattaagctaaatgtccttcatggtgcactttgat

SEQ ID NO: 4341 - DNA, 1058 bp, Zea Mays
acgactgacagtgaaaaaataggaaatgactcgtcaacgcaactaccccaagtcgccgctgagccactctctccgtccgcgaatccgtaaatggaaggggacgaaatgctcagggtgaagctcggcaggcagggccttgaggtgtccaagcttggcttcgggtgcatgggcctcactggagtgtacaacgcccctgttcctgaccaagctgggatcgacataatcaagcacgcgtttgaggccggcatcaccttcttcgacaccgctgatgcctatgggccacacaccaacgaggtcctgctcggaaaggcattgaaacattttcctcgtgagaaggtgcaaattgccaccaaatgtggcattgcaggatttgatgcaagtggcatgcgtgtgaagggcactccagattatgttcgagcttgttgtgaagcaagccttcagcgccttgctactgactacattgatatatactaccaacatcgcattgatcagtcagtgcctatagaggaaactatgggagagctcaagaagttggttgaagaagggaaagtgaggtatgttggcttatcagaggctagtgccgataccattcgacgggcacatgctgtccatccaattactgcggtgcagttggagtggtcactatggaccagagatatagaggaagatataattccagtctgcagggagcttggtattggaatagttccatatagcccacttggccgtggcttctttgctggcagggcagctgtagaacgtgttccatcagaaagtctattgtctaaacatccaagatattctggggaaaacttggagaagaataaagttctgtatacacgacttgaaatgttgtccaagaagtatgggtgcacacctgctcaactcgctctctcctgggttcttcatcaaggagaagatgtggtccccatccctggcaataatctcctctagctacagaaaacaacgttgcgcagacagtgagacagattaacctgcattgctcgtgcaggacttcgcagatgttcccagcaactcgaatgcccgagtagggaggg

SEQ ID NO: 4342 - DNA, 1105 bp, Zea Mays
acgactgacagtgaaaaaataggaaatgactcgtcaacgcaactaccccaagtcgccgctgagccactctctccgtccgcgaatccgtaaatggaaggggacgaaatgctcagggtgaagctcggcaggcagggccttgaggtgtccaagcttggcttcgggtgcatgggcctcactggagtgtacaacgcccctgttcctgaccaagctgggatcgacataatcaagcacgcgtttgaggccggcatcaccttcttcgacaccgctgatgcctatgggccacacaccaacgaggtcctgctcggaaaggcattgaaacattttcctcgtgagaaggtgcaaattgccaccaaatgtggcattgcaggatttgatgcaagtggcatgcgtgtgaagggcactccagattatgttcgagcttgttgtgaagcaagccttcagcgccttgctactgactacattgatatatactaccaacatcgcattgatcagtcagtgcctatagaggaaactatgggagagctcaagaagttggttgaagaagggaaagtgaggtatgttggcttatcagaggctagtgccgataccattcgacgggcacatgctgtccatccaattactgcggtgcagttggagtggtcactatggaccagagatatagaggaagatataattccagtctgcagggagcttggtattggaatagttccatatagcccacttggccgtggcttctttgctggcagggcagctgtagaacgtgttccatcagaaagtctattgtctaaacatccaagatattctggggaaaacttggagaagaataaagttctgtatacacgacttgaaatgttgtccaagaagtatgggtgcacacctgctcaactcgctctctcctgggttcttcatcaaggagaagatgtggtccccatccctggaacaacaaaagccaagaaccttgacgaaaatatcggtgctgtaaaggcaataatctcctctagctacagaaaacaacgttgcgcagacagtgagacagattaacctgcattgctcgtgcaggacttcgcagatgttcccagcaactcgaatgcccgagtagggaggg

SEQ ID NO: 4343 - DNA, 1342 bp, Zea Mays
acgactgacagtgaaaaaataggaaatgactcgtcaacgcaactaccccaagtcgccgctgagccactctctccgtccgcgaatccgtaaatggaaggggacgaaatgctcagggtgaagctcggcaggcagggccttgaggtgtccaagcttggcttcgggtgcatgggcctcactggagtgtacaacgcccctgttcctgaccaagctgggatcgacataatcaagcacgcgtttgaggccggcatcaccttcttcgacaccgctgatgcctatgggccacacaccaacgaggtcctgctcggaaaggcattgaaacattttcctcgtgagaaggtgcaaattgccaccaaatgtggcattgcaggatttgatgcaagtggcatgcgtgtgaagggcactccagattatgttcgagcttgttgtgaagcaagccttcagcgccttgctactgactacattgatatatactaccaacatcgcattgatcagtcagtgcctatagaggaaactatgggagagctcaagaagttggttgaagaagggaaagtgaggtatgttggcttatcagaggctagtgccgataccattcgacgggcacatgctgtccatccaattactgcggtgcagttggagtggtcactatggaccagagatatagaggaagatataattccagtctgcagggagcttggtattggaatagttccatatagcccacttggccgtggcttctttgctggcagggcagctgtagaacgtgttccatcagaaagtctattgtctaaacatccaagatattctggggaaaacttggagaagaataaagttctgtatacacgacttgaaatgttgtccaagaagtatgggtgcacacctgctcaactcgctctctcctgggttcttcatcaaggagaagatgtggtccccatccctggaacaacaaaagccaagaaccttgacgaaaatatcggtgctgtaaaggtaaggctgagcaaggaagacctcgaagaaatctcaggcgcattccctgctggtgaggtggctgggtctagactccttggagtcttggagcctttttcctggaggctcgcaaataccccgcctccaaaatagcgagttcagatgcaaattcttggccatcctaccatttaggtcatgttatgttagatcatatctacatgatgcaaatgattgttcctgtgctcgcgcgtgaaaatgcatgtacctgaaacaaagagatgtaacagttggttctctgtgtggaacgtgctgattgctgcattgctcgtgcaggacttcgcagatgttcccagcaactcgaatgcccgagtagggaggg

SEQ ID NO: 4344 - DNA, 1534 bp, Zea Mays
cgtcaatcggccacgattcccagtcatcaccaattattactgcctttcgtccacaactactcatcaatccgatcgacatgaacctcgcgtccgcggtgcgagtgttcttgtcctactacctgctggtccaacggtggatggggtccgagcagggcggaggcgtgttcgatcaggggggccatagcgtcagcctcacccgcctcgacgaagcaagggcgccgccgaggtgcgccgtgcggtcgtccccgtccagcgcggccagcctgccgccgaagccgctgctcgtcgccgcgccgcgcgagactggggagtacccggtgatcctgttcctacacggctacctcgccgtcaactccttctactcccagctgttcgagcacgtcgcctcccatggctttatcgtcgtcggacctcagctgtacaccatatctggggccgacaccaccgaggagatcaactcagcggcggccgtcatcgactggctagccaccgggctgccgtcaactctgccactcggcgtccgcgcgaacctaaccaaggtgtccatctccggccacagtcgcggcgggaaggtggcgttcgcgctggcgttgggccacgccaaggccaagctcgctgtccctctcgccgccgtcgtcgccgtggacccggtggacggcatgggcgtgggcaagcagacaccgccgccgatcctcacgggcaggcacggctcgctgcacgtggctgccccgcggctcactgctcccgccgtgcgcgccccggggcgtcagtcacgcggccttctacgacgagctggacggcgcggcgccagcgtgccacctggtggtcagggactacgggcacacggacatgatggacgacgacacgccgggcgccagggggatgctcacgcgcaccatctgcaggagcggcggggccagggcgcccatgcgccgcttcgtggccggcgccaccgtcgcgttcctcaagaaatgggtggctggggacgccgcggcgatggacagcatcacggcgcggccggaccaggcccccgtcgcgctgtccgtggtggagtttggagatgagaaagcgatagcttagctgctagagaatatgtgatatctgcaggcactagccactcaggcaggttggtgacgacgttgaaattgcagatgaaattaactagagtctagagatggcacatggcagattggcagtgagtttcgaaactagctaatttcctctctcttggcaaatcaaataaaaaaataaaaaagtacctattctataggatgaactgagtatgaaatggacattaccttgatgcgatgataaataaaaaaaaatagatggaatagacatgcatgctacgacaatacttgctttatcgtctctcggatcggacgaccgtgtcatcttttcattataatagcttgtttgggaggaaaggcatttaagggctggtttgcgaaaaaggaaattagaggtaatctatggttaggggtggtaatttattagggctttaaattatttttagtttaaaaataaataaaaa

SEQ ID NO: 4345 - DNA, 1025 bp, Zea Mays
gttctatcgctcaaccccgccgcaagtgcatacacagcgcctccataccatacccgtccccgccgcccggtgagatgccgaggcgcgagcgcgacctgccgcagcaggcctgacctcgcgtatctctcaggagtcaggactcctgaagatcagtttcgtgccttacctcgagagcgcctcctgaagaaaagctttgtaggattggtagatttgaaattggaagagagctgtgggatgaagctacaaatagtggtcttgtattaggatgctcacaagatctgctcgatcccttgaagacagaggtattcagaccaatctgtccagcacaaagattaagccctcagaactataaacgcttggcctggaaaaagaaggttactgctgttggagtcaaaaaggacattgctatctcagcctcaaggaagaagtcgggagtgtaggaagctcgtgcatcacaaaagcaagaaggcttggtgttcctactcctgtactttatgctgtggatccacttctgcatactttgacagtatgtggatggcttgtctgtcaaggatatacttcttggttttggttcagatggggttaacgaggaacgcctggatgatattagtatcacacagataggaaacgtcgtcggcaaactacatgatggaggccttgttcatggtgatttagaactgtaacaattaattggtggttcttattgatttcggtctgagttttatataaataattcccgagggcgaggacaaagcggtggacctatatgtgctagagagagctttgatctccatgcattcgtcccgtggggatgtgtgaggcaacggggtaggaagcgcaccatagtcggatgaatgaagaagagaagagaagagaagagaatctgttgcatggaatagccgggtgttggaaagacaatcaaaactgggcaagtgttgtaccaccatccggttgcttgctgtatttttttagaggtgagtggatttggctgctgtaacgtttgtggatggaaatttggaattagg

SEQ ID NO: 4346 - DNA, 1085 bp, Zea Mays
atacacagcgcctccataccatacccgtccccgccgcccggtgagatgccgaggcgcgagcgcgacctgccgcagcaggcctgacctcgcgtatctctcaggagtcaggactcctgaagatcagtttcgtgccttacctcgagagcgcctcctgaagaaaagctttgtaggattggtagatttgaaattggaagagagctgtgggatgaagctacaaatagtggtcttgtattaggatgctcacaagatctgctcgatcccttgaagacagaggtattcagaccaatctgtccagcacaaagattaagccctcagaactataaacgcttggcctggaaaaagaaggttactgctgttggagtcaaaaaggacattgctatctcagcctcaaggaagaagtcgggagtgtagctttgtttcaagtggttattaggcttcatagatatatctcagcctctcaggagcaagaacaagattttggggcagaaggggaagctcgtgcatcacaaaagcaagaaggcttggtgttcctactcctgtactttatgctgtggatccacttctgcatactttgacagtatgtggatggcttgtctgtcaaggatatacttcttggttttggttcagatggggttaacgaggaacgcctggatgatattagtatcacacagataggaaacgtcgtcggcaaactacatgatggaggccttgttcatggtgatttagaactgtaacaattaattggtgtcttgacaggttcttattgatttcggtctgagttttatataaataattcccgagggcgaggacaaagcggtggacctatatgtgctagagagagctttgatctccatgcattcgtcccgtggggatgtgtgaggcaacggggtaggaagcgcaccatagtcggatgaatgaagaagagaagagaagagaagagaatctgttgcatggaatagccgggtgttggaaagacaatcaaaactgggcaagtgttgtaccaccatccggttgcttgctgtatttttttagaggtgagtggatttggctgctgtaacgtttgtggatggaaatttggaattagg

SEQ ID NO: 4347 - DNA, 573 bp, Zea Mays
acagcgcctccataccatacccgtccccgccgcccggtgagatgccgaggcgcgagcgcgacctgccgcagcaggcctgacctcgcgtatctctcaggagtcaggactcctgaagatcagtttcgtgccttacctcgagagcgcctcctgaaggcatcctttgtggaacagaggaagttgaccatgctcttgatatgttcaaacttatgaagaggtgtgagttagtggatgctcgtatatatgacctgcttatagaaaagctttgtaggattggtagatttgaaattggaagagagctgtgggatgaagctacaaatagtggtcttgtattaggatgctcacaagatctgctcgatcccttgaagacagaggtattcagaccaatctgtccagcacaaagattaagccctcagaactataaacgcttggcctggaaaaagaaggttactgctgttggagtcaaaaaggacattgctatctcagcctcaaggaagaagtcgggagtgtagctttgtttcaagtggttattaggcttcatagatatatctcagcctctcaggagcaagaacaaga

SEQ ID NO: 4348 - DNA, 1107 bp, Zea Mays
acagcgcctccataccatacccgtccccgccgcccggtgagatgccgaggcgcgagcgcgacctgccgcagcaggcctgacctcgcgtatctctcaggagtcaggactcctgaagatcagtttcgtgccttacctcgagagcgcctcctgaagatttgaaattggaagagagctgtgggatgaagctacaaatagtggtcttgtattaggatgctcacaagatctgctcgatcccttgaagacagaggtattcagaccaatctgtccagcacaaagattaagccctcagaactataaacgcttggcctggaaaaagaaggttactgctgttggagtcaaaaaggacattgctatctcagcctcaaggaagaagtcgggagtgtaggaagctcgtgcatcacaaaagcaagaaggcttggtgttcctactcctgtactttatgctgtggatccacttctgcatactttgacagtatgtggatggcttgtctgtcaaggatatacttcttggttttggttcagatggggttaacgaggaacgcctggatgatattagtatcacacagataggaaacgtcgtcggcaaactacatgatggaggccttgttcatggtgatttagaactgtaacaattaattggtggttcttattgatttcggtctgagttttatataaataattcccgagggcgaggacaaagcggtggacctatatgtgctagagagagctttgatctccatgcattcgtcccgtggggatgtggtgaggagactgcataaattggcatccaagttgtcttttgctgattatatgcatacattgattcctttattcggtgactttattttggggaggccaatgacgtatacgggttacggttacataagcagccaacaatattggattcatcagtaattgaaatgtctggtcaatatttgggtttgcttgagcttggctgttattccgcacttgggtccgactaatctgtgccaatgttttctggctatatacaacacaaaactagtccatccgcatcgtggatttgttatttttttcctttcgtccgtggcatcttgtttcccatggtttttatggtggcttggttgtg

SEQ ID NO: 4349 - DNA, 1051 bp, Zea Mays
acagcgcctccataccatacccgtccccgccgcccggtgagatgccgaggcgcgagcgcgacctgccgcagcaggcctgacctcgcgtatctctcaggagtcaggactcctgaagatcagtttcgtgccttacctcgagagcgcctcctgaaggatgctcacaagatctgctcgatcccttgaagacagaggtattcagaccaatctgtccagcacaaagattaagccctcagaactataaacgcttggcctggaaaaagaaggttactgctgttggagtcaaaaaggacattgctatctcagcctcaaggaagaagtcgggagtgtaggaagctcgtgcatcacaaaagcaagaaggcttggtgttcctactcctgtactttatgctgtggatccacttctgcatactttgacagtatgtggatggcttgtctgtcaaggatatacttcttggttttggttcagatggggttaacgaggaacgcctggatgatattagtatcacacagataggaaacgtcgtcggcaaactacatgatggaggccttgttcatggtgatttagaactgtaacaattaattggtggttcttattgatttcggtctgagttttatataaataattcccgagggcgaggacaaagcggtggacctatatgtgctagagagagctttgatctccatgcattcgtcccgtggggatgtggtgaggagactgcataaattggcatccaagttgtcttttgctgattatatgcatacattgattcctttattcggtgactttattttggggaggccaatgacgtatacgggttacggttacataagcagccaacaatattggattcatcagtaattgaaatgtctggtcaatatttgggtttgcttgagcttggctgttattccgcacttgggtccgactaatctgtgccaatgttttctggctatatacaacacaaaactagtccatccgcatcgtggatttgttatttttttcctttcgtccgtggcatcttgtttcccatggtttttatggtggcttggttgtg

SEQ ID NO: 4350 - DNA, 1129 bp, Zea Mays
acagcgcctccataccatacccgtccccgccgcccggtgagatgccgaggcgcgagcgcgacctgccgcagcaggcctgacctcgcgtatctctcaggagtcaggactcctgaagatcagtttcgtgccttacctcgagagcgcctcctgaagaaaagctttgtaggattggtagatttgaaattggaagagagctgtgggatgaagctacaaatagtggtcttgtattaggatgctcacaagatctgctcgatcccttgaagacagaggtattcagaccaatctgtccagcacaaagattaagccctcagaactataaacgcttggcctggaaaaagaaggttactgctgttggagtcaaaaaggacattgctatctcagcctcaaggaagaagtcgggagtgtaggaagctcgtgcatcacaaaagcaagaaggcttggtgttcctactcctgtactttatgctgtggatccacttctgcatactttgacagtatgtggatggcttgtctgtcaaggatatacttcttggttttggttcagatggggttaacgaggaacgcctggatgatattagtatcacacagataggaaacgtcgtcggcaaactacatgatggaggccttgttcatggtgatttagaactgtaacaattaattggtggttcttattgatttcggtctgagttttatataaataattcccgagggcgaggacaaagcggtggacctatatgtgctagagagagctttgatctccatgcattcgtcccgtggggatgtggtgaggagactgcataaattggcatccaagttgtcttttgctgattatatgcatacattgattcctttattcggtgactttattttggggaggccaatgacgtatacgggttacggttacataagcagccaacaatattggattcatcagtaattgaaatgtctggtcaatatttgggtttgcttgagcttggctgttattccgcacttgggtccgactaatctgtgccaatgttttctggctatatacaacacaaaactagtccatccgcatcgtggatttgttatttttttcctttcgtccgtggcatcttgtttcccatggtttttatggtggcttggttgtg

SEQ ID NO: 4351 - DNA, 1627 bp, Zea Mays
acagcgcctccataccatacccgtccccgccgcccggtgagatgccgaggcgcgagcgcgacctgccgcagcaggcctgacctcgcgtatctctcaggagtcaggactcctgaagatcagtttcgtgccttacctcgagagcgcctcctgaaggctatggatatattaacagagatgaggacctgtggtgttcccccagctgcttctagtttcaacatattactttcatgtttaggccgagcaagaagagtgaaagaagcttatagaatcttgtacttgatgagagaaggaaaagcagggtgctcccctgattgggttagctactatcttgtggttagagtcctctatttaacaaggagaattcttagagggaagaggcttgtagatgctatgcttgaaagtggagttcttcctactgctaagtttttccatggtcttataggcatcctttgtggaacagaggaagttgaccatgctcttgatatgttcaaacttatgaagaggtgtgagttagtggatgctcgtatatatgacctgcttatagaaaagctttgtaggattggtagatttgaaattggaagagagctgtgggatgaagctacaaatagtggtcttgtattaggatgctcacaagatctgctcgatcccttgaagacagaggtattcagaccaatctgtccagcacaaagattaagccctcagaactataaacgcttggcctggaaaaagaaggttactgctgttggagtcaaaaaggacattgctatctcagcctcaaggaagaagtcgggagtgtaggaagctcgtgcatcacaaaagcaagaaggcttggtgttcctactcctgtactttatgctgtggatccacttctgcatactttgacagtatgtggatggcttgtctgtcaaggatatacttcttggttttggttcagatggggttaacgaggaacgcctggatgatattagtatcacacagataggaaacgtcgtcggcaaactacatgatggaggccttgttcatggtgatttagaactgtaacaattaattggtggtgggtacaatatcctttttgtcaacgccttctatttaatgtgtccactttattgtgctatgaagtcaagtttatgatttgtaacttatatatgttagtcttgacaggttcttattgatttcggtctgagttttatataaataattcccgagggcgaggacaaagcggtggacctatatgtgctagagagagctttgatctccatgcattcgtcccgtggggatgtggtgaggagactgcataaattggcatccaagttgtcttttgctgattatatgcatacattgattcctttattcggtgactttattttggggaggccaatgacgtatacgggttacggttacataagcagccaacaatattggattcatcagtaattgaaatgtctggtcaatatttgggtttgcttgagcttggctgttattccgcacttgggtccgactaatctgtgccaatgttttctggctatatacaacacaaaactagtccatccgcatcgtggatttgttatttttttcctttcgtccgtggcatcttgtttcccatggtttttatggtggcttggttgtg

SEQ ID NO: 4352 - DNA, 2380 bp, Zea Mays
acagcgcctccataccatacccgtccccgccgcccggtgagatgccgaggcgcgagcgcgacctgccgcagcaggcctgacctcgcgtatctctcaggagtcaggactcctgaagatcagtttcgtgccttacctcgagagcgcctcctgaagagcccatgaacagattggcgtcgacgagattcacggccgcccttactcgaagcgtccttccccagtgccgccgcccaatcggccgcgccctgtgctccggcgcgccgcagaacggcgagatggaggccgcggtgcgagaggtcgtgtgcttcggttccggaagcctcgacgaggtggggagcaggctggaccgcctgggcgtggccgtctcgccgcacctgattgggcgcgtgatcgactcgtgcggcgagacgggcggaggctccggcaggaggctgctgcgctttttggcgtggtgccggtccaagcactccggggtgttaggggaggaggcgctcgacagggcgattggggtgcttgcacgggctggggaccttaccgcgatgagaatcgccattgctgatgctgagaaggacgggcggaggatggctcccgagacattttccaccgtgatcgacgcacttgtcaaggcaggcagggaggatgaggctgttcggctgtttagaggcttggagaggcagagattgctgcctgagtgcggcagcagggtaggaggccatggcgtatggtcgagcagccttgccatggtccatgcattgtgtaagagaggccatgctcgcgaggcacagggtgttgtgtggcaccataagagcgagctctcggcagaacccatggttagcatcgttgagcgtagcctcctccatggttggtgcgttcacgggaatgctaaggaggctcggaaagtcctcaatgaaatgaagtcttcaggcgttccgttgggcttgccatcattcaatgaatttctccattgcgtgtgccacagaaaccttaacttcaatccctctgcccttgtcccagaggctatggatatattaacagagatgaggacctgtggtgttcccccagctgcttctagtttcaacatattactttcatgtttaggccgagcaagaagagtgaaagaagcttatagaatcttgtacttgatgagagaaggaaaagcagggtgctcccctgattgggttagctactatcttgtggttagagtcctctatttaacaaggagaattcttagagggaagaggcttgtagatgctatgcttgaaagtggagttcttcctactgctaagtttttccatggtcttataggcatcctttgtggaacagaggaagttgaccatgctcttgatatgttcaaacttatgaagaggtgtgagttagtggatgctcgtatatatgacctgcttatagaaaagctttgtaggattggtagatttgaaattggaagagagctgtgggatgaagctacaaatagtggtcttgtattaggatgctcacaagatctgctcgatcccttgaagacagaggtattcagaccaatctgtccagcacaaagattaagccctcagaactataaacgcttggcctggaaaaagaaggttactgctgttggagtcaaaaaggacattgctatctcagcctcaaggaagaagtcgggagtgtaggaagctcgtgcatcacaaaagcaagaaggcttggtgttcctactcctgtactttatgctgtggatccacttctgcatactttgacagtatgtggatggcttgtctgtcaaggatatacttcttggttttggttcagatggggttaacgaggaacgcctggatgatattagtatcacacagataggaaacgtcgtcggcaaactacatgatggaggccttgttcatggtgatttagaactgtaacaattaattggtggttcttattgatttcggtctgagttttatataaataattcccgagggcgaggacaaagcggtggacctatatgtgctagagagagctttgatctccatgcattcgtcccgtggggatgtggtgaggagactgcataaattggcatccaagttgtcttttgctgattatatgcatacattgattcctttattcggtgactttattttggggaggccaatgacgtatacgggttacggttacataagcagccaacaatattggattcatcagtaattgaaatgtctggtcaatatttgggtttgcttgagcttggctgttattccgcacttgggtccgactaatctgtgccaatgttttctggctatatacaacacaaaactagtccatccgcatcgtggatttgttatttttttcctttcgtccgtggcatcttgtttcccatggtttttatggtggcttggttgtg

SEQ ID NO: 4353 - DNA, 1522 bp, Zea Mays
acagcgcctccataccatacccgtccccgccgcccggtgagatgccgaggcgcgagcgcgacctgccgcagcaggcctgacctcgcgtatctctcaggagtcaggactcctgaagatcagtttcgtgccttacctcgagagcgcctcctgaagaggctatggatatattaacagagatgaggacctgtggtgttcccccagctgcttctagtttcaacatattactttcatgtttaggccgagcaagaagagtgaaagaagcttatagaatcttgtacttgatgagagaaggaaaagcagggtgctcccctgattgggttagctactatcttgtggttagagtcctctatttaacaaggagaattcttagagggaagaggcttgtagatgctatgcttgaaagtggagttcttcctactgctaagtttttccatggtcttataggcatcctttgtggaacagaggaagttgaccatgctcttgatatgttcaaacttatgaagaggtgtgagttagtggatgctcgtatatatgacctgcttatagaaaagctttgtaggattggtagatttgaaattggaagagagctgtgggatgaagctacaaatagtggtcttgtattaggatgctcacaagatctgctcgatcccttgaagacagaggtattcagaccaatctgtccagcacaaagattaagccctcagaactataaacgcttggcctggaaaaagaaggttactgctgttggagtcaaaaaggacattgctatctcagcctcaaggaagaagtcgggagtgtaggaagctcgtgcatcacaaaagcaagaaggcttggtgttcctactcctgtactttatgctgtggatccacttctgcatactttgacagtatgtggatggcttgtctgtcaaggatatacttcttggttttggttcagatggggttaacgaggaacgcctggatgatattagtatcacacagataggaaacgtcgtcggcaaactacatgatggaggccttgttcatggtgatttagaactgtaacaattaattggtggttcttattgatttcggtctgagttttatataaataattcccgagggcgaggacaaagcggtggacctatatgtgctagagagagctttgatctccatgcattcgtcccgtggggatgtggtgaggagactgcataaattggcatccaagttgtcttttgctgattatatgcatacattgattcctttattcggtgactttattttggggaggccaatgacgtatacgggttacggttacataagcagccaacaatattggattcatcagtaattgaaatgtctggtcaatatttgggtttgcttgagcttggctgttattccgcacttgggtccgactaatctgtgccaatgttttctggctatatacaacacaaaactagtccatccgcatcgtggatttgttatttttttcctttcgtccgtggcatcttgtttcccatggtttttatggtggcttggttgtg

SEQ ID NO: 4354 - DNA, 846 bp, Zea Mays
acagcgcctccataccatacccgtccccgccgcccggtgagatgccgaggcgcgagcgcgacctgccgcagcaggcctgacctcgcgtatctctcaggagtcaggactcctgaagatcagtttcgtgccttacctcgagagcgcctcctgaagacagaggtattcagaccaatctgtccagcacaaagattaagccctcagaactataaacgcttggcctggaaaaagaaggttactgctgttggagtcaaaaaggacattgctatctcagcctcaaggaagaagtcgggagtgtaggaagctcgtgcatcacaaaagcaagaaggcttggtgttcctactcctgtactttatgctgtggatccacttctgcatactttgacagtatgtggatggcttgtctgtcaaggatatacttcttggttttggttcagatggggttaacgaggaacgcctggatgatattagtatcacacagataggaaacgtcgtcggcaaactacatgatggaggccttgttcatggtgatttagaactgtaacaattaattggtggtgggtacaatatcctttttgtcaacgccttctatttaatgtgtccactttattgtgctatgaagtcaagtttatgatttgtaacttatatatgttagtcttgacaggttcttattgatttcggtctgagttttatataaataattcccgagggcgaggacaaagcggtggacctatatgtgctagagagagctttgatctccatgcattcgtcccgtggggatgtgacttccttgtatgggggggtaacagaaaaggattcgaagcagtggtgctccacccagaacaaggct

SEQ ID NO: 4355 - DNA, 738 bp, Zea Mays
acagcgcctccataccatacccgtccccgccgcccggtgagatgccgaggcgcgagcgcgacctgccgcagcaggcctgacctcgcgtatctctcaggagtcaggactcctgaagatcagtttcgtgccttacctcgagagcgcctcctgaaggaagctcgtgcatcacaaaagcaagaaggcttggtgttcctactcctgtactttatgctgtggatccacttctgcatactttgacagtatgtggatggcttgtctgtcaaggatatacttcttggttttggttcagatggggttaacgaggaacgcctggatgatattagtatcacacagataggaaacgtcgtcggcaaactacatgatggaggccttgttcatggtgatttagaactgtaacaattaattggtggttcttattgatttcggtctgagttttatataaataattcccgagggcgaggacaaagcggtggacctatatgtgctagagagagctttgatctccatgcattcgtcccgtggggatgtgtgaggcaacggggtaggaagcgcaccatagtcggatgaatgaagaagagaagagaagagaagagaatctgttgcatggaatagccgggtgttggaaagacaatcaaaactgggcaagtgttgtaccaccatccggttgcttgctgtatttttttagaggtgagtggatttggctgctgtaacgtttgtggatggaaatttggaattagg

SEQ ID NO: 4356 - DNA, 1417 bp, Zea Mays
acagcgcctccataccatacccgtccccgccgcccggtgagatgccgaggcgcgagcgcgacctgccgcagcaggcctgacctcgcgtatctctcaggagtcaggactcctgaagatcagtttcgtgccttacctcgagagcgcctcctgaaggattggtagatttgaaattggaagagagctgtgggatgaagctacaaatagtggtcttgtattaggatgctcacaagatctgctcgatcccttgaagacagaggtattcagaccaatctgtccagcacaaagattaagccctcagaactataaacgcttggcctggaaaaagaaggttactgctgttggagtcaaaaaggacattgctatctcagcctcaaggaagaagtcgggagtgtaggaagctcgtgcatcacaaaagcaagaaggcttggtgttcctactcctgtactttatgctgtggatccacttctgcatactttgacagtatgtggatggcttgtctgtcaaggatatacttcttggttttggttcagatggggttaacgaggaacgcctggatgatattagtatcacacagataggaaacgtcgtcggcaaactacatgatggaggccttgttcatggtgatttagaactgtaacaattaattggtggttcttattgatttcggtctgagttttatataaataattcccgagggcgaggacaaagcggtggacctatatgtgctagagagagctttgatctccatgcattcgtcccgtggggatgtggtgaggagactgcataaattggcatccaagttgtcttttgctgattatatgcatacattgattcctttattcggtgactttattttggggaggccaatgacgtatacgggttacggttacataagcagccaacaatattggattcatcagtaattgaaatgtctggtcaatatttgggtttgcttgagcttggctgttattccgcacttgggtccgactaatctgtgccaatgttttctggctatatacaacacaaaactagtccatccgcatcgtggatttgttatttttttcctttcgtccgtggcatcttgtttcccatggtttttatggtggcttggttgtgttaatcatgccttggcagacttccttgtatgggggggtaacagaaaaggattcgaagcagtggtgctccacccagaacaaggctggctcaagtgaggcaacggggtaggaagcgcaccatagtcggatgaatgaagaagagaagagaagagaagagaatctgttgcatggaatagccgggtgttggaaagacaatcaaaactgggcaagtgttgtaccaccatccggttgcttgctgtatttttttagaggtgagtggatttggctgctgtaacgtttgtggatggaaatttggaattagg

SEQ ID NO: 4357 - DNA, 2948 bp, Zea Mays
gcaaatgctagtaggcgtctttacctcctagccagtcgtcctgggcaggctagaagtactaggagggagagagagtgggagcacagcagcatcactgctagtgccatttggctcggcgcctcctttctccggtccggtccggtccctccctccctttgcttcagagcccagccacctcctccagtccggttcaggcattcagcctgggcggcggcggcggcggcgggccgtcttccactcttcctcctccttccagttccattaacaaattgcttgcctgcctgcctgcccccaaacaagccttgcttgcagccttgtccctgctcccctactcttttccatcacatcgcagtctctgtggacggaaagacaaacagtgccttgcttgtctctacctctcctggctcctaccttagcctcacctggcggtgaagaacaggaactgagcgatagccattggttggaggttggcctgccggtgccggcctgcatgactgctctccctgaccggctggccctgacgaaggggaacaatgagggatggcggcggcggcggcggcagcagcaagacgagcaagctgtcgtggtccaaaagcctcgtgaggaagtggttcaacatcaggggcaagtcccaggacttccatgccgatgctgcagcagttggaactgggagtgtgaggtcaggtcgaggggatggagattggatggatggcagcttcactaggagggactcctacggcgccaagaagagcagaacagagagggcgtcgcggaggagccacgagcggtcgcggcgcagcaagatcgacctcgatgccgccgaggccaccgtcatgctcgactacaggatctttgctgctacgtggaatgtaggtggccgcgcgccgccgggctcgctcagcctcgacgactggctccgcacctcgccgccggccgacatctacgtcctcgggttccaagaaatcgtcccgttgaacgccgggaacgtcctcggcgccgaggacaacggccccgcgaggaagtgggtgtcgctggtcaggcggacgctgaacagcctgccgggaagtagcggcagcgggagcctgcagacgccgtcgccggcgccgtacctggtggcggagatggacgcggacttcgagcggtcgacaacgcaaaacaacccgtccttcttccaccggcggtcgttccactctgggctcagccggagcatgcgggtggacggcgacctcctcgccggccctggccccggccccgccaggctcgagcgccggtacagcgtcaacgaccgcgtcatgtacggtagcaggcccagcgactacgaggccaactgccagtggggcgccggtcagttggtcgatgaggacgacggtggcggcggcgagtccccggtcacggtgttctctccgatgtcccacggatatggaaatgctcctccgcctatggaagaatgcaacgggtcagcccgtggccttgctaggtactgcctggttgcgagcaagcagatggttggactgttcctgatgatctgggctcggaaagagatgaagaacgacattaggaatctgaaggtgtcctgcgttgggaggggattaatgggctaccttggaaataagggctcaatctccatcagcatggctttgcaccaaacgagcttctgcttcgtctgcagccacctgacatctggtcagaaggacggcgacgagcaccgcaggaactccgatgttttggagatcctaaagaagaccagattccctagggtttgcggacagtacgagagatcgccggagaccatcctggagcacgatcggataatctggctcggggatctcaattaccggatcgcgctgtcctaccgatcggtgaaagcgctcgtggagatgcgtaactggaaagcgttgctggaaaaagaccagctaacgagggagcagagaggtgggcgcgtgtttcctggctggaacgaggggaggatctacttcccaccgacctataaatactccaacaactccgacaaatacgcgggagaagacatgaaccagaaggagaagaagcggactccagcatggtgcgaccgcatcttgtggtacgggagggggctcagccagctctcctacgtccgaggagagtcgcgcttctcggaccacagacctgtctacagcatgttcattgccgaggtggagtcgatcaaccacagccagatccagaagatgagttcttggagctcccagctggacatagaggaactgctgccgtactcgtatgggtacacggagatcgatcactatgggtacacagacctcaatttctactgagaaacgggcagaggaactcgcatgctgctgagctctaatagatgcctctagttactgcgacttggaaaaggtgtttgccagcatgcatgcagttgaggacagagctcgacgataccggcgcactgcgttttcgaagtctaatggctcttagcagcttgttatatagacagcagcacttagtttgggttcaggaaagcaaatctggaacttcagcgttgcagttttctgaatgttcagattggctatcagagactttacatatgcccagcagtcaatgtacaaaacccggccgcatctgcggtgacatgagatgagccactggatgctctcttttgcaggtgtccatccagtgttagccagcagcatagagatttaggaatagttggaaggtagtgagtggatgctttatttgaatggctcttcaagggaaacagagaaacaaaaatcacatgacaaatgtcaattttgggatttttttttcctccctctctacaggtgtacactccagagccatttttcctttaattttgaatggctgatgttcgtttgctacagtagttttttttttgagttgtgcttccacagcagtaaaattgattaagacgggccatgaatgcccgcgatatccttaaatcattt

SEQ ID NO: 4358 - DNA, 2872 bp, Zea Mays
ctccctccctttgcttcagagcccagccacctcctccagtccggttcaggcattcagcctgggcggcggcggcggcggcgggccgtcttccactcttcctcctccttccagttccattaacaaattgcttgcctgcctgcctgcccccaaacaagccttgcttgcagccttgtccctgctcccctactcttttccatcacatcgcagtctctgtggacggaaagacaaacagtgccttgcttgtctctacctctcctggctcctaccttagcctcacctggcggtctggccctgcccatctctcactctcgctctcgctcttgctctcgcactgaggacaagatgcatactgtacaggtgaagaacaggaactgagcgatagccattggttggaggttggcctgccggtgccggcctgcatgactgctctccctgaccggctggccctgacgaaggggaacaatgagggatggcggcggcggcggcggcagcagcaagacgagcaagctgtcgtggtccaaaagcctcgtgaggaagtggttcaacatcaggggcaagtcccaggacttccatgccgatgctgcagcagttggaactgggagtgtgaggtcgaggggatggagattggatggatggcagcttcactaggagggactcctacggcgccaagaagagcagaacagagagggcgtcgcggaggagccacgagcggtcgcggcgcagcaagatcgacctcgatgccgccgaggccaccgtcatgctcgactacaggatctttgctgctacgtggaatgtaggtggccgcgcgccgccgggctcgctcagcctcgacgactggctccgcacctcgccgccggccgacatctacgtcctcgggttccaagaaatcgtcccgttgaacgccgggaacgtcctcggcgccgaggacaacggccccgcgaggaagtgggtgtcgctggtcaggcggacgctgaacagcctgccgggaagtagcggcagcgggagcctgcagacgccgtcgccggcgccgtacctggtggcggagatggacgcggacttcgagcggtcgacaacgcaaaacaacccgtccttcttccaccggcggtcgttccactctgggctcagccggagcatgcgggtggacggcgacctcctcgccggccctggccccggccccgccaggctcgagcgccggtacagcgtcaacgaccgcgtcatgtacggtagcaggcccagcgactacgaggccaactgccagtggggcgccggtcagttggtcgatgaggacgacggtggcggcggcgagtccccggtcacggtgttctctccgatgtcccacggatatggaaatgctcctccgcctatggaagaatgcaacgggtcagcccgtggccttgctaggtactgcctggttgcgagcaagcagatggttggactgttcctgatgatctgggctcggaaagagatgaagaacgacattaggaatctgaaggtgtcctgcgttgggaggggattaatgggctaccttggaaataagggctcaatctccatcagcatggctttgcaccaaacgagcttctgcttcgtctgcagccacctgacatctggtcagaaggacggcgacgagcaccgcaggaactccgatgttttggagatcctaaagaagaccagattccctagggtttgcggacagtacgagagatcgccggagaccatcctggagcacgatcggataatctggctcggggatctcaattaccggatcgcgctgtcctaccgatcggtgaaagcgctcgtggagatgcgtaactggaaagcgttgctggaaaaagaccagctaacgagggagcagagaggtgggcgcgtgtttcctggctggaacgaggggaggatctacttcccaccgacctataaatactccaacaactccgacaaatacgcgggagaagacatgaaccagaaggagaagaagcggactccagcatggtgcgaccgcatcttgtggtacgggagggggctcagccagctctcctacgtccgaggagagtcgcgcttctcggaccacagacctgtctacagcatgttcattgccgaggtggagtcgatcaaccacagccagatccagaagatgagttcttggagctcccagctggacatagaggaactgctgccgtactcgtatgggtacacggagatcgatcactatgggtacacagacctcaatttctactgagaaacgggcagaggaactcgcatgctgctgagctctaatagatgcctctagttactgcgacttggaaaaggtgtttgccagcatgcatgcagttgaggacagagctcgacgataccggcgcactgcgttttcgaagtctaatggctcttagcagcttgttatatagacagcagcacttagtttgggttcaggaaagcaaatctggaacttcagcgttgcagttttctgaatgttcagattggctatcagagactttacatatgcccagcagtcaatgtacaaaacccggccgcatctgcggtgacatgagatgagccactggatgctctcttttgcaggtgtccatccagtgttagccagcagcatagagatttaggaatagttggaaggtagtgagtggatgctttatttgaatggctcttcaagggaaacagagaaacaaaaatcacatgacaaatgtcaattttgggatttttttttcctccctctctacaggtgtacactccagagccatttttcctttaattttgaatggctgatgttcgtttgctacagtagttttttttttgagttgtgcttccacagcagtaaaattgattaagacgggccatgaatgcccgcgatatccttaaatcattt

SEQ ID NO: 4359 - DNA, 2705 bp, Zea Mays
caaacaagccttgcttgcagccttgtccctgctcccctactcttttccatcacatcgcagtctctgtggacggaaagacaaacagtgccttgcttgtctctacctctcctggctcctaccttagcctcacctggcggtctggccctgcccatctctcactctcgctctcgctcttgctctcgcactgaggacaagatgcatactgtacaggtgaagaacaggaactgagcgatagccattggttggaggttggcctgccggtgccggcctgcatgactgctctccctgaccggctggccctgacgaaggggaacaatgagggatggcggcggcggcggcggcagcagcaagacgagcaagctgtcgtggtccaaaagcctcgtgaggaagtggttcaacatcaggggcaagtcccaggacttccatgccgatgctgcagcagttggaactgggagtgtgaggtcaggtcgaggggatggagattggatggatggcagcttcactaggagggactcctacggcgccaagaagagcagaacagagagggcgtcgcggaggagccacgagcggtcgcggcgcagcaagatcgacctcgatgccgccgaggccaccgtcatgctcgactacaggatctttgctgctacgtggaatgtaggtggccgcgcgccgccgggctcgctcagcctcgacgactggctccgcacctcgccgccggccgacatctacgtcctcgggttccaagaaatcgtcccgttgaacgccgggaacgtcctcggcgccgaggacaacggccccgcgaggaagtgggtgtcgctggtcaggcggacgctgaacagcctgccgggaagtagcggcagcgggagcctgcagacgccgtcgccggcgccgtacctggtggcggagatggacgcggacttcgagcggtcgacaacgcaaaacaacccgtccttcttccaccggcggtcgttccactctgggctcagccggagcatgcgggtggacggcgacctcctcgccggccctggccccggccccgccaggctcgagcgccggtacagcgtcaacgaccgcgtcatgtacggtagcaggcccagcgactacgaggccaactgccagtggggcgccggtcagttggtcgatgaggacgacggtggcggcggcgagtccccggtcacggtgttctctccgatgtcccacggatatggaaatgctcctccgcctatggaagaatgcaacgggtcagcccgtggccttgctagatggttggactgttcctgatgatctgggctcggaaagagatgaagaacgacattaggaatctgaaggtgtcctgcgttgggaggggattaatgggctaccttggaaataagggctcaatctccatcagcatggctttgcaccaaacgagcttctgcttcgtctgcagccacctgacatctggtcagaaggacggcgacgagcaccgcaggaactccgatgttttggagatcctaaagaagaccagattccctagggtttgcggacagtacgagagatcgccggagaccatcctggagcacgatcggataatctggctcggggatctcaattaccggatcgcgctgtcctaccgatcggtgaaagcgctcgtggagatgcgtaactggaaagcgttgctggaaaaagaccagctaacgagggagcagagaggtgggcgcgtgtttcctggctggaacgaggggaggatctacttcccaccgacctataaatactccaacaactccgacaaatacgcgggagaagacatgaaccagaaggagaagaagcggactccagcatggtgcgaccgcatcttgtggtacgggagggggctcagccagctctcctacgtccgaggagagtcgcgcttctcggaccacagacctgtctacagcatgttcattgccgaggtggagtcgatcaaccacagccagatccagaagatgagttcttggagctcccagctggacatagaggaactgctgccgtactcgtatgggtacacggagatcgatcactatgggtacacagacctcaatttctactgagaaacgggcagaggaactcgcatgctgctgagctctaatagatgcctctagttactgcgacttggaaaaggtgtttgccagcatgcatgcagttgaggacagagctcgacgataccggcgcactgcgttttcgaagtctaatggctcttagcagcttgttatatagacagcagcacttagtttgggttcaggaaagcaaatctggaacttcagcgttgcagttttctgaatgttcagattggctatcagagactttacatatgcccagcagtcaatgtacaaaacccggccgcatctgcggtgacatgagatgagccactggatgctctcttttgcaggtgtccatccagtgttagccagcagcatagagatttaggaatagttggaaggtagtgagtggatgctttatttgaatggctcttcaagggaaacagagaaacaaaaatcacatgacaaatgtcaattttgggatttttttttcctccctctctacaggtgtacactccagagccatttttcctttaattttgaatggctgatgttcgtttgctacagtagttttttttttgagttgtgcttccacagcagtaaaattgattaagacgggccatgaatgcccgcgatatccttaaatcattt

SEQ ID NO: 4360 - DNA, 1206 bp, Zea Mays
  misc_feature (1206)..(1206): n is a, c, g, or t
tggccggggtacagtacaggatgcgggggttgacacgcgctgcgaaacgcgcaggggagatggcgttcaacgccggtggtggcgccgtcaactggttcccgggccacatggccgcggcctcccgcgccatccgcgatcgtctcaagctcgccgacctcgtcatcgagattccattatcctcagcaaatgaagaccttcaaccagtgctctcagcaaagaggcgaattcttgctctaaacaagaaggatctagcaaaccccaacataatgaataggtggctgaatcattttgaatcatgcaagcaggattgtatctcaataaatgcacatagctccagttctgttaaccagcttcttggttttgctgagctgaaactaaaggaagcaatctcaaaggagccaacccttctgattatgcttgttggtgtccctaatgttggcaagtctgcactcataaattctattcatagaattgctacttctcgatttccagcgaaagataaaaataaacgggctacagtggggccactgccaggtgttacacaagatattgcagggtataagattgcaactcagcccagtatttatgtgcttgatacacctggtgttcttgtgccaagcataccagatatggagacagggttaaagcttgctttaacaggagctgttaaagactcggtagttggggaagaacgtatagcaaaatatttattatctctttttaacattaaaaagacacctctacactgggagcggttgttgcacagaaaagaagagtggtgtgaagagatatgcagcagtaataaaaaagacaattcattacggaggactcggttgaataactctgatgccgtatatgttcaggatttagtgacggaggtgcagagggcactatgccgtacgttcctgaacttcactggcaacatcgaggaagaaagtgagctggaaaccctcatagacatgcagcttgtggagctccgcaaggtgttcaggataccccataagcctttcgatgaaacgcagggccctacctccaagaagctcctaactctcttcagatcaggaagcttgggccgttcatcctcgacgaccttcctgatggatctgagaaataacctgtttacttgattctttttattttgcactcggcagctgatgttctatgatggaaggcattggtacgagctgatgttcttgcagggaggan

SEQ ID NO: 4361 - DNA, 1166 bp, Zea Mays
  misc_feature (1166)..(1166): n is a, c, g, or t
ggccggggtacagtacaggatgcgggggttgacacgcgctgcgaaacgcgcaggggagatggcgttcaacgccggtggtggcgccgtcaactggttcccgggccacatggccgcggcctcccgcgccatccgcgatcgtctcaagctcgccgacctcgtcatcgaggtccgcgacgcccgcattccattatcctcagcaaatgaagaccttcaaccagtgctctcagcaaagaggcgaattcttgctctaaacaagaaggatctagcaaaccccaacataatgaataggtggctgaatcattttgaatcatgcaagcaggattgtatctcaataaatgcacatagctccagttctgttaaccagcttcttggttttgctgagctgaaactaaaggaagcaatctcaaaggagccaacccttctgattatgcttgttggtgtccctaatgttgcgaaagataaaaataaacgggctacagtggggccactgccaggtgttacacaagatattgcagggtataagattgcaactcagcccagtatttatgtgcttgatacacctggtgttcttgtgccaagcataccagatatggagacagggttaaagcttgctttaacaggagctgttaaagactcggtagttggggaagaacgtatagcaaaatatttattatctctttttaacattaaaaagacacctctacactgggagcggttgttgcacagaaaagaagagtggtgtgaagagatatgcagcagtaataaaaaagacaattcattacggaggactcggttgaataactctgatgccgtatatgttcaggatttagtgacggaggtgcagagggcactatgccgtacgttcctgaacttcactggcaacatcgaggaagaaagtgagctggaaaccctcatagacatgcagcttgtggagctccgcaaggtgttcaggataccccataagcctttcgatgaaacgcagggccctacctccaagaagctcctaactctcttcagatcaggaagcttgggccgttcatcctcgacgaccttcctgatggatctgagaaataacctgtttacttgattctttttattttgcactcggcagctgatgttctatgatggaaggcattggtacgagctgatgttcttgcagggaggan

SEQ ID NO: 4362 - DNA, 1017 bp, Zea Mays
  misc_feature (1017)..(1017): n is a, c, g, or t
ggccggggtacagtacaggatgcgggggttgacacgcgctgcgaaacgcgcaggggagatggcgttcaacgccggtggtggcgccgtcaactggttcccgggccacatggccgcggcctcccgcgccatccgcgatcgtctcaagctcgccgacctcgtcatcgaggtccgcgacgcccgcattccattatcctcagcaaatgaagaccttcaaccagtgctctcagcaaagaggcgaattcttgctctaaacaagaaggatctagcaaaccccaacataatgaataggtggctgaatcattttgaatcatgcaagcaggattgtatctcaataaatgcacatagctccagttctgttaaccagcttcttggttttgctgagctgaaactaaaggaagcaatctcaaaggagccaacccttctgattatgcttgttggtgtccctaatgttggcaagtctgcactcataaattctattcatagaattgctacttctcgatttccagcgaaagataaaaataaacgggctacagtggggccactgccaggtgttacacaagatattgcagggtataagattgcaactcagcccagtatttatgtgcttgatacacctggtgttcttgtgccaagcataccagatatggagacagggttaaagcttgctttaacaggatttagtgacggaggtgcagagggcactatgccgtacgttcctgaacttcactggcaacatcgaggaagaaagtgagctggaaaccctcatagacatgcagcttgtggagctccgcaaggtgttcaggataccccataagcctttcgatgaaacgcagggccctacctccaagaagctcctaactctcttcagatcaggaagcttgggccgttcatcctcgacgaccttcctgatggatctgagaaataacctgtttacttgattctttttattttgcactcggcagctgatgttctatgatggaaggcattggtacgagctgatgttcttgcagggaggan

SEQ ID NO: 4363 - DNA, 1204 bp, Zea Mays
  misc_feature (1204)..(1204): n is a, c, g, or t
ggccggggtacagtacaggatgcgggggttgacacgcgctgcgaaacgcgcaggggagatggcgttcaacgccggtggtggcgccgtcaactggttcccgggccacatggccgcggcctcccgcgccatccgcgatcgtctcaagctcgccgacctcgtcatcgaggtccgcgacgcccgccaaatgaagaccttcaaccagtgctctcagcaaagaggcgaattcttgctctaaacaagaaggatctagcaaaccccaacataatgaataggtggctgaatcattttgaatcatgcaagcaggattgtatctcaataaatgcacatagctccagttctgttaaccagcttcttggttttgctgagctgaaactaaaggaagcaatctcaaaggagccaacccttctgattatgcttgttggtgtccctaatgttggcaagtctgcactcataaattctattcatagaattgctacttctcgatttccagcgaaagataaaaataaacgggctacagtggggccactgccaggtgttacacaagatattgcagggtataagattgcaactcagcccagtatttatgtgcttgatacacctggtgttcttgtgccaagcataccagatatggagacagggttaaagcttgctttaacaggagctgttaaagactcggtagttggggaagaacgtatagcaaaatatttattatctctttttaacattaaaaagacacctctacactgggagcggttgttgcacagaaaagaagagtggtgtgaagagatatgcagcagtaataaaaaagacaattcattacggaggactcggttgaataactctgatgccgtatatgttcaggatttagtgacggaggtgcagagggcactatgccgtacgttcctgaacttcactggcaacatcgaggaagaaagtgagctggaaaccctcatagacatgcagcttgtggagctccgcaaggtgttcaggataccccataagcctttcgatgaaacgcagggccctacctccaagaagctcctaactctcttcagatcaggaagcttgggccgttcatcctcgacgaccttcctgatggatctgagaaataacctgtttacttgattctttttattttgcactcggcagctgatgttctatgatggaaggcattggtacgagctgatgttcttgcagggaggan

SEQ ID NO: 4364 - DNA, 920 bp, Zea Mays
  misc_feature (920)..(920): n is a, c, g, or t
ggccggggtacagtacaggatgcgggggttgacacgcgctgcgaaacgcgcaggggagatggcgttcaacgccggtggtggcgccgtcaactggttcccgggccacatggccgcggcctcccgcgccatccgcgatcgtctcaagctcgccgacctcgtcatcgaggtccgcgacgcccgcattccattatcctcagcaaatgaagaccttcaaccagtgctctcagcaaagaggcgaattcttgctctaaacaagaaggatctagcaaaccccaacataatgaataggtggctgaatcattttgaatcatgcaagcaggattgtatctcaataaatgcacatagctccagttctgttaaccagcttcttggttttgctgagctgaaactaaaggaagcaatctcaaaggagccaacccttctgattatgcttgttggtgtccctaatgttggcaagtctgcactcataaattctattcatagaattgctacttctcgatttccagcgaaagataaaaataaacgggctacagtggggccactgccaggtgttacacaagatattgcagggtataaggatttagtgacggaggtgcagagggcactatgccgtacgttcctgaacttcactggcaacatcgaggaagaaagtgagctggaaaccctcatagacatgcagcttgtggagctccgcaaggtgttcaggataccccataagcctttcgatgaaacgcagggccctacctccaagaagctcctaactctcttcagatcaggaagcttgggccgttcatcctcgacgaccttcctgatggatctgagaaataacctgtttacttgattctttttattttgcactcggcagctgatgttctatgatggaaggcattggtacgagctgatgttcttgcagggaggan

SEQ ID NO: 4365 - DNA, 931 bp, Zea Mays
  misc_feature (931)..(931): n is a, c, g, or t
cttcacttttactataaaggcatccatatattccaatctatggcctcttttgcataacctttttctatatggaagcttcttggttttgctgagctgaaactaaaggaagcaatctcaaaggagccaacccttctgattatgcttgttggtgtccctaatgttggcaagtctgcactcataaattctattcatagaattgctacttctcgatttccagcgaaagataaaaataaacgggctacagtggggccactgccaggtgttacacaagatattgcagggtataagattgcaactcagcccagtatttatgtgcttgatacacctggtgttcttgtgccaagcataccagatatggagacagggttaaagcttgctttaacaggagctgttaaagactcggtagttggggaagaacgtatagcaaaatatttattatctctttttaacattaaaaagacacctctacactgggagcggttgttgcacagaaaagaagagtggtgtgaagagatatgcagcagtaataaaaaagacaattcattacggaggactcggttgaataactctgatgccgtatatgttcaggatttagtgacggaggtgcagagggcactatgccgtacgttcctgaacttcactggcaacatcgaggaagaaagtgagctggaaaccctcatagacatgcagcttgtggagctccgcaaggtgttcaggataccccataagcctttcgatgaaacgcagggccctacctccaagaagctcctaactctcttcagatcaggaagcttgggccgttcatcctcgacgaccttcctgatggatctgagaaataacctgtttacttgattctttttattttgcactcggcagctgatgttctatgatggaaggcattggtacgagctgatgttcttgcagggaggan

SEQ ID NO: 4366 - DNA, 954 bp, Zea Mays
  misc_feature (954)..(954): n is a, c, g, or t
atggcctcttttgcataacctttttctatatggaagggtttggcatttttttaggatccacatgacaattaatggtatgtaaccattagggtgaacagcttcttggttttgctgagctgaaactaaaggaagcaatctcaaaggagccaacccttctgattatgcttgttggtgtccctaatgttggcaagtctgcactcataaattctattcatagaattgctacttctcgatttccagcgaaagataaaaataaacgggctacagtggggccactgccaggtgttacacaagatattgcagggtataagattgcaactcagcccagtatttatgtgcttgatacacctggtgttcttgtgccaagcataccagatatggagacagggttaaagcttgctttaacaggagctgttaaagactcggtagttggggaagaacgtatagcaaaatatttattatctctttttaacattaaaaagacacctctacactgggagcggttgttgcacagaaaagaagagtggtgtgaagagatatgcagcagtaataaaaaagacaattcattacggaggactcggttgaataactctgatgccgtatatgttcaggatttagtgacggaggtgcagagggcactatgccgtacgttcctgaacttcactggcaacatcgaggaagaaagtgagctggaaaccctcatagacatgcagcttgtggagctccgcaaggtgttcaggataccccataagcctttcgatgaaacgcagggccctacctccaagaagctcctaactctcttcagatcaggaagcttgggccgttcatcctcgacgaccttcctgatggatctgagaaataacctgtttacttgattctttttattttgcactcggcagctgatgttctatgatggaaggcattggtacgagctgatgttcttgcagggaggan

SEQ ID NO: 4367 - DNA, 699 bp, Zea Mays
  misc_feature (699)..(699): n is a, c, g, or t
ggagatgtcctcccatccagcacaacaaaaaaccatgtcgagtctgaccaacgttgattgcaactcagcccagtatttatgtgcttgatacacctggtgttcttgtgccaagcataccagatatggagacagggttaaagcttgctttaacaggagctgttaaagactcggtagttggggaagaacgtatagcaaaatatttattatctctttttaacattaaaaagacacctctacactgggagcggttgttgcacagaaaagaagagtggtgtgaagagatatgcagcagtaataaaaaagacaattcattacggaggactcggttgaataactctgatgccgtatatgttcaggatttagtgacggaggtgcagagggcactatgccgtacgttcctgaacttcactggcaacatcgaggaagaaagtgagctggaaaccctcatagacatgcagcttgtggagctccgcaaggtgttcaggataccccataagcctttcgatgaaacgcagggccctacctccaagaagctcctaactctcttcagatcaggaagcttgggccgttcatcctcgacgaccttcctgatggatctgagaaataacctgtttacttgattctttttattttgcactcggcagctgatgttctatgatggaaggcattggtacgagctgatgttcttgcagggaggan

SEQ ID NO: 4368 - DNA, 1767 bp, Zea Mays
gtccctccctctataaataaataaataaacttttttaggagacgaagcacaccgcaggacaggagaagcttgggtctcctatcctccccacccctctctcggtctcttccccaccgcgtcttcgtcgtctcgtcttcctgcctccttcgcccgagaaaggagaggtaagcccgccgagatctccttttcttgcgtgcttcatcacgccaggctcgtcccggtgactggctggttttggctctgggttgtcggctccggcctccgggtccgggcacagagcgcgccgcgcaatggcgccgtgcggatgtctttcggttgactgagtccatgcatgcagaatggggagcagcgagaagaccgttaccgcttacggcgagtacacctacgctgagctggagagggagccctactggccgagtgagaagctgaggatttcgattactggggctggtggtttcattggatcccacattgctcgccgtctgaagaacgagggccattacatcattgcctctgactggaagaagaacgagcacatgaccgaggacatgttctgccatgagttccacctcgttgatctcagggtcatggacaactgtctcaaggtcacccatggtgtcgaccatgtcttcaatcttgctgcagatatgggtggcatggggttcatccagtcaaatcactctgtgatcatgtacaacaacaccatgatcagttttaacatgctggaggctgcacgtatcaatggtgtgaagaggttcttctatgcctcgagtgcatgcatttaccctgagttcaagcagcttgacacaaatgtgagcttgaaggaatctgatgcctggcctgctgagcctcaagatgcctatggcttggagaagcttgcaaccgaggagctgtgcaagcactacaccaaggactttggcatcgagtgccgcgtcggccgcttccacaacatctacggccctttcggaacatggaaaggtggccgcgagaaggcaccggctgccttctgcagaaaggctcagacatccacggagaggtttgagatgtggggcgatggtctccagaccaggtccttcaccttcatcgacgagtgcgtggagggtgttctgagattgaccaagtcagacttccgcgagccagtgaacatcggaagcgatgagatggtgagcatgaacgagatggctgagatcgtgctgggctttgaggataggaagctgcccatccaccacatccctggcccggaaggggtccgcgggcgcaactctgacaacacccttatcaaggagaagcttggctgggccccgacgatgaagctcaaggatgggctgcggttcacctacttctggatcaaagagcagatcgagaaggagaagacgcagggggtcgacatcgcggcgtacgggtcgtccaaggtggtgtccacccaggcgcccgtgcagctgggctccctccgcgccgccgacggcaaggagggcctctaaagcgacgacccagggctgtctggcgtaccatggcgggatatactgtttgcggtagaatatcacagtagcagcaaaactagtacttttggaggttcagacatgacggtcgccttcttttctattttcccattcatcgctccatttatttatgatgccatgcaactcgttgaatttttgctgtactccctttatttggtcttggccggccggcaataaaattctccctgtttctactacatgtggacaacatgtatgtatgatcctatactagattggtatgggctct

SEQ ID NO: 4369 - DNA, 1458 bp, Zea Mays
aagtttcagaatttacatcattcagaagaatggggagcagcgagaagaccgttaccgcttacggcgagtacacctacgctgagctggagagggagccctactggccgagtgagaagctgaggatttcgattactggggctggtggtttcattggatcccacattgctcgccgtctgaagaacgagggccattacatcattgcctctgactggaagaagaacgagcacatgaccgaggacatgttctgccatgagttccacctcgttgatctcagggtcatggacaactgtctcaaggtcacccatggtgtcgaccatgtcttcaatcttgctgcagatatgggtggcatggggttcatccagtcaaatcactctgtgatcatgtacaacaacaccatgatcagttttaacatgctggaggctgcacgtatcaatggtgtgaagaggttcttctatgcctcgagtgcatgcatttaccctgagttcaagcagcttgacacaaatgtgagcttgaaggaatctgatgcctggcctgctgagcctcaagatgcctatggcttggagaagcttgcaaccgaggagctgtgcaagcactacaccaaggactttggcatcgagtgccgcgtcggccgcttccacaacatctacggccctttcggaacatggaaaggtggccgcgagaaggcaccggctgccttctgcagaaaggctcagacatccacggagaggtttgagatgtggggcgatggtctccagaccaggtccttcaccttcatcgacgagtgcgtggagggtgttctgagattgaccaagtcagacttccgcgagccagtgaacatcggaagcgatgagatggtgagcatgaacgagatggctgagatcgtgctgggctttgaggataggaagctgcccatccaccacatccctggcccggaaggggtccgcgggcgcaactctgacaacacccttatcaaggagaagcttggctgggccccgacgatgaagctcaaggatgggctgcggttcacctacttctggatcaaagagcagatcgagaaggagaagacgcagggggtcgacatcgcggcgtacgggtcgtccaaggtggtgtccacccaggcgcccgtgcagctgggctccctccgcgccgccgacggcaaggagggcctctaaagcgacgacccagggctgtctggcgtaccatggcgggatatactgtttgcggtagaatatcacagtagcagcaaaactagtacttttggaggttcagacatgacggtcgccttcttttctattttcccattcatcgctccatttatttatgatgccatgcaactcgttgaatttttgctgtactccctttatttggtcttggccggccggcaataaaattctccctgtttctactacatgtggacaacatgtatgtatgatcctatactagattggtatgggctct

SEQ ID NO: 4370 - DNA, 1487 bp, Zea Mays
ccggcacacacgacttgctgtaaagattccctggacccatgattggctgataatttgaatggggagcagcgagaagaccgttaccgcttacggcgagtacacctacgctgagctggagagggagccctactggccgagtgagaagctgaggatttcgattactggggctggtggtttcattggatcccacattgctcgccgtctgaagaacgagggccattacatcattgcctctgactggaagaagaacgagcacatgaccgaggacatgttctgccatgagttccacctcgttgatctcagggtcatggacaactgtctcaaggtcacccatggtgtcgaccatgtcttcaatcttgctgcagatatgggtggcatggggttcatccagtcaaatcactctgtgatcatgtacaacaacaccatgatcagttttaacatgctggaggctgcacgtatcaatggtgtgaagaggttcttctatgcctcgagtgcatgcatttaccctgagttcaagcagcttgacacaaatgtgagcttgaaggaatctgatgcctggcctgctgagcctcaagatgcctatggcttggagaagcttgcaaccgaggagctgtgcaagcactacaccaaggactttggcatcgagtgccgcgtcggccgcttccacaacatctacggccctttcggaacatggaaaggtggccgcgagaaggcaccggctgccttctgcagaaaggctcagacatccacggagaggtttgagatgtggggcgatggtctccagaccaggtccttcaccttcatcgacgagtgcgtggagggtgttctgagattgaccaagtcagacttccgcgagccagtgaacatcggaagcgatgagatggtgagcatgaacgagatggctgagatcgtgctgggctttgaggataggaagctgcccatccaccacatccctggcccggaaggggtccgcgggcgcaactctgacaacacccttatcaaggagaagcttggctgggccccgacgatgaagctcaaggatgggctgcggttcacctacttctggatcaaagagcagatcgagaaggagaagacgcagggggtcgacatcgcggcgtacgggtcgtccaaggtggtgtccacccaggcgcccgtgcagctgggctccctccgcgccgccgacggcaaggagggcctctaaagcgacgacccagggctgtctggcgtaccatggcgggatatactgtttgcggtagaatatcacagtagcagcaaaactagtacttttggaggttcagacatgacggtcgccttcttttctattttcccattcatcgctccatttatttatgatgccatgcaactcgttgaatttttgctgtactccctttatttggtcttggccggccggcaataaaattctccctgtttctactacatgtggacaacatgtatgtatgatcctatactagattggtatgggctct

SEQ ID NO: 4371 - DNA, 830 bp, Zea Mays
ggagagcatgcggataagaacaaccacgtcggcccgccacgccgtcgaactgtccacgtcggcttactccactgctttaaaaccggtcccctccccctcgtcctcttcccccactccggcattcccccccaaaaaatcgagccgaaaaagatcaaaagaaaaaaaaaagaagaaaaaaaccctaaccactccgatcgaatcatccgagggccgcagcagcccggcgaggctatgtctcaggcaaccgccgcctcccgggatcgcttcccctggtgatacaactcgggccgttcatttcgtctttccgtagggatatgagggccgctccaaccgatccgcccacggcgccggcgaagtcgatgctgaggcggctgttcgatcgccagctcctgcggatctcaccagcggagcgtctaccatcggcgggggcgggagagaaggatgaggcggagccgagctccgtgtgcctggacggcatggtgcgcagcttcatggaggacgacgtcggcagcgagaaggctgcccacgggggccggtactgtaactgcttccacggaggcgataattcagatgacgaggaggacgacgaagcggcggcggcggcctccgacgtcgccgagacgatcaagacttagctgtggggcgatgttgatcgaatggaatgctggaaggaaaccttctggattgactgttgtgcacgcaatgctaacaggattagcagtaaacaaacccctgcccatgagaagatgcaattcttccgacttccagattaggttgttgaactgtctcctgcaaatatgctcttgatcttgaaagaaatataatattct

SEQ ID NO: 4372 - DNA, 2889 bp, Zea Mays
cacacgctacgctatagctgctcacacacatagtatcgtcgtctctctctccttcccaccaacaacgcacgcgtcgaagaaggaaatgattagtagcagccatacttgctccgcctattaatagccagcgcgcgcgtcttgttttgctctcttctgttctgttttgccctagattagcggcggcgttttggcctcgcgcgaacgtctcgtccttgccgtctcgcgcgcgtgcgtacgtgcctgcattgcgatttgcaattattacgatcgcgcggcggcggcggcggcggcatgaagctcctctcgccggcggccgcaccgtcgtcctcgccgttgttccctcctcgcatcgtcgaagctgcagctcgtcaatcaggtccatgccgtatccgcatccgtatccgtggcaaagcagcagcagcaggaggaggaggaggcgcgggcgcgacggggccccgcggcagcctcaggctcgccgggtggtggagagcgcagcagcaggccccggccacggcgacgacaacgcagcagcctgacaacgtctccagtgctaaagtgttccagaccagccgtgtggaaaccgagtccgaaattgcgaaatggccagggaaaccacaagaccttgaggatgagcaccaggctgaggaggcagagctgcagccacttatcgaccaggtgagggcgatgctacggtcgatgaacgacggggataccagcgcctcggcgtacgacacggcgtgggtggcgatggtgccgaaggtgggcggcgacggcggcgcccagccccagttcccggccaccgtgcgctggatcgtggaccaccagctgcccgacggctcctggggcgactcggccctgttctccgcctacgaccgcatgatcaacaccctcgcctgcgtcgtcgcgctgaccaagtggtcgctggagcccgcgaggtgcgaggcggggctctcgttcctgcacgagaacatgtggaggctagcggaggaggaggcggagtcgatgcccatcggcttcgagatcgccttcccttctctcatccagacggctagggacctgggcgtcgtcgacttcccgtacggacacccggcgctgcagagcatatacgccaacagggaagtcaagctgaagcggatcccaagggacatgatgcacagggtcccgacgtccatcctgcacagccttgaagggatgcctgacctggactggccgaggcttctgaacctccagtcctgcgacggctccttcttgttctctccttcggctaccgcttacgcgctgatgcaaaccggtgacaagaagtgcttcgaatacatcgacaggattgtcaaaaaattcaacgggggagtccccaatgtttatccggtcgatcttttcgagcacatctgggttgtggatcggttggagcgactcgggatctcccgctacttccaacgagagattgagcagtgcatggactatgtgaacaggcactggactgaagatgggatttgctgggctaggaaatccaatgtgaaggatgtggatgacacagctatggctttccgactactaaggctacatggatacaatgtctctccaagtgtgtttaagaactttgagaaagatggagagttcttttgttttgtgggccaatcgactcaagccgtcactgggatgtataacctcaacagagcctctcagataagttttcaaggagaggatgtattgcatcgtgctagggttttctcgtatgagtttctgagacagagagaagaacaaggcatgatccgtgataaatggatcgttgccaaggatctacctggcgaggtgcaatatacactagacttcccttggtatgcaagcttgcctcgtgtagaggcaagaacctatctagatcaatatggtggtaaagatgacgtttggattggaaagacactctacaggatgcctcttgtgaataacgacacatatctagagttggcaataagggatttcaaccattgccaagctctgcatcagcttgagtgtaatgggctgcaaacgtggtacaaggataattgccttgacgcttttggagtagaaccacaagatgttttaagatcttactttttagctgctgcttgcatttttgaacctagccgtgctgctgagcggcttgcatgggctagaacgtcaatgattgccaatgccatttctacacatcttcgtgacatttcggaagacaagaagagattggaatgtttcgtgcactgtctctatgaagaaaacgatgtatcatggcttaaacgaaatcctaatgatgttattcttgagagggcacttcgaagattaattaacttattagcacaagaagcattgccaattcatgaaggacaaagattcatacacagtctattgagtcttgcatggaccgaatggatgttgcaaaaggcaaataaagaagaaaacaaatatcacaaatgcagtggtatagaaccacaatacatggttcatgataggcaaacatacttacttttagttcaggttattgagatttgtgctggacgaattggtgaggctgtgtcaatgataaacaacaaggataatgattggtttattcaactcacatgtgctacttgtgacagtcttaaccataggatgttactgtcccaggtaaaccttgtatcataattaaattatttttactctttatgtatagctagatacatgtgtggtctaatgattgttccattagggggtaataataattttaggatcaaaccatcacatatataactatttttagcaccttaattctccaccaaagactagaatttgctcctagatccttacaacctcaagttttggattaggtcattgtgtaggtttctttgtctttccttggcttagtgaattcaaaacattaag

SEQ ID NO: 4373 - DNA, 3055 bp, Zea Mays
cacacgctacgctatagctgctcacacacatagtatcgtcgtctctctctccttcccaccaacaacgcacgcgtcgaagaaggaaatgattagtagcagccatacttgctccgcctattaatagccagcgcgcgcgtcttgttttgctctcttctgttctgttttgccctagattagcggcggcgttttggcctcgcgcgaacgtctcgtccttgccgtctcgcgcgcgtgcgtacgtgcctgcattgcgatttgcaattattacgatcgcgcggcggcggcggcggcggcatgaagctcctctcgccggcggccgcaccgtcgtcctcgccgttgttccctcctcgcatcgtcgaagctgcagctcgtcaatcaggtccatgccgtatccgcatccgtatccgtggcaaagcagcagcagcaggaggaggaggaggcgcgggcgcgacggggccccgcggcagcctcaggctcgccgggtggtggagagcgcagcagcaggccccggccacggcgacgacaacgcagcagcctgacaacgtctccagtgctaaaggctgaggaggcagagctgcagccacttatcgaccaggtgagggcgatgctacggtcgatgaacgacggggataccagcgcctcggcgtacgacacggcgtgggtggcgatggtgccgaaggtgggcggcgacggcggcgcccagccccagttcccggccaccgtgcgctggatcgtggaccaccagctgcccgacggctcctggggcgactcggccctgttctccgcctacgaccgcatgatcaacaccctcgcctgcgtcgtcgcgctgaccaagtggtcgctggagcccgcgaggtgcgaggcggggctctcgttcctgcacgagaacatgtggaggctagcggaggaggaggcggagtcgatgcccatcggcttcgagatcgccttcccttctctcatccagacggctagggacctgggcgtcgtcgacttcccgtacggacacccggcgctgcagagcatatacgccaacagggaagtcaagctgaagcggatcccaagggacatgatgcacagggtcccgacgtccatcctgcacagccttgaagggatgcctgacctggactggccgaggcttctgaacctccagtcctgcgacggctccttcttgttctctccttcggctaccgcttacgcgctgatgcaaaccggtgacaagaagtgcttcgaatacatcgacaggattgtcaaaaaattcaacgggggagtccccaatgtttatccggtcgatcttttcgagcacatctgggttgtggatcggttggagcgactcgggatctcccgctacttccaacgagagattgagcagtgcatggactatgtgaacaggcactggactgaagatgggatttgctgggctaggaaatccaatgtgaaggatgtggatgacacagctatggctttccgactactaaggctacatggatacaatgtctctccaagtgtgtttaagaactttgagaaagatggagagttcttttgttttgtgggccaatcgactcaagccgtcactgggatgtataacctcaacagagcctctcagataagttttcaaggagaggatgtattgcatcgtgctagggttttctcgtatgagtttctgagacagagagaagaacaaggcatgatccgtgataaatggatcgttgccaaggatctacctggcgaggtgcaatatacactagacttcccttggtatgcaagcttgcctcgtgtagaggcaagaacctatctagatcaatatggtggtaaagatgacgtttggattggaaagacactctacaggatgcctcttgtgaataacgacacatatctagagttggcaataagggatttcaaccattgccaagctctgcatcagcttgagtgtaatgggctgcaaacgtggtacaaggataattgccttgacgcttttggagtagaaccacaagatgttttaagatcttactttttagctgctgcttgcatttttgaacctagccgtgctgctgagcggcttgcatgggctagaacgtcaatgattgccaatgccatttctacacatcttcgtgacatttcggaagacaagaagagattggaatgtttcgtgcactgtctctatgaagaaaacgatgtatcatggcttaaacgaaatcctaatgatgttattcttgagagggcacttcgaagattaattaacttattagcacaagaagcattgccaattcatgaaggacaaagattcatacacagtctattgagtcttgcatggaccgaatggatgttgcaaaaggcaaataaagaagaaaacaaatatcacaaatgcagtggtatagaaccacaatacatggttcatgataggcaaacatacttacttttagttcaggttattgagatttgtgctggacgaattggtgaggctgtgtcaatgataaacaacaaggataatgattggtttattcaactcacatgtgctacttgtgacagtcttaaccataggatgttactgtcccaggatactatgaagaatgaagcaagaataaattggattgagaaggaaatcgagttgaatatgcaagagcttgctcaatctctccttttgagatgtgatgagaaaactagcaataagaagaccaagaaaaccttatgggatgtcctaagaagtttatactatgctactcattccccacaacatatgatcgatagacatgtttccagagttatctttgagcctgtttaaaaatgtttaagtggtagaccattatgttaggtgtaaatgtgtacataaaagttatcataaggagtaatggtagcagaagcatgcagttgtaagtttatttgttgcttagaatagaaattagtgtagctataatatcaagaatgttcctatataagtaatcatattatggatagaggtgttcatatgaataataattttatatgttaagtgttatcttacctaattttagtagcatcaccaattgtctagagaacttatctattttcttggcatcaaaat

SEQ ID NO: 4374 - DNA, 1237 bp, Zea Mays
aatcaacggtgcgtgcctacggcgcgtggcatcgtgtgacttgggcaactgacactcctccccgcgacgccgcgccgcctgcccggctgccatccgaatcccatgtcgtcgctgctcctcctccaggccctggctccagccatgaccgtcccccgccaccatttcctcatctcccctctccgcctcgcctctgcagccacagttccgttcgctcgacgcttctccaacgccgcttccagcaacaagccggagccactcctctcggaaccggatctggagtcaggtctgtatcttgtgtcaacgccaattgggaaccttgaagatatcaccttaagggcactgcgtgtcctaaaatgtgctaatgtgatactatctgaagacacaaggcattcaggaaagctacttcagcattacaacatcaagacacctcttcttagcttccataagttcaacgaacgggagagagagcccactatcttaaggaggcttcatgaaggtgaagcagttgcactgataagtgatgctgggacgccaggtattagtgaccctggcatggaactggctagactatgtgcaactgagaaaatccctgtcattcccattcctgggccatctgctgcaattgctgctctttctgcatcgggtttgccatcaaatgaattcacatttgttgggtttttaccaaagcatgctcggtcaagaagagataggcttgagatatctgctcgtgaagctgctacacaaatattctatgttcctccccatggcattcagcagtttcttgttgatgctgcttcatcttttggcgattccaggcattgtgtggtcgcaagggagataacaaaaatacatgaagagttttggcgtggaactttaggtgaagcaaatgaagcttttgcaactcgacaaccaaagggagaaataacagtgctcatagaggggaagttaatttcagatgacgaaattccatcagaggatttccttgagcatgaactaagagaattgacggcaaagggatatactctttctgcggcggtgaaattggtcactgaagccacatcagcaaagaagaaagatgtttatgcactcgcattgaggttgtttggaaaataagtaaaatggaatttttggtcgcatctgaaacgaggacacgaggaatctgaagcacaactttggggaagatcacaagtaaaaggacacgtggaccctgaactgtccctggaggaacctcgtgaac

SEQ ID NO: 4375 - DNA, 1161 bp, Zea Mays
ggtgcgtgcctacggcgcgtggcatcgtgtgacttgggcaactgacactcctccccgcgacgccgcgccgcctgcccggctgccatccgaatcccatgtcgtcgctgctcctcctccaggccctggctccagccatgaccgtcccccgccaccatttcctcatctcccctctccgcctcgcctctgcagccacagttccgttcgctcgacgcttctccaacgccgcttccagcaacaagccggagccactcctctcggaaccggatctggagtcaggtctgtatcttgtgtcaacgccaattgggaaccttgaagatatcaccttaagggcactgcgtgtcctaaaatgtgctaatgtgatactatctgaagacacaaggcattcaggaaagctacttcagcattacaacatcaagacacctcttcttagcttccataagttcaacgaacgggagagagagcccactatcttaaggaggcttcatgaaggtgaagcagttgcactgataagtgatgctgggacgccaggtattagtgaccctggcatggaactggctagactatgtgcaactgagaaaatccctgtcattcccattcctgggccatctgctgcaattgctgctctttctgcatcgggtttgccatcaaatgaattcacatttgttgggtttttaccaaagcatgctcggtcaagaagagataggcttgagatatctgctcgtgaagctgctacacaaatattctatgttcctccccatggcattcagcagtttcttgttgatgctgcttcatcttttggcgattccaggcattgtgtggtcgcaagggagataacaaaaatacatgaagagttttggcgtggaactttaggtgaagcaaatgaagcttttgcaactcgacaaccaaagggagaaataacagtgctcatagaggggaagttaatttcagatgacgaaattccatcagaggatttccttgagcatgaactaagagaattgacggcaaagggatatactctttctgcggcggtgaaattggtcactgaagccacatcagcaaagaagaaagatgtttatgcactcgcattgaggttgtttggaaaataagtaaaatggaatttttggtcgcatctgacccatcaatttcatatttgattcgaac

SEQ ID NO: 4376 - DNA, 1702 bp, Zea Mays
ggtgcgtgcctacggcgcgtggcatcgtgtgacttgggcaactgacactcctccccgcgacgccgcgccgcctgcccggctgccatccgaatcccatgtcgtcgctgctcctcctccaggccctggctccagccatgaccgtcccccgccaccatttcctcatctcccctctccgcctcgcctctgcagccacagttccgttcgctcgacgcttctccaacgccgcttccagcaacaagccggagccactcctctcggaaccggatctggagtcaggtctgtatcttgtgtcaacgccaattgggaaccttgaagatatcaccttaagggcactgcgtgtcctaaaatgtgctaatgtgatactatctgaagacacaaggcattcaggaaagctacttcagcattacaacatcaagacacctcttcttagcttccataagttcaacgaacgggagagagagcccactatcttaaggaggcttcatgaaggtgaagcagttgcactgataagtgatgctgggacgccaggtattagtgaccctggcatggaactggctagactatgtgcaactgagaaaatccctgtcattcccattcctgggccatctgctgcaattgctgctctttctgcatcgggtttgccatcaaatgaattcacatttgttgtaaggaactattggggtcagttcatattttcaattttagttgggtttttaccaaagcatgctcggtcaagaagagataggcttgagatatctgctcgtgaagctgctacacaaatattctatgttcctccccatggcattcagcagtttcttgttgatgctgcttcatcttttggcgattccaggcattgtgtggtcgcaagggagataacaaaaatacatgaagagttttggcgtggaactttaggtgaagcaaatgaagcttttgcaactcgacaaccaaagggagaaataacagtgctcatagaggggaagttaatttcagatgacgaaattccatcagaggatttccttgagcatgaactaagagaattgacggcaaagggatatactctttctgcggcggtgaaattggtcactgaagccacatcagcaaagaagaaagatgtttatgcactcgcattgaggttgtttggaaaataagtaaaatggaatttttggtcgcatctgaaacgaggacacgaggaatctgaagcacaactttggggaagatcacaagtaaaaggcaagttgtgtccttgatcacattctttgacctaataatgttcatgattctgttaatcaccgtggcatcgttaggttagcttgatgggacataatcagttacctagttttgtttatcttacaccttgcatacaaataaattattagttagttttgttgttgctctacctggtttttggttaatgatgcttataaattatggtcatgtttcatgatgatatattgctggattatctatatggcgcatgataagtttacaatgtttaattggaacatggagcgctaacacaagacaatagtgctaccaaagggtggaatggaacatccttggccaattaattaggaaagttagtatgagttaatgcttttccgaaaggggcaagcgggtgtgagaagctgctgatatagggaggttctcggatgatcatgctgcgatgactttttagaaaggggatcttgatagtagctagtga

SEQ ID NO: 4377 - DNA, 1633 bp, Zea Mays
ggtgcgtgcctacggcgcgtggcatcgtgtgacttgggcaactgacactcctccccgcgacgccgcgccgcctgcccggctgccatccgaatcccatgtcgtcgctgctcctcctccaggccctggctccagccatgaccgtcccccgccaccatttcctcatctcccctctccgcctcgcctctgcagccacagttccgttcgctcgacgcttctccaacgccgcttccagcaacaagccggagccactcctctcggaaccggatctggagtcaggtctgtatcttgtgtcaacgccaattgggaaccttgaagatatcaccttaagggcactgcgtgtcctaaaatgtgctaatgtgatactatctgaagacacaaggcattcaggaaagctacttcagcattacaacatcaagacacctcttcttagcttccataagttcaacgaacgggagagagagcccactatcttaaggaggcttcatgaaggtgaagcagttgcactgataagtgatgctgggacgccaggtattagtgaccctggcatggaactggctagactatgtgcaactgagaaaatccctgtcattcccattcctgggccatctgctgcaattgctgctctttctgcatcggttgggtttttaccaaagcatgctcggtcaagaagagataggcttgagatatctgctcgtgaagctgctacacaaatattctatgttcctccccatggcattcagcagtttcttgttgatgctgcttcatcttttggcgattccaggcattgtgtggtcgcaagggagataacaaaaatacatgaagagttttggcgtggaactttaggtgaagcaaatgaagcttttgcaactcgacaaccaaagggagaaataacagtgctcatagaggggaagttaatttcagatgacgaaattccatcagaggatttccttgagcatgaactaagagaattgacggcaaagggatatactctttctgcggcggtgaaattggtcactgaagccacatcagcaaagaagaaagatgtttatgcactcgcattgaggttgtttggaaaataagtaaaatggaatttttggtcgcatctgaaacgaggacacgaggaatctgaagcacaactttggggaagatcacaagtaaaaggcaagttgtgtccttgatcacattctttgacctaataatgttcatgattctgttaatcaccgtggcatcgttaggttagcttgatgggacataatcagttacctagttttgtttatcttacaccttgcatacaaataaattattagttagttttgttgttgctctacctggtttttggttaatgatgcttataaattatggtcatgtttcatgatgatatattgctggattatctatatggcgcatgataagtttacaatgtttaattggaacatggagcgctaacacaagacaatagtgctaccaaagggtggaatggaacatccttggccaattaattaggaaagttagtatgagttaatgcttttccgaaaggggcaagcgggtgtgagaagctgctgatatagggaggttctcggatgatcatgctgcgatgactttttagaaaggggatcttgatagtagctagtga

SEQ ID NO: 4378 - DNA, 1235 bp, Zea Mays
ggtgcgtgcctacggcgcgtggcatcgtgtgacttgggcaactgacactcctccccgcgacgccgcgccgcctgcccggctgccatccgaatcccatgtcgtcgctgctcctcctccaggccctggctccagccatgaccgtcccccgccaccatttcctcatctcccctctccgcctcgcctctgcagccacagttccgttcgctcgacgcttctccaacgccgcttccagcaacaagccggagccactcctctcggaaccggatctggagtcaggtctgtatcttgtgtcaacgccaattgggaaccttgaagatatcaccttaagggcactgcgtgtcctaaaatgtgctaatgtgatactatctgaagacacaaggcattcaggaaagctacttcagcattacaacatcaagacacctcttcttagcttccataagttcaacgaacgggagagagagcccactatcttaaggaggcttcatgaaggtgaagcagttgcactgataagtgatgctgggacgccaggtattagtgaccctggcatggaactggctagactatgtgcaactgagaaaatccctgtcattcccattcctgggccatctgctgcaattgctgctctttctgcatcgggtttgccatcaaatgaattcacatttgttgggtttttaccaaagcatgctcggtcaagaagagataggcttgagatatctgctcgtgaagctgctacacaaatattctatgttcctccccatggcattcagcagtttcttgttgatgctgcttcatcttttggcgattccaggcattgtgtggtcgcaagggagataacaaaaatacatgaagagttttggcgtggaactttaggtgaagcaaatgaagcttttgcaactcgacaaccaaagggagaaataacagtgctcatagaggggaagttaatttcagatgacgaaattccatcagaggatttccttgagcatgaactaagagaattgacggcaaagggatatactctttctgcggcggtgaaattggtcactgaagccacatcagcaaagaagaaagatgtttatgcactcgcattgaggttgtttggaaaataagtaaaatggaatttttggtcgcatctgaaacgaggacacgaggaatctgaagcacaactttggggaagatcacaagtaaaagactttagacggagattttgacaatcttttggagacgctaaatcattt

SEQ ID NO: 4379 - DNA, 1208 bp, Zea Mays
ggtgcgtgcctacggcgcgtggcatcgtgtgacttgggcaactgacactcctccccgcgacgccgcgccgcctgcccggctgccatccgaatcccatgtcgtcgctgctcctcctccaggccctggctccagccatgaccgtcccccgccaccatttcctcatctcccctctccgcctcgcctctgcagccacagttccgttcgctcgacgcttctccaacgccgcttccagcaacaagccggagccactcctctcggaaccggatctggagtcaggtctgtatcttgtgtcaacgccaattgggaaccttgaagatatcaccttaagggcactgcgtgtcctaaaatgtgctaatgtgatactatctgaagacacaaggcattcaggaaagctacttcagcattacaacatcaagacacctcttcttagcttccataagttcaacgaacgggagagagagcccactatcttaaggaggcttcatgaaggtgaagcagttgcactgataagtgatgctgggacgccaggtattagtgaccctggcatggaactggctagactatgtgcaactgagaaaatccctgtcattcccattcctgggccatctgctgcaattgctgctctttctgcatcggttgggtttttaccaaagcatgctcggtcaagaagagataggcttgagatatctgctcgtgaagctgctacacaaatattctatgttcctccccatggcattcagcagtttcttgttgatgctgcttcatcttttggcgattccaggcattgtgtggtcgcaagggagataacaaaaatacatgaagagttttggcgtggaactttaggtgaagcaaatgaagcttttgcaactcgacaaccaaagggagaaataacagtgctcatagaggggaagttaatttcagatgacgaaattccatcagaggatttccttgagcatgaactaagagaattgacggcaaagggatatactctttctgcggcggtgaaattggtcactgaagccacatcagcaaagaagaaagatgtttatgcactcgcattgaggttgtttggaaaataagtaaaatggaatttttggtcgcatctgaaacgaggacacgaggaatctgaagcacaactttggggaagatcacaagtaaaagactttagacggagattttgacaatcttttggagacgctaaatcattt

SEQ ID NO: 4380 - DNA, 1163 bp, Zea Mays
ggtgcgtgcctacggcgcgtggcatcgtgtgacttgggcaactgacactcctccccgcgacgccgcgccgcctgcccggctgccatccgaatcccatgtcgtcgctgctcctcctccaggccctggctccagccatgaccgtcccccgccaccatttcctcatctcccctctccgcctcgcctctgcagccacagttccgttcgctcgacgcttctccaacgccgcttccagcaacaagccggagccactcctctcggaaccggatctggagtcaggtctgtatcttgtgtcaacgccaattgggaaccttgaagatatcaccttaagggcactgcgtgtcctaaaatgtgctaatgtgatactatctgaagacacaaggcattcaggaaagctacttcagcattacaacatcaagacacctcttcttagcttccataagttcaacgaacgggagagagagcccactatcttaaggaggcttcatgaaggtgaagcagttgcactgataagtgatgctgggacgccaggtattagtgaccctggcatggaactgttgtaaggaactattggggtcagttcatattttcaattttagttgggtttttaccaaagcatgctcggtcaagaagagataggcttgagatatctgctcgtgaagctgctacacaaatattctatgttcctccccatggcattcagcagtttcttgttgatgctgcttcatcttttggcgattccaggcattgtgtggtcgcaagggagataacaaaaatacatgaagagttttggcgtggaactttaggtgaagcaaatgaagcttttgcaactcgacaaccaaagggagaaataacagtgctcatagaggggaagttaatttcagatgacgaaattccatcagaggatttccttgagcatgaactaagagaattgacggcaaagggatatactctttctgcggcggtgaaattggtcactgaagccacatcagcaaagaagaaagatgtttatgcactcgcattgaggttgtttggaaaataagtaaaatggaatttttggtcgcatctgaaacgaggacacgaggaatctgaagcacaactttggggaagatcacaagtaaaaggacacgtggaccctgaactgtccctggaggaacctcgtgaac

SEQ ID NO: 4381 - DNA, 1017 bp, Zea Mays
gatgcatcgaaggcaccagccaacgctgtttcttcatcccaacgtcttcctcgcagcgccgccgctccatcttccgctctctcacttattactcgcgttcggcacgcgggcgacggcggcggcgcccaggctctcagcgacggcgcacaggctctggctctcagcgacggcgtcaacggcttcccctcccgcctctcgccagtcgcctcgctccctcgcctccggtcctccgcacaccgtccgttgatcctgcctcttctggttagatagatggaggtgccaatgaactctacgcaatctggtcctcacttccctgtgcagcatcagtccctctcattagacatcaagggaaataaaacagatattgttatcagtaaatatgaagatacctttctgctgattgtggcacaaatcggctgcatgggaaccatactagctgccaatggcagtggctcagctcggtcattggttatttctctgggtctgaaagatcattctcagggaacactgaaggatatcattgtagctgtgatcgagaatcgcctttggtgatgattgaataactgagctgggcatgggattgacatattcagcccatcgataaagatattgcttagcattgcgcaagaggagccatcgtttataccatgcactaaattctggtagttttgtagttagaccttctatctacttggattaacaaaaggtggctttaagctgctgtcaaaatttgagtgtcagctctcacgctaaacaaaaggcactgtatgctggtaaaacacttctgaggtgaatcatgcttttcgaggctatttgacaatttcggctatagcttccccaggcttgctaccaacccagtccaactccaaggtttggaaaattctgtaaaaaaaatcaaaacaaactcgacatgagggaaactactcgaccaattgggtgcttgtagatgatataagtacatgttaagactaataagtagtgtataactaagatgttgtttggtccacgaaatataac

SEQ ID NO: 4382 - DNA, 588 bp, Zea Mays
accagccaacgctgtttcttcatcccaacgtcttcctcgcagcgccgccgctccatcttccgctctctcacttattactcgcgttcggcacgcgggcgacggcggcggcgcccaggctctcagcgacggcgcacaggctctggctctcagcgacggcgtcaacggcttcccctcccgcctctcgccagtcgcctcgctccctcgcctccggtcctccgcacaccgtccgttgatcctgcctcttctggttagatagatggaggtgccaatgaactctacgcaatctggtcctcacttccctgtgcagcatcagtccctctcattagacatcaagggaaataaaacagatattgttatcagtaaatatgaagatacctttctgctgattgtggcacaaatcggctgcatgggaaccatactagctgccaagaaagacgaaagtgttttctcggacccaacctacaatgtgtctgttctttttgggaagagaaatgagccactcctacaagcttgcgcacgtcaacttattgagcacataagacgtgttgaacaagcattctggatttcccttcatctggccagtcaaag

SEQ ID NO: 4383 - DNA, 1979 bp, Zea Mays
accagccaacgctgtttcttcatcccaacgtcttcctcgcagcgccgccgctccatcttccgctctctcacttattactcgcgttcggcacgcgggcgacggcggcggcgcccaggctctcagcgacggcgcacaggctctggctctcagcgacggcgtcaacggcttcccctcccgcctctcgccagtcgcctcgctccctcgcctccggtcctccgcacaccgtccgttgatcctgcctcttctggttagatagatggaggtgccaatgaactctacgcaatctggtcctcacttccctgtgcagcatcagtccctctcattagacatcaagggaaataaaacagatattgttatcagtaaatatgaagatacctttctgctgattgtggcacaaatcggctgcatgggaaccatactagctgccaagtacgcttgtttctttctaggcaaattcgttctcctaagcatgtaaaattcagttttgttatttgcattattagttccgcataagtaactccatcgctatttctttcacaacacattgattattgaagttgtcattccgttcgatccttatgagtagtcaggccccctccacaaatattttcacagactcgatcatctagtagaaagatctgcgatatactgcagccacaagcatattagttcacaactggcagattgttcacatgtctaagcctgtatgcaagataatacctttattgctacctcagcaagtcagcattctagatgatatttgttcacaagcatatcaatttacaactggcagattgttgctcgctagatgttggctgtttgaaaacctaaactttcaatgttggaacttggttaatatgttaataatagttattccatcaccatattgtattgttagtttgttgcaaaaaaattgtgctgatcatgctattccctttccgaaccaaatgagggaaccgtgaacaagcaaggattgttttcatacaagttttcctagttttgcaacttacaactaaaataaacacctatatattattattattgcaatatatatacattttataacaaatttctatgtctgaaatgcgtgttggaatcagtgtgtcatatcttactatttgtaaggcctttgaatgacatttctacaaaaggtggaaagtcggtctctctggagattctagcttaagaatgatgaccttataaagttataatgaatgtaggcaaccatttttccttttaccttaaaactttgtatactatattttttcattaaatctttaactccacttgataggaaagacgaaagtgttttctcggacccaacctacaatgtgtctgttctttttgggaagagaaatgagccactcctacaagcttgcgcacgtcaacttattgagcacataagtggcagtggctcagctcggtcattggttatttctctgggtctgaaagatcattctcagggaacactgaaggatatcattgtagctgtgatcgagaatcgcctttggtgatgattgaataactgagctgggcatgggattgacatattcagcccatcgataaagatattgcttagcattgcgcaagaggagccatcgtttataccatgcactaaattctggtagttttgtagttagaccttctatctacttggattaacaaaaggtggctttaagctgctgtcaaaatttgagtgtcagctctcacgctaaacaaaaggcactgtatgctggtaaaacacttctgaggtgaatcatgcttttcgaggctatttgacaatttcggctatagcttccccaggcttgctaccaacccagtccaactccaaggtttggaaaattctgtaaaaaaaatcaaaacaaactcgacatgagggaaactactcgaccaattgggtgcttgtagatgatataagtacatgttaagactaataagtagtgtataactaagatgttgtttggtccacgaaatataac

SEQ ID NO: 4384 - DNA, 1109 bp, Zea Mays
accagccaacgctgtttcttcatcccaacgtcttcctcgcagcgccgccgctccatcttccgctctctcacttattactcgcgttcggcacgcgggcgacggcggcggcgcccaggctctcagcgacggcgcacaggctctggctctcagcgacggcgtcaacggcttcccctcccgcctctcgccagtcgcctcgctccctcgcctccggtcctccgcacaccgtccgttgatcctgcctcttctggttagatagatggaggtgccaatgaactctacgcaatctggtcctcacttccctgtgcagcatcagtccctctcattagacatcaagggaaataaaacagatattgttatcagtaaatatgaagatacctttctgctgattgtggcacaaatcggctgcatgggaaccatactagctgccaaacgaaagtgttttctcggacccaacctacaatgtgtctgttctttttgggaagagaaatgagccactcctacaagcttgcgcacgtcaacttattgagcacataagtggcagtggctcagctcggtcattggttatttctctgggtctgaaagatcattctcagggaacactgaaggatatcattgtagctgtgatcgagaatcgcctttggtgatgattgaataactgagctgggcatgggattgacatattcagcccatcgataaagatattgcttagcattgcgcaagaggagccatcgtttataccatgcactaaattctggtagttttgtagttagaccttctatctacttggattaacaaaaggtggctttaagctgctgtcaaaatttgagtgtcagctctcacgctaaacaaaaggcactgtatgctggtaaaacacttctgaggtgaatcatgcttttcgaggctatttgacaatttcggctatagcttccccaggcttgctaccaacccagtccaactccaaggtttggaaaattctgtaaaaaaaatcaaaacaaactcgacatgagggaaactactcgaccaattgggtgcttgtagatgatataagtacatgttaagactaataagtagtgtataactaagatgttgtttggtccacgaaatataac

SEQ ID NO: 4385 - DNA, 1212 bp, Zea Mays
accagccaacgctgtttcttcatcccaacgtcttcctcgcagcgccgccgctccatcttccgctctctcacttattactcgcgttcggcacgcgggcgacggcggcggcgcccaggctctcagcgacggcgcacaggctctggctctcagcgacggcgtcaacggcttcccctcccgcctctcgccagtcgcctcgctccctcgcctccggtcctccgcacaccgtccgttgatcctgcgtgcgtgcctctctctctcctcccgcctccggtggatcgtcaatggcgctcggacggcaatgggagccagcagccgctgctccaccaaggcggtcggctgctttgggagcgcttatgcccgaaatcgaagcgttacccggcctcttagcgcttcagcgcgctgaagcgtgcgcttagtgccgccatttggaaccctggttacaaccatgctcttctggttagatagatggaggtgccaatgaactctacgcaatctggtcctcacttccctgtgcagcatcagtccctctcattagacatcaagggaaataaaacagatattgttatcagtaaatatgaagatacctttctgctgattgtggcacaaatcggctgcatgggaaccatactagctgccaatggcagtggctcagctcggtcattggttatttctctgggtctgaaagatcattctcagggaacactgaaggatatcattgtagctgtgatcgagaatcgcctttggtgatgattgaataactgagctgggcatgggattgacatattcagcccatcgataaagatattgcttagcattgcgcaagaggagccatcgtttataccatgcactaaattctggtagttttgtagttagaccttctatctacttggattaacaaaaggtggctttaagctgctgtcaaaatttgagtgtcagctctcacgctaaacaaaaggcactgtatgctggtaaaacacttctgaggtgaatcatgcttttcgaggctatttgacaatttcggctatagcttccccaggcttgctaccaacccagtccaactccaaggtttggaaaattctgtaaaaaaaatcaaaacaaactcgacatgagggaaactactcgaccaattgggtgcttgtagatgatataagtacatgttaagactaataagtagtgtataactaagatgttgtttggtccacgaaatataac

SEQ ID NO: 4386 - DNA, 1151 bp, Zea Mays
ctgaattgtatattgcagtattggttaggcttaccctgccaccctgtgtccaccaatcttagcaaccctagtttgctccagtagtcggtttgttcccccatcagatgaatccaagtctttcatcgtcctctgattccagttagatgcgtatcttcttgctgcctgagaagtctactgagccatctcatccgtctcgggttgattagtctattcgtgttctgcacacataatacatctcggttggcactagacacagtatgatcaaccgaccttaatctcttctggttagatagatggaggtgccaatgaactctacgcaatctggtcctcacttccctgtgcagcatcagtccctctcattagacatcaagggaaataaaacagatattgttatcagtaaatatgaagatacctttctgctgattgtggcacaaatcggctgcatgggaaccatactagctgccaagaaagacgaaagtgttttctcggacccaacctacaatgtgtctgttctttttgggaagagaaatgagccactcctacaagcttgcgcacgtcaacttattgagcacataagtggcagtggctcagctcggtcattggttatttctctgggtctgaaagatcattctcagggaacactgaaggatatcattgtagctgtgatcgagaatcgcctttggtgatgattgaataactgagctgggcatgggattgacatattcagcccatcgataaagatattgcttagcattgcgcaagaggagccatcgtttataccatgcactaaattctggtagttttgtagttagaccttctatctacttggattaacaaaaggtggctttaagctgctgtcaaaatttgagtgtcagctctcacgctaaacaaaaggcactgtatgctggtaaaacacttctgaggtgaatcatgcttttcgaggctatttgacaatttcggctatagcttccccaggcttgctaccaacccagtccaactccaaggtttggaaaattctgtaaaaaaaatcaaaacaaactcgacatgagggaaactactcgaccaattgggtgcttgtagatgatataagtacatgttaagactaataagtagtgtataactaagatgttgtttggtccacgaaatataac

SEQ ID NO: 4387 - DNA, 1863 bp, Zea Mays
gtatcttcttgctgcctgagaagtctactgagccatctcatccgtctcgggttgattagtctattcgtgttctgcacacataatacatctcggttggcactagacacagtatgatcaaccgaccttaatctcttctggttagatagatggaggtgccaatgaactctacgcaatctggtcctcacttccctgtgcagcatcagtccctctcattagacatcaagggaaataaaacagatattgttatcagtaaatatgaagatacctttctgctgattgtggcacaaatcggctgcatgggaaccatactagctgccaagtacgcttgtttctttctaggcaaattcgttctcctaagcatgtaaaattcagttttgttatttgcattattagttccgcataagtaactccatcgctatttctttcacaacacattgattattgaagttgtcattccgttcgatccttatgagtagtcaggccccctccacaaatattttcacagactcgatcatctagtagaaagatctgcgatatactgcagccacaagcatattagttcacaactggcagattgttcacatgtctaagcctgtatgcaagataatacctttattgctacctcagcaagtcagcattctagatgatatttgttcacaagcatatcaatttacaactggcagattgttgctcgctagatgttggctgtttgaaaacctaaactttcaatgttggaacttggttaatatgttaataatagttattccatcaccatattgtattgttagtttgttgcaaaaaaattgtgctgatcatgctattccctttccgaaccaaatgagggaaccgtgaacaagcaaggattgttttcatacaagttttcctagttttgcaacttacaactaaaataaacacctatatattattattattgcaatatatatacattttataacaaatttctatgtctgaaatgcgtgttggaatcagtgtgtcatatcttactatttgtaaggcctttgaatgacatttctacaaaaggtggaaagtcggtctctctggagattctagcttaagaatgatgaccttataaagttataatgaatgtaggcaaccatttttccttttaccttaaaactttgtatactatattttttcattaaatctttaactccacttgataggaaagacgaaagtgttttctcggacccaacctacaatgtgtctgttctttttgggaagagaaatgagccactcctacaagcttgcgcacgtcaacttattgagcacataagtggctcagctcggtcattggttatttctctgggtctgaaagatcattctcagggaacactgaaggatatcattgtagctgtgatcgagaatcgcctttggtgatgattgaataactgagctgggcatgggattgacatattcagcccatcgataaagatattgcttagcattgcgcaagaggagccatcgtttataccatgcactaaattctggtagttttgtagttagaccttctatctacttggattaacaaaaggtggctttaagctgctgtcaaaatttgagtgtcagctctcacgctaaacaaaaggcactgtatgctggtaaaacacttctgaggtgaatcatgcttttcgaggctatttgacaatttcggctatagcttccccaggcttgctaccaacccagtccaactccaaggtttggaaaattctgtaaaaaaaatcaaaacaaactcgacatgagggaaactactcgaccaattgggtgcttgtagatgatataagtacatgttaagactaataagtagtgtataactaagatgttgtttggtccacgaaatataac

SEQ ID NO: 4388 - DNA, 611 bp, Zea Mays
ttccaacttcatcttcgtgcccgttgtcaagacgaagtggcagtggctcagctcggtcattggttatttctctgggtctgaaagatcattctcagggaacactgaaggatatcattgtagctgtgatcgagaatcgcctttggtgatgattgaataactgagctgggcatgggattgacatattcagcccatcgataaagatattgcttagcattgcgcaagaggagccatcgtttataccatgcactaaattctggtagttttgtagttagaccttctatctacttggattaacaaaaggtggctttaagctgctgtcaaaatttgagtgtcagctctcacgctaaacaaaaggcactgtatgctggtaaaacacttctgaggtgaatcatgcttttcgaggctatttgacaatttcggctatagcttccccaggcttgctaccaacccagtccaactccaaggtttggaaaattctgtaaaaaaaatcaaaacaaactcgacatgagggaaactactcgaccaattgggtgcttgtagatgatataagtacatgttaagactaataagtagtgtataactaagatgttgtttggtccacgaaatataac

SEQ ID NO: 4389 - DNA, 979 bp, Zea Mays
gtgcacgggcgagaagatggaggcgaggcgagtcactccatcacgctgcgcatgtcaccaaggaatggcctcccatctcgagcctagacttttcaacgaaggttatgcatttggcagcaggggaactcctggagattgtgcctcttggaaaaggcttctttcttgccaactatcctatttcaattttggattgaccattattgtttgcgttcctttgtcctccatcttttacctcttgtagttacacaagaacaacttgattgtgctaaagaggcaatcaaatctacagttctgatgaacttggaatcaagggctaaagtaacctgtctctgtttggtcattatgctctaggatccttcaacttgacatcacagcaatcgttgaggaggtaaccagcaacctcagctctgaaagaaccctagagtaaacactcacatcaagacactccactgttcactcttgggctgctcctaccaatgaagcaagagcatctccacctggcaatggtccactcgtattcatcactaagtcagctcgattccaccaattggtgttcatgctgttggatggcaaatgacaacccctctttgcatcctgtagtgtttcgcctttctaatatttctgtttgctcccagcggcttgaacccctacaagtgcacctggcattggttaccaatcagcagattcataacatctcatgaaaaggatatgtgttggacaaccagataaggtattacagagaatatgaataatctggaggttctgctgatgcatgtaaattatggaattatggtttcaattctagattatttgagaatggcacctctatatgctcattgggcaatgatcagaaagttggagatcatagaaatactgagaacggtgaatcttgtttacatttatgggcacttttgaaaagaaattattttgtatggtagtattgttgaaaagatcaataattttagaggatttgatgatc

SEQ ID NO: 4390 - DNA, 980 bp, Zea Mays
gtgcacgggcgagaagatggaggcgaggcgagtcactccatcacgctgcgcatgtcaccaaggaatggcctcccatctcgagcctagacttttcaacgaaggttatgcatttggcagcaggggaactcctggagattgtgcctcttggaaaaggcttctttcttgccaactatcctatttcaattttggattgaccattattgtttgcgttcctttgtcctccatcttttacctcttgtagttacacaagaacaacttgattgtgctaaagaggcaatcaaatctacagttctgatgaacttggaatcaagggctaaagtaacctgtctctgtttggtcattatgctctaggatccttcaacttgacatcacagcaatcgttgaggagtgtaaccagcaacctcagctctgaaagaaccctagagtaaacactcacatcaagacactccactgttcactcttgggctgctcctaccaatgaagcaagagcatctccacctggcaatggtccactcgtattcatcactaagtcagctcgattccaccaattggtgttcatgctgttggatggcaaatgacaacccctctttgcatcctgtagtgtttcgcctttctaatatttctgtttgctcccagcggcttgaacccctacaagtgcacctggcattggttaccaatcagcagattcataacatctcatgaaaaggatatgtgttggacaaccagataaggtattacagagaatatgaataatctggaggttctgctgatgcatgtaaattatggaattatggtttcaattctagattatttgagaatggcacctctatatgctcattgggcaatgatcagaaagttggagatcatagaaatactgagaacggtgaatcttgtttacatttatgggcacttttgaaaagaaattattttgtatggtagtattgttgaaaagatcaataattttagaggatttgatgatc

SEQ ID NO: 4391 - DNA, 1740 bp, Zea Mays
aaacgtggtctggattcaatatgttcccgaccaattaaaaaaaattagcacaatagatcacctacctttctcacccttcatccaacggcgccagcacgcacgagcagtgcgccgccatccgttgcgccgtcgtacgcagccagctggagcgccgcttcccgccagccagccggagcgccgccgcccgcgagagtcccgcccccggcgtgtatcagaaccccccccccctccccggcgccgcgcagcagagctccgtggcccccgccctcgccgagcagcagagggccgcctccagccagctcgccggctatggctgccgctggagatccaccacctcctatttatgctgagggtgctgcaaggacaagaggagaaatatctccacatttccagacatatgcaagggacgacgatgcaaaacttgagaccacacgtgcaaggctgtcaaatatcctcaaaaggcatgaagatctgaaagagcgcctttcacgggattctgataagctcatttttgagcgcctacagaaagaatttgaggctgcacgggctgctcaaaccgaagagatatcaataaatgatgatgagtggaatgatggtttactggcaaccatccgtgagaaggttcatatggaggctgataggaaggccatgtccaaccaagtaaatgttccagcagatctttcatttcaatcaaggactacatataggattagaaataaggttatatattgcttggatggagctaggattggcatacagtatgagacattctttgctggagagccttgtgaaatttttcattgtgttttggaaagcaagtcattcctggaaaagatgattatgattgaacacaccttacctttctttctgcctgtacgtgaattagaaagtgatctgttgtcatctaattcaattaaattcattgatcatcttgaagaaattttacaggcttatattgacaggagagagcaggttcgtcttatcaaggagctctacgggaaccaaattggcgagctgttccatagtcttccttataatatgatagagtttgtattggaggattttgagtgcaaggttacaatcagtatccgatattcggatctactgcagaccctgccgagtcaggcaagggtcttggcttggccacttcgctcggccaagaaaatatctacaagaagcagcagtgcatcagctgcgcaaccagtaccctttcacctttcatatgccgaggaagcactcaaaaccttgtgtctaccagaagcatacgcagacattgtgctggagctaccccatgctttgaagaggattttatcctctcgggacagtgactaaatcgtgacctcaagatgtccagttttgttgtgcataagattcacatctcaatcgtggggcatgtttttgaagatattgttcagaatcttgtggtagtatagcctgcagttgtggactgcaattcctgtgaaagcaaggcagacatttgcgtgggccgctcgaaatattccggctacagttcctgttaaaagaatcaaaatcctaggaaggccttatggtcgaggcataatcttgccaactgctgtccttgtccttgatgtgtgctccttttttttctccactctggctatgtttgtttccttttagaattatactagcgcgttacgcgcgcctgcacgcgcgtgttgacaaacctattttatttcaaatatcaagtatctaagaagacatgctaaaatttcaacaata

SEQ ID NO: 4392 - DNA, 1927 bp, Zea Mays
aaaaaattagcacaatagatcacctacctttctcacccttcatccaacggcgccagcacgcacgagcagtgcgccgccatccgttgcgccgtcgtacgcagccagctggagcgccgcttcccgccagccagccggagcgccgccgcccgcgagagtcccgcccccggcgtgtatcagaaccccccccccctccccggcgccgcgcagcagagctccgtggcccccgccctcgccgagcagcagagggccgcctccagccagctcgccggctatggctgccgctggagatccaccacctcctatttatgctgagggtgctgcaaggacaagaggagaaatatctccacatttccagacatatgcaagggacgacgatgcaaaacttgagaccacacgtgcaaggctgtcaaatatcctcaaaaggcatgaagatctgaaagagcgcctttcacgggattctgataagctcatttttgagcgcctacagaaagaatttgaggctgcacgggctgctcaaaccgaagagatatcaataaatgatgatgagtggaatgatggtttactggcaaccatccgtgagaaggttcatatggaggctgataggaaggccatgtccaaccaagtaaatgttccagcagatctttcatttcaatcaaggactacatataggattagaaataaggttatatattgcttggatggagctaggattggcatacagtatgagacattctttgctggagagccttgtgaaatttttcattgtgttttggaaagcaagtcattcctggaaaagatgattatgattgaacacaccttacctttctttctgcctgtacgtgaattagaaagtgatctgttgtcatctaattcaattaaattcattgatcatcttgaagaaattttacaggcttatattgacaggagagagcaggttcgtcttatcaaggagctctacgggaaccaaattggcgagctgttccatagtcttccttataatatgatagagtttgtattggaggattttgagtggtaaggataatatttaattactgctaatgcttggattgcatcaataagttctgttttgttgctagtacactccctcatagaatatgtacacctagtgcagccttctatttttgttatcttgcagcgtgcatgctgaatatcgcatactgattttaagctgctaatatgcataagtagcttgttgcacattttgtagagattgatctgtttgccacttataagcagcaaggttacaatcagtatccgatattcggatctactgcagaccctgccgagtcaggcaagggtcttggcttggccacttcgctcggccaagaaaatatctacaagaagcagcagtgcatcagctgcgcaaccagtaccctttcacctttcatatgccgaggaagcactcaaaaccttgtgtctaccagaagcatacgcagacattgtgctggagctaccccatgctttgaagaggattttatcctctcgggacagtgactaaatcgtgacctcaagatgtccagttttgttgtgcataagattcacatctcaatcgtggggcatgtttttgaagatattgttcagaatcttgtggtagtatagcctgcagttgtggactgcaattcctgtgaaagcaaggcagacatttgcgtgggccgctcgaaatattccggctacagttcctgttaaaagaatcaaaatcctaggaaggccttatggtcgaggcataatcttgccaactgctgtccttgtccttgatgtgtgctccttttttttctccactctggctatgtttgtttccttttagaattatactagcgcgttacgcgcgcctgcacgcgcgtgttgacaaacctattttatttcaaatatcaagtatctaagaagacatgctaaaatttcaacaata

SEQ ID NO: 4393 - DNA, 717 bp, Zea Mays
acaatagatcacctacctttctcacccttcatccaacggcgccagcacgcacgagcagtgcgccgccatccgttgcgccgtcgtacgcagccagctggagcgccgcttcccgccagccagccggagcgccgccgcccgcgagagtcccgcccccggcgtgtatcagaaccccccccccctccccggcgccgcgcagcagagctccgtggcccccgccctcgccgagcagcagagggccgcctccagccagctcgccggctatggctgccgctggagatccaccacctcctatttatgctgagggtgctgcaaggacaagaggagaaatatctccacatttccagacatatgcaagggacgacgatgcaaaacttgagaccacacgtgcaaggctgtcaaatatcctcaaaaggcatgaagatctgaaagagcgcctttcacgggattctgataagctcatttttgagcgcctacagaaagaatttgaggctgcacgggctgctcaaaccgaagagatatcaataaatgatgatgagtggaatgatggtttactggcaaccatccgtgagaaggttcatatggaggctgataggaaggccatgtccaaccaagtaaatgttccagcagatctttcatttcaatcaaggactacatataggattagaaataaggttatatattgcttggatggagctaggattggcatacagagagctg

SEQ ID NO: 4394 - DNA, 1671 bp, Zea Mays
acaatagatcacctacctttctcacccttcatccaacggcgccagcacgcacgagcagtgcgccgccatccgttgcgccgtcgtacgcagccagctggagcgccgcttcccgccagccagccggagcgccgccgcccgcgagagtcccgcccccggcgtgtatcagaaccccccccccctccccggcgccgcgcagcagagctccgtggcccccgccctcgccgagcagcagagggccgcctccagccagctcgccggctatggctgccgctggagatccaccacctcctatttatgctgagggtgctgcaaggacaagaggagaaatatctccacatttccagacatatgcaagggacgacgatgcaaaacttgagaccacacgtgcaaggctgtcaaatatcctcaaaaggcatgaagatctgaaagagcgcctttcacgggattctgataagctcatttttgagcgcctacagaaagaatttgaggctgcacgggctgctcaaaccgaagagatatcaataaatgatgatgagtggaatgatggtttactggcaaccatccgtgagaaggttcatatggaggctgataggaaggccatgtccaaccaagtaaatgttccagcagatctttcatttcaatcaaggactacatataggattagaaataaggttatatattgcttggatggagctaggattggcatacagagagccttgtgaaatttttcattgtgttttggaaagcaagtcattcctggaaaagatgattatgattgaacacaccttacctttctttctgcctgtacgtgaattagaaagtgatctgttgtcatctaattcaattaaattcattgatcatcttgaagaaattttacaggcttatattgacaggagagagcaggttcgtcttatcaaggagctctacgggaaccaaattggcgagctgttccatagtcttccttataatatgatagagtttgtattggaggattttgagtgcaaggttacaatcagtatccgatattcggatctactgcagaccctgccgagtcaggcaagggtcttggcttggccacttcgctcggccaagaaaatatctacaagaagcagcagtgcatcagctgcgcaaccagtaccctttcacctttcatatgccgaggaagcactcaaaaccttgtgtctaccagaagcatacgcagacattgtgctggagctaccccatgctttgaagaggattttatcctctcgggacagtgactaaatcgtgacctcaagatgtccagttttgttgtgcataagattcacatctcaatcgtggggcatgtttttgaagatattgttcagaatcttgtggtagtatagcctgcagttgtggactgcaattcctgtgaaagcaaggcagacatttgcgtgggccgctcgaaatattccggctacagttcctgttaaaagaatcaaaatcctaggaaggccttatggtcgaggcataatcttgccaactgctgtccttgtccttgatgtgtgctccttttttttctccactctggctatgtttgtttccttttagaattatactagcgcgttacgcgcgcctgcacgcgcgtgttgacaaacctattttatttcaaatatcaagtatctaagaagacatgctaaaatttcaacaata

SEQ ID NO: 4395 - DNA, 1692 bp, Zea Mays
acaatagatcacctacctttctcacccttcatccaacggcgccagcacgcacgagcagtgcgccgccatccgttgcgccgtcgtacgcagccagctggagcgccgcttcccgccagccagccggagcgccgccgcccgcgagagtcccgcccccggcgtgtatcagaaccccccccccctccccggcgccgcgcagcagagctccgtggcccccgccctcgccgagcagcagagggccgcctccagccagctcgccggctatggctgccgctggagatccaccacctcctatttatgctgagggtgctgcaaggacaagaggagaaatatctccacatttccagacatatgcaagggacgacgatgcaaaacttgagaccacacgtgcaaggcgtgtcaaatatcctcaaaaggcatgaagatctgaaagagcgcctttcacgggattctgataagctcatttttgagcgcctacagaaagaatttgaggctgcacgggctgctcaaaccgaagagatatcaataaatgatgatgagtggaatgatggtttactggcaaccatccgtgagaaggttcatatggaggctgataggaaggccatgtccaaccaagtaaatgttccagcagatctttcatttcaatcaaggactacatataggattagaaataaggttatatattgcttggatggagctaggattggcatacagtatgagacattctttgctggagagccttgtgaaatttttcattgtgttttggaaagcaagtcattcctggaaaagatgattatgattgaacacaccttacctttctttctgcctgtacgtgaattagaaagtgatctgttgtcatctaattcaattaaattcattgatcatcttgaagaaattttacaggcttatattgacaggagagagcaggttcgtcttatcaaggagctctacgggaaccaaattggcgagctgttccatagtcttccttataatatgatagagtttgtattggaggattttgagtgcaaggttacaatcagtatccgatattcggatctactgcagaccctgccgagtcaggcaagggtcttggcttggccacttcgctcggccaagaaaatatctacaagaagcagcagtgcatcagctgcgcaaccagtaccctttcacctttcatatgccgaggaagcactcaaaaccttgtgtctaccagaagcatacgcagacattgtgctggagctaccccatgctttgaagaggattttatcctctcgggacagtgactaaatcgtgacctcaagatgtccagttttgttgtgcataagattcacatctcaatcgtggggcatgtttttgaagatattgttcagaatcttgtggtagtatagcctgcagttgtggactgcaattcctgtgaaagcaaggcagacatttgcgtgggccgctcgaaatattccggctacagttcctgttaaaagaatcaaaatcctaggaaggccttatggtcgaggcataatcttgccaactgctgtccttgtccttgatgtgtgctccttttttttctccactctggctatgtttgtttccttttagaattatactagcgcgttacgcgcgcctgcacgcgcgtgttgacaaacctattttatttcaaatatcaagtatctaagaagacatgctaaaatttcaacaata

SEQ ID NO: 4396 - DNA, 1548 bp, Zea Mays
acaatagatcacctacctttctcacccttcatccaacggcgccagcacgcacgagcagtgcgccgccatccgttgcgccgtcgtacgcagccagctggagcgccgcttcccgccagccagccggagcgccgccgcccgcgagagtcccgcccccggcgtgtatcagaaccccccccccctccccggcgccgcgcagcagagctccgtggcccccgccctcgccgagcagcagagggccgcctccagccagctcgccggctatggctgccgctggagatccaccacctcctatttatgctgagggtgctgcaaggacaagaggagaaatatctccacatttccagacatatgcaagggacgacgatgcaaaacttgagaccacacgtgcaaggctgtcaaatatcctcaaaaggcatgaagatctgaaagagcgcctttcacgggattctgataagctcatttttgagcgcctacagaaagaatttgaggctgcacgggctgctcaaaccgaagagatatcaataaatgatgatgagtggaatgatggtttactggcaaccatccgtgagaaggttcatatggaggctgataggaaggccatgtccaaccaagtaaatgttccagcagatctttcatttcaatcaaggactacatataggattagaaataaggtagcatgtgctccccagatcattgcctttttcatagctttgtacctggttatatattgcttggatggagctaggattggcatacagtatgagacattctttgctggagagccttgtgaaatttttcattgtgttttggaaagcaagtcattcctggaaaagatgattatgattgaacacaccttacctttctttctgcctgtacgtgaattagaaagtgatctgttgtcatctaattcaattaaattcattgatcatcttgaagaaattttacaggcttatattgacaggagagagcaggttcgtcttatcaaggagctctacgggaaccaaattggcgagctgttccatagtcttccttataatatgatagagtttgtattggaggattttgagtgcatacgcagacattgtgctggagctaccccatgctttgaagaggattttatcctctcgggacagtgactaaatcgtgacctcaagatgtccagttttgttgtgcataagattcacatctcaatcgtggggcatgtttttgaagatattgttcagaatcttgtggtagtatagcctgcagttgtggactgcaattcctgtgaaagcaaggcagacatttgcgtgggccgctcgaaatattccggctacagttcctgttaaaagaatcaaaatcctaggaaggccttatggtcgaggcataatcttgccaactgctgtccttgtccttgatgtgtgctccttttttttctccactctggctatgtttgtttccttttagaattatactagcgcgttacgcgcgcctgcacgcgcgtgttgacaaacctattttatttcaaatatcaagtatctaagaagacatgctaaaatttcaacaata

SEQ ID NO: 4397 - DNA, 1700 bp, Zea Mays
acaatagatcacctacctttctcacccttcatccaacggcgccagcacgcacgagcagtgcgccgccatccgttgcgccgtcgtacgcagccagctggagcgccgcttcccgccagccagccggagcgccgccgcccgcgagagtcccgcccccggcgtgtatcagaaccccccccccctccccggcgccgcgcagcagagctccgtggcccccgccctcgccgagcagcagagggccgcctccagccagctcgccggctatggctgccgctggagatccaccacctcctatttatgctgagggtgctgcaaggacaagaggagaaatatctccacatttccagacatatgcaagggacgacgatgcaaaacttgagaccacacgtgcaaggctgtcaaatatcctcaaaaggcatgaagatctgaaagagcgcctttcacgggattctgataagctcatttttgagcgcctacagaaagaatttgaggctgcacgggctgctcaaaccgaagagatatcaataaatgatgatgagtggaatgatggtttactggcaaccatccgtgagaaggtatttaatgttcatatggaggctgataggaaggccatgtccaaccaagtaaatgttccagcagatctttcatttcaatcaaggactacatataggattagaaataaggttatatattgcttggatggagctaggattggcatacagtatgagacattctttgctggagagccttgtgaaatttttcattgtgttttggaaagcaagtcattcctggaaaagatgattatgattgaacacaccttacctttctttctgcctgtacgtgaattagaaagtgatctgttgtcatctaattcaattaaattcattgatcatcttgaagaaattttacaggcttatattgacaggagagagcaggttcgtcttatcaaggagctctacgggaaccaaattggcgagctgttccatagtcttccttataatatgatagagtttgtattggaggattttgagtgcaaggttacaatcagtatccgatattcggatctactgcagaccctgccgagtcaggcaagggtcttggcttggccacttcgctcggccaagaaaatatctacaagaagcagcagtgcatcagctgcgcaaccagtaccctttcacctttcatatgccgaggaagcactcaaaaccttgtgtctaccagaagcatacgcagacattgtgctggagctaccccatgctttgaagaggattttatcctctcgggacagtgactaaatcgtgacctcaagatgtccagttttgttgtgcataagattcacatctcaatcgtggggcatgtttttgaagatattgttcagaatcttgtggtagtatagcctgcagttgtggactgcaattcctgtgaaagcaaggcagacatttgcgtgggccgctcgaaatattccggctacagttcctgttaaaagaatcaaaatcctaggaaggccttatggtcgaggcataatcttgccaactgctgtccttgtccttgatgtgtgctccttttttttctccactctggctatgtttgtttccttttagaattatactagcgcgttacgcgcgcctgcacgcgcgtgttgacaaacctattttatttcaaatatcaagtatctaagaagacatgctaaaatttcaacaata

SEQ ID NO: 4398 - DNA, 1696 bp, Zea Mays
acaatagatcacctacctttctcacccttcatccaacggcgccagcacgcacgagcagtgcgccgccatccgttgcgccgtcgtacgcagccagctggagcgccgcttcccgccagccagccggagcgccgccgcccgcgagagtcccgcccccggcgtgtatcagaaccccccccccctccccggcgccgcgcagcagagctccgtggcccccgccctcgccgagcagcagagggccgcctccagccagctcgccggctatggctgccgctggagatccaccacctcctatttatgctgagggtgctgcaaggacaagaggagaaatatctccacatttccagacatatgcaagggacgacgatgcaaaacttgagaccacacgtgcaaggctgtcaaatatcctcaaaaggcatgaagatctgaaagagcgcctttcacgggattctgataagctcatttttgagcgcctacagaaagaatttgaggctgcacgggctgctcaaaccgaagagatatcaataaatgatgatgagtggaatgatggtttactggcaaccatccgtgagaagaccaggttcatatggaggctgataggaaggccatgtccaaccaagtaaatgttccagcagatctttcatttcaatcaaggactacatataggattagaaataaggttatatattgcttggatggagctaggattggcatacagtatgagacattctttgctggagagccttgtgaaatttttcattgtgttttggaaagcaagtcattcctggaaaagatgattatgattgaacacaccttacctttctttctgcctgtacgtgaattagaaagtgatctgttgtcatctaattcaattaaattcattgatcatcttgaagaaattttacaggcttatattgacaggagagagcaggttcgtcttatcaaggagctctacgggaaccaaattggcgagctgttccatagtcttccttataatatgatagagtttgtattggaggattttgagtgcaaggttacaatcagtatccgatattcggatctactgcagaccctgccgagtcaggcaagggtcttggcttggccacttcgctcggccaagaaaatatctacaagaagcagcagtgcatcagctgcgcaaccagtaccctttcacctttcatatgccgaggaagcactcaaaaccttgtgtctaccagaagcatacgcagacattgtgctggagctaccccatgctttgaagaggattttatcctctcgggacagtgactaaatcgtgacctcaagatgtccagttttgttgtgcataagattcacatctcaatcgtggggcatgtttttgaagatattgttcagaatcttgtggtagtatagcctgcagttgtggactgcaattcctgtgaaagcaaggcagacatttgcgtgggccgctcgaaatattccggctacagttcctgttaaaagaatcaaaatcctaggaaggccttatggtcgaggcataatcttgccaactgctgtccttgtccttgatgtgtgctccttttttttctccactctggctatgtttgtttccttttagaattatactagcgcgttacgcgcgcctgcacgcgcgtgttgacaaacctattttatttcaaatatcaagtatctaagaagacatgctaaaatttcaacaata

SEQ ID NO: 4399 - DNA, 1259 bp, Zea Mays
ctcactgagcactttcatgctttgtaaaactactattctacttcatatttttgtttttactttagggattctgataagctcatttttgagcgcctacagaaagaatttgaggctgcacgggctgctcaaaccgaagagatatcaataaatgatgatgagtggaatgatggtttactggcaaccatccgtgagaagaccaggttcatatggaggctgataggaaggccatgtccaaccaagttatatattgcttggatggagctaggattggcatacagtatgagacattctttgctggagagccttgtgaaatttttcattgtgttttggaaagcaagtcattcctggaaaagatgattatgattgaacacaccttacctttctttctgcctgtacgtgaattagaaagtgatctgttgtcatctaattcaattaaattcattgatcatcttgaagaaattttacaggcttatattgacaggagagagcaggttcgtcttatcaaggagctctacgggaaccaaattggcgagctgttccatagtcttccttataatatgatagagtttgtattggaggattttgagtgcaaggttacaatcagtatccgatattcggatctactgcagaccctgccgagtcaggcaagggtcttggcttggccacttcgctcggccaagaaaatatctacaagaagcagcagtgcatcagctgcgcaaccagtaccctttcacctttcatatgccgaggaagcactcaaaaccttgtgtctaccagaagcatacgcagacattgtgctggagctaccccatgctttgaagaggattttatcctctcgggacagtgactaaatcgtgacctcaagatgtccagttttgttgtgcataagattcacatctcaatcgtggggcatgtttttgaagatattgttcagaatcttgtggtagtatagcctgcagttgtggactgcaattcctgtgaaagcaaggcagacatttgcgtgggccgctcgaaatattccggctacagttcctgttaaaagaatcaaaatcctaggaaggccttatggtcgaggcataatcttgccaactgctgtccttgtccttgatgtgtgctccttttttttctccactctggctatgtttgtttccttttagaattatactagcgcgttacgcgcgcctgcacgcgcgtgttgacaaacctattttatttcaaatatcaagtatctaagaagacatgctaaaatttcaacaata

SEQ ID NO: 4400 - DNA, 1128 bp, Zea Mays
ctcactgagcactttcatgctttgtaaaactactattctacttcatatttttgtttttactttagggattctgataagctcatttttgagcgcctacagaaagaatttgaggctgcacgggctgctcaaaccgaagagatatcaataaatgatgatgagtggaatgatggtttactggcaaccatccgtgagaagaccaggttcatatggaggctgataggaaggccatgtccaaccaagtaaatgttccagcagatctttcatttcaatcaaggactacatataggattagaaataaggttatatattgcttggatggagctaggattggcatacagtatgagacattctttgctggagagccttgtgaaatttttcattgtgttttggaaagcaagtcattcctggaaaagatgattatgattgaacacaccttacctttctttctgcctgtacgtgaattagaaagtgatctgttgtcatctaattcaattaaattcattgatcatcttgaagaaattttacaggcttatattgacaggagagagcaggttcgtcttatcaaggagctctacgggaaccaaattggcgagctgttccatagtcttccttataatatgatagagtttgtattggaggattttgagtgcatacgcagacattgtgctggagctaccccatgctttgaagaggattttatcctctcgggacagtgactaaatcgtgacctcaagatgtccagttttgttgtgcataagattcacatctcaatcgtggggcatgtttttgaagatattgttcagaatcttgtggtagtatagcctgcagttgtggactgcaattcctgtgaaagcaaggcagacatttgcgtgggccgctcgaaatattccggctacagttcctgttaaaagaatcaaaatcctaggaaggccttatggtcgaggcataatcttgccaactgctgtccttgtccttgatgtgtgctccttttttttctccactctggctatgtttgtttccttttagaattatactagcgcgttacgcgcgcctgcacgcgcgtgttgacaaacctattttatttcaaatatcaagtatctaagaagacatgctaaaatttcaacaata

SEQ ID NO: 4401 - DNA, 1315 bp, Zea Mays
ctcactgagcactttcatgctttgtaaaactactattctacttcatatttttgtttttactttagggattctgataagctcatttttgagcgcctacagaaagaatttgaggctgcacgggctgctcaaaccgaagagatatcaataaatgatgatgagtggaatgatggtttactggcaaccatccgtgagaagaccaggttcatatggaggctgataggaaggccatgtccaaccaagtaaatgttccagcagatctttcatttcaatcaaggactacatataggattagaaataaggttatatattgcttggatggagctaggattggcatacagtatgagacattctttgctggagagccttgtgaaatttttcattgtgttttggaaagcaagtcattcctggaaaagatgattatgattgaacacaccttacctttctttctgcctgtacgtgaattagaaagtgatctgttgtcatctaattcaattaaattcattgatcatcttgaagaaattttacaggcttatattgacaggagagagcaggttcgtcttatcaaggagctctacgggaaccaaattggcgagctgttccatagtcttccttataatatgatagagtttgtattggaggattttgagtggttacaatcagtatccgatattcggatctactgcagaccctgccgagtcaggcaagggtcttggcttggccacttcgctcggccaagaaaatatctacaagaagcagcagtgcatcagctgcgcaaccagtaccctttcacctttcatatgccgaggaagcactcaaaaccttgtgtctaccagaagcatacgcagacattgtgctggagctaccccatgctttgaagaggattttatcctctcgggacagtgactaaatcgtgacctcaagatgtccagttttgttgtgcataagattcacatctcaatcgtggggcatgtttttgaagatattgttcagaatcttgtggtagtatagcctgcagttgtggactgcaattcctgtgaaagcaaggcagacatttgcgtgggccgctcgaaatattccggctacagttcctgttaaaagaatcaaaatcctaggaaggccttatggtcgaggcataatcttgccaactgctgtccttgtccttgatgtgtgctccttttttttctccactctggctatgtttgtttccttttagaattatactagcgcgttacgcgcgcctgcacgcgcgtgttgacaaacctattttatttcaaatatcaagtatctaagaagacatgctaaaatttcaacaata

SEQ ID NO: 4402 - DNA, 1345 bp, Zea Mays
ctttttcatagctttgtacctggttatatattgcttggatggagctaggattggcatacagtatgagacattctttgctggagagccttgtgaaatttttcattgtgttttggaaagcaagtcattcctggaaaagatgattatgattgaacacaccttacctttctttctgcctgtacgtgaattagaaagtgatctgttgtcatctaattcaattaaattcattgatcatcttgaagaaattttacaggcttatattgacaggagagagcaggttcgtcttatcaaggagctctacgggaaccaaattggcgagctgttccatagtcttccttataatatgatagagtttgtattggaggattttgagtggtaaggataatatttaattactgctaatgcttggattgcatcaataagttctgttttgttgctagtacactccctcatagaatatgtacacctagtgcagccttctatttttgttatcttgcagcgtgcatgctgaatatcgcatactgattttaagctgctaatatgcataagtagcttgttgcacattttgtagagattgatctgtttgccacttataagcagcaaggttacaatcagtatccgatattcggatctactgcagaccctgccgagtcaggcaagggtcttggcttggccacttcgctcggccaagaaaatatctacaagaagcagcagtgcatcagctgcgcaaccagtaccctttcacctttcatatgccgaggaagcactcaaaaccttgtgtctaccagaaggtgcttcctgtcaccttggcttacagcatacatggctttgtgctgaattgatctgtttctccctgttctgtgtttcagcatacgcagacattgtgctggagctaccccatgctttgaagaggattttatcctctcgggacagtgactaaatcgtgacctcaagatgtccagttttgttgtgcataagattcacatctcaatcgtggggcatgtttttgaagatattgttcagaatcttgtggtagtatagcctgcagttgtggactgcaattcctgtgaaagcaaggcagacatttgcgtgggccgctcgaaatattccggctacagttcctgttaaaagaatcaaaatcctaggaaggccttatggtcgaggcataatcttgccaactgctgtccttgtccttgatgtgtgctccttttttttctccactctggctatgtttgtttccttttagaattatactagcgcgttacgcgcgcctgcacgcgcgtgttgacaaacctattttatttcaaatatcaagtatctaagaagacatgctaaaatttcaacaata

SEQ ID NO: 4403 - DNA, 1965 bp, Zea Mays
aaatagtccaagcgcgaggcgagcacacggacagaggatagagaaaacagagtgcgacgccgacgaagagagagacagagagcaaaacccaaaccctaacaatcatttgcagcccccggcgtctcgagaacctccaaggaaccatccacaggagaaggcgcgagcgcgggtgtttggatcgggggaggcaacgctggcggctcgcggcggcagcaggtaccgataaaaattctggagaaacttggtttgaagttggacgctcacgaacatatacaccaactgctgatgatattggacatgcactaaagtttgagtgcgtagctgtggattcagaaaaaaagtctccaattggaccctcaacctcaatcatgacatcacgtgtaattcccgcgccaactcctacccctcgccgccttatccaagtgaatggggatgttttaggtcacttggatttagacagccaaatttcgtccttagggacattcactgtgttatcctacaatattcttgctgatgcatatgctacaactgatgcatatagctactgcccaacatgggcacttacctggaattatagaagacaaaatttgctgcgtgaaattattggttatcatgctgatatcatctgtctacaggaggtacaagtaaaccatttcgaagattttttttcacctgagcttgacaaacatggatatcaggcgctttacaagaaaaggacaacagaggtgtattctggaaatcctatggccatagatggatgtgctactttttttcgtagagacaagttttcacatgttaaaaaatacgaggttgagttcaataaggctgcacagtctttaacagatgctattattcctgctgcccagaaaagagtggctttaagtcgattgattaaagacaacattgcactaattgcggttttagaagccaaatttggtaatcatggagctgaaaatcctggtaaaagacagctcctttgtgtggcaaatacacatataaatgtccatcaagacctaaaagatgtgaagctatgggaggttcataccctcctaaaaggattggagaagatagctgtcagtgcagacattcctatgttggtctgtggagatttcaactcaacccctgggagttctccacatgcgcttctggcaatgggcaaagttgatcagcatcatccagatctggcaatagacccccttggaattttacgccctccaagcaagttgaatcaccagcttcctttggtcagtgcatactctgcatttgcaagaatggtaggtgttggctatgatttggagcatcagcggaggacagaccctgcaacaaatgaaccactcttcacaaattgcacaagagattttactggaactattgattacatattttacacagcggactcattgacagtggattcattattggaacttttggatgaagaaagcttaagaaaagacacagctctcccatcccctgaatggtcatcagatcacatagcactcttagctgagttccggtgcaagccaagaatcagacgttgacacattaggtcttgtagaaaaggtcattgtcatcatccttggtggtggaacaccgttccatgtgggaacttgaggcagggcgggaacgcgggctctcggggaagcaaacaaccaagcagcctcaggaaggggaagaggcttgtaacatttgatttttaccctcctacatttgagctcatgatacttaagatgcccctgtgtaccattactttctatagaagaaaaatacttgagagaaatatttgaagggttataaggcccgtttttcttttttgttcactgcggtcgcgttcgattccttttggctgtgtccatgctcgctgcctacaatacgcagccacgcaggagtcctcgacttctgtaaattctgtaccaatgtaataccagttccagtttttgttttccacaatgttgctggcgctggctc

SEQ ID NO: 4404 - DNA, 2570 bp, Zea Mays
agcacacggacagaggatagagaaaacagagtgcgacgccgacgaagagagagacagagagcaaaacccaaaccctaacaatcatttgcagcccccggcgtctcgagaacctccaaggaaccatccacaggagaaggcgcgagcgcgggtgtttggatcgggggaggcaacgctggcggctcgcggcggcagcaggtgatggcggatccgcctagcggtgggggatctagggcttgtgtctgcagggagagacaggtcgaggaggcagaggcgggtctggggctcgggagaagagaacaggggaggaaggagggaggatgctgagcgtggttcgggtacacctgccgtcggagatcccgatcgtgggctgcgagatcacgccgtacgtgctactgcggcggcccgacggtgcagtctccaccaacgatgtccccgaaaccgcgcccgctgatggccagttcatgcggtacagatggtatcgcatacagagcgaccggaaagtccctatctgcagtgtgcatccaatggaacaagcaactattcagtgcctcggttgtctcaagtcaaaaatacctgttgctaagagctaccactgttcagccaaatgcttctctgatgcatggcagcaccacaaagttttgcatgaacgagctagtagtgctctaaatgaaaatggggctgaagaagaggagttatttggcagatttggcagtggtggttctggggttctaagtactgctggatctggttctttgtcaaattttggacaaagccctggtgttaataatggacctgtgcctttctatccctcaggtaccgataaaaattctggagaaacttggtttgaagttggacgctcacgaacatatacaccaactgctgatgatattggacatgcactaaagtttgagtgcgtagctgtggattcagaaaaaaagtctccaattggaccctcaacctcaatcatgacatcacgtgtaattcccgcgccaactcctacccctcgccgccttatccaagtgaatggggatgttttaggtcacttggatttagacagccaaatttcgtccttagggacattcactgtgttatcctacaatattcttgctgatgcatatgctacaactgatgcatatagctactgcccaacatgggcacttacctggaattatagaagacaaaatttgctgcgtgaaattattggttatcatgctgatatcatctgtctacaggaggtacaagtaaaccatttcgaagattttttttcacctgagcttgacaaacatggatatcaggcgctttacaagaaaaggacaacagaggtgtattctggaaatcctatggccatagatggatgtgctactttttttcgtagagacaagttttcacatgttaaaaaatacgaggttgagttcaataaggctgcacagtctttaacagatgctattattcctgctgcccagaaaagagtggctttaagtcgattgattaaagacaacattgcactaattgcggttttagaagccaaatttggtaatcatggagctgaaaatcctggtaaaagacagctcctttgtgtggcaaatacacatataaatgtccatcaagacctaaaagatgtgaagctatgggaggttcataccctcctaaaaggattggagaagatagctgtcagtgcagacattcctatgttggtctgtggagatttcaactcaacccctgggagttctccacatgcgcttctggcaatgggcaaagttgatcagcatcatccagatctggcaatagacccccttggaattttacgccctccaagcaagttgaatcaccagcttcctttggtcagtgcatactctgcatttgcaagaatggtaggtgttggctatgatttggagcatcagcggaggacagaccctgcaacaaatgaaccactcttcacaaattgcacaagagattttactggaactattgattacatattttacacagcggactcattgacagtggattcattattggaacttttggatgaagaaagcttaagaaaagacacagctctcccatcccctgaatggtcatcagatcacatagcactcttagctgagttccggtgcaagccaagaatcagacgttgacacattagctctccaggtcttgtagaaaaggtcattgtcatcatccttggtggtggaacaccgttccatgtgggaacttgaggcagggcgggaacgcgggctctcggggaagcaaacaaccaagcagcctcaggaaggggaagaggcttgtaacatttgatttttaccctcctacatttgagctcatgatacttaagatgcccctgtgtaccattactttctatagaagaaaaatacttgagagaaatatttgaagggttataaggcccgtttttcttttttgttcactgcggtcgcgttcgattccttttggctgtgtccatgctcgctgcctacaatacgcagccacgcaggagtcctcgacttctgtaaattctgtaccaatgtaataccagttccagtttttgttttccacaatgttgctggcgctggctc

SEQ ID NO: 4405 - DNA, 1627 bp, Zea Mays
agcacacggacagaggatagagaaaacagagtgcgacgccgacgaagagagagacagagagcaaaacccaaaccctaacaatcatttgcagcccccggcgtctcgagaacctccaaggaaccatccacaggagaaggcgcgagcgcgggtgtttggatcgggggaggcaacgctggcggctcgcggcggcagcagctactgcccaacatgggcacttacctggaattatagaagacaaaatttgctgcgtgaaattattggttatcatgctgatatcatctgtctacaggaggtacaagtaaaccatttcgaagattttttttcacctgagcttgacaaacatggatatcaggcgctttacaagaaaaggacaacagaggtgtattctggaaatcctatggccatagatggatgtgctactttttttcgtagagacaagttttcacatgttaaaaaatacgaggttgagttcaataaggctgcacagtctttaacagatgctattattcctgctgcccagaaaagagtggctttaagtcgattgattaaagacaacattgcactaattgcggttttagaagccaaatttggtaatcatggagctgaaaatcctggtaaaagacagctcctttgtgtggcaaatacacatataaatgtccatcaagacctaaaagatgtgaagctatgggaggttcataccctcctaaaaggattggagaagatagctgtcagtgcagacattcctatgttggtctgtggagatttcaactcaacccctgggagttctccacatgcgcttctggcaatgggcaaagttgatcagcatcatccagatctggcaatagacccccttggaattttacgccctccaagcaagttgaatcaccagcttcctttggtcagtgcatactctgcatttgcaagaatggtaggtgttggctatgatttggagcatcagcggaggacagaccctgcaacaaatgaaccactcttcacaaattgcacaagagattttactggaactattgattacatattttacacagcggactcattgacagtggattcattattggaacttttggatgaagaaagcttaagaaaagacacagctctcccatcccctgaatggtcatcagatcacatagcactcttagctgagttccggtgcaagccaagaatcagacgttgacacattagctctccaggtcttgtagaaaaggtcattgtcatcatccttggtggtggaacaccgttccatgtgggaacttgaggcagggcgggaacgcgggctctcggggaagcaaacaaccaagcagcctcaggaaggggaagaggcttgtaacatttgatttttaccctcctacatttgagctcatgatacttaagatgcccctgtgtaccattactttctatagaagaaaaatacttgagagaaatatttgaagggttataaggcccgtttttcttttttgttcactgcggtcgcgttcgattccttttggctgtgtccatgctcgctgcctacaatacgcagccacgcaggagtcctcgacttctgtaaattctgtaccaatgtaataccagttccagtttttgttttccacaatgttgctggcgctggctc

SEQ ID NO: 4406 - DNA, 1619 bp, Zea Mays
agcacacggacagaggatagagaaaacagagtgcgacgccgacgaagagagagacagagagcaaaacccaaaccctaacaatcatttgcagcccccggcgtctcgagaacctccaaggaaccatccacaggagaaggcgcgagcgcgggtgtttggatcgggggaggcaacgctggcggctcgcggcggcagcagctactgcccaacatgggcacttacctggaattatagaagacaaaatttgctgcgtgaaattattggttatcatgctgatatcatctgtctacaggaggtacaagtaaaccatttcgaagattttttttcacctgagcttgacaaacatggatatcaggcgctttacaagaaaaggacaacagaggtgtattctggaaatcctatggccatagatggatgtgctactttttttcgtagagacaagttttcacatgttaaaaaatacgaggttgagttcaataaggctgcacagtctttaacagatgctattattcctgctgcccagaaaagagtggctttaagtcgattgattaaagacaacattgcactaattgcggttttagaagccaaatttggtaatcatggagctgaaaatcctggtaaaagacagctcctttgtgtggcaaatacacatataaatgtccatcaagacctaaaagatgtgaagctatgggaggttcataccctcctaaaaggattggagaagatagctgtcagtgcagacattcctatgttggtctgtggagatttcaactcaacccctgggagttctccacatgcgcttctggcaatgggcaaagttgatcagcatcatccagatctggcaatagacccccttggaattttacgccctccaagcaagttgaatcaccagcttcctttggtcagtgcatactctgcatttgcaagaatggtaggtgttggctatgatttggagcatcagcggaggacagaccctgcaacaaatgaaccactcttcacaaattgcacaagagattttactggaactattgattacatattttacacagcggactcattgacagtggattcattattggaacttttggatgaagaaagcttaagaaaagacacagctctcccatcccctgaatggtcatcagatcacatagcactcttagctgagttccggtgcaagccaagaatcagacgttgacacattaggtcttgtagaaaaggtcattgtcatcatccttggtggtggaacaccgttccatgtgggaacttgaggcagggcgggaacgcgggctctcggggaagcaaacaaccaagcagcctcaggaaggggaagaggcttgtaacatttgatttttaccctcctacatttgagctcatgatacttaagatgcccctgtgtaccattactttctatagaagaaaaatacttgagagaaatatttgaagggttataaggcccgtttttcttttttgttcactgcggtcgcgttcgattccttttggctgtgtccatgctcgctgcctacaatacgcagccacgcaggagtcctcgacttctgtaaattctgtaccaatgtaataccagttccagtttttgttttccacaatgttgctggcgctggctc

SEQ ID NO: 4407 - DNA, 2199 bp, Zea Mays
aaggacccaatagtggaagcaatttgttccctttgccagaagagttggtgtgaattgagttatacattttcgctactcaagcacaagcttaaggcccctatgattctatagggtatcgcatacagagcgaccggaaagtccctatctgcagtgtgcatccaatggaacaagcaactattcagtgcctcggttgtctcaagtcaaaaatacctgttgctaagagctaccactgttcagccaaatgcttctctgatgcatggcagcaccacaaagttttgcatgaacgagctagtagtgctctaaatgaaaatggggctgaagaagaggagttatttggcagatttggcagtggtggttctggggttctaagtactgctggatctggttctttgtcaaattttggacaaagccctggtgttaataatggacctgtgcctttctatccctcaggtaccgataaaaattctggagaaacttggtttgaagttggacgctcacgaacatatacaccaactgctgatgatattggacatgcactaaagtttgagtgcgtagctgtggattcagaaaaaaagtctccaattggaccctcaacctcaatcatgacatcacgtgtaattcccgcgccaactcctacccctcgccgccttatccaagtgaatggggatgttttaggtcacttggatttagacagccaaatttcgtccttagggacattcactgtgttatcctacaatattcttgctgatgcatatgctacaactgatgcatatagctactgcccaacatgggcacttacctggaattatagaagacaaaatttgctgcgtgaaattattggttatcatgctgatatcatctgtctacaggaggtacaagtaaaccatttcgaagattttttttcacctgagcttgacaaacatggatatcaggcgctttacaagaaaaggacaacagaggtgtattctggaaatcctatggccatagatggatgtgctactttttttcgtagagacaagttttcacatgttaaaaaatacgaggttgagttcaataaggctgcacagtctttaacagatgctattattcctgctgcccagaaaagagtggctttaagtcgattgattaaagacaacattgcactaattgcggttttagaagccaaatttggtaatcatggagctgaaaatcctggtaaaagacagctcctttgtgtggcaaatacacatataaatgtccatcaagacctaaaagatgtgaagctatgggaggttcataccctcctaaaaggattggagaagatagctgtcagtgcagacattcctatgttggtctgtggagatttcaactcaacccctgggagttctccacatgcgcttctggcaatgggcaaagttgatcagcatcatccagatctggcaatagacccccttggaattttacgccctccaagcaagttgaatcaccagcttcctttggtcagtgcatactctgcatttgcaagaatggtaggtgttggctatgatttggagcatcagcggaggacagaccctgcaacaaatgaaccactcttcacaaattgcacaagagattttactggaactattgattacatattttacacagcggactcattgacagtggattcattattggaacttttggatgaagaaagcttaagaaaagacacagctctcccatcccctgaatggtcatcagatcacatagcactcttagctgagttccggtgcaagccaagaatcagacgttgacacattaggtcttgtagaaaaggtcattgtcatcatccttggtggtggaacaccgttccatgtgggaacttgaggcagggcgggaacgcgggctctcggggaagcaaacaaccaagcagcctcaggaaggggaagaggcttgtaacatttgatttttaccctcctacatttgagctcatgatacttaagatgcccctgtgtaccattactttctatagaagaaaaatacttgagagaaatatttgaagggttataaggcccgtttttcttttttgttcactgcggtcgcgttcgattccttttggctgtgtccatgctcgctgcctacaatacgcagccacgcaggagtcctcgacttctgtaaattctgtaccaatgtaataccagttccagtttttgttttccacaatgttgctggcgctggctc

SEQ ID NO: 4408 - DNA, 1945 bp, Zea Mays
agaagagttggtgtgaattgagttatacattttcgctactcaagcacaagcttaaggcccctatgattctatagggtatcgcatacagagcgaccggaaagtccctatctgcagtgtgcatccaatggaacaagcaactattcagtgcctcggttgtctcaagtcaaaaatacctgttgctaagagctaccactgttcagccaaatgcttctctgatgcatggcagcaccacaaagttttgcatgaacgagctagtagtgctctaaatgaaaatggggctgaagaagaggagttatttggcagatttggcagtggtggttctggggttctaagtactgctggatctggttctttgtcaaattttggacaaagccctggtgttaataatggacctgtgcctttctatccctcaggtaccgataaaaattctggagaaacttggtttgaagttggacgctcacgaacatatacaccaactgctgatgatattggacatgcactaaagtttgagtgcgtagctgtggattcagaaaaaaagtctccaattggaccctcaacctcaatcatgacatcacgtgtaattcccgcgccaactcctacccctcgccgccttatccaagtgaatggggatgttttaggtcacttggatttagacagccaaatttcgtccttagggacattcactgtgttatcctacaatattcttgctgatgcatatgctacaactgatgcatatagctactgcccaacatgggcacttacctggaattatagaagacaaaatttgctgcgtgaaattattggttatcatgctgatatcatctgtctacaggaggtacaagtaaaccatttcgaagattttttttcacctgagcttgacaaacatggatatcaggcgctttacaagaaaaggacaacagaggtgtattctggaaatcctatggccatagatggatgtgctactttttttcgtagagacaagttttcacatgttaaaaaatacgaggttgagttcaataaggctgcacagtctttaacagatgctattattcctgctgcccagaaaagagtggctttaagtcgattgattaaagacaacattgcactaattgcggttttagaagccaaatttggtaatcatggagctgaaaatcctggtaaaagacagctcctttgtgtggcaaatacacatataaatgtccatcaagacctaaaagatgtgaagctatgggaggttcataccctcctaaaaggattggagaagatagctgtcagtgcagacattcctatgttggtctgtggagatttcaactcaacccctgggagttctccacatgcgcttctggcaatgggcaaagttgatcagcatcatccagatctggcaatagacccccttggaattttacgccctccaagcaagttgaatcaccagcttcctttggtcagtgcatactctgcatttgcaagaatggtaggtgttggctatgatttggagcatcagcggaggacagaccctgcaacaaatgaaccactcttcacaaattgcacaagagattttactggaactattgattacatattttacacagcggactcattgacagtggattcattattggaacttttggatgaagaaagcttaagaaaagacacagctctcccatcccctgaatggtcatcagatcacatagcactcttagctgagttccggtgcaagccaagaatcagacgttgacacattaggtatgttacaaaggaaatcagtgttgtcatattgcttctattgcaactgaatgttgtttttttgttgacatgaatgatgttggattgtgttagagtaaataggaatagtaccacattgtctaccccatgtaggggtgacaatgggctctaaattttacactataagatttaaggattggatcagattaggattgggccttat

SEQ ID NO: 4409 - DNA, 2170 bp, Zea Mays
agaagagttggtgtgaattgagttatacattttcgctactcaagcacaagcttaaggcccctatgattctatagggtatcgcatacagagcgaccggaaagtccctatctgcagtgtgcatccaatggaacaagcaactattcagtgcctcggttgtctcaagtcaaaaatacctgttgctaagagctaccactgttcagccaaatgcttctctgatgcatggcagcaccacaaagttttgcatgaacgagctagtagtgctctaaatgaaaatggggctgaagaagaggagttatttggcagatttggcagtggtggttctggggttctaagtactgctggatctggttctttgtcaaattttggacaaagccctggtgttaataatggacctgtgcctttctatccctcaggtaccgataaaaattctggagaaacttggtttgaagttggacgctcacgaacatatacaccaactgctgatgatattggacatgcactaaagtttgagtgcgtagctgtggattcagaaaaaaagtctccaattggaccctcaacctcaatcatgacatcacgtgtaattcccgcgccaactcctacccctcgccgccttatccaagtgaatggggatgttttaggtcacttggatttagacagccaaatttcgtccttagggacattcactgtgttatcctacaatattcttgctgatgcatatgctacaactgatgcatatagctactgcccaacatgggcacttacctggaattatagaagacaaaatttgctgcgtgaaattattggttatcatgctgatatcatctgtctacaggaggtacaagtaaaccatttcgaagattttttttcacctgagcttgacaaacatggatatcaggcgctttacaagaaaaggacaacagaggtgtattctggaaatcctatggccatagatggatgtgctactttttttcgtagagacaagttttcacatgttaaaaaatacgaggttgagttcaataaggctgcacagtctttaacagatgctattattcctgctgcccagaaaagagtggctttaagtcgattgattaaagacaacattgcactaattgcggttttagaagccaaatttggtaatcatggagctgaaaatcctggtaaaagacagctcctttgtgtggcaaatacacatataaatgtccatcaagacctaaaagatgtgaagctatgggaggttcataccctcctaaaaggattggagaagatagctgtcagtgcagacattcctatgttggtctgtggagatttcaactcaacccctgggagttctccacatgcgcttctggcaatgggcaaagttgatcagcatcatccagatctggcaatagacccccttggaattttacgccctccaagcaagttgaatcaccagcttcctttggtcagtgcatactctgcatttgcaagaatggtaggtgttggctatgatttggagcatcagcggaggacagaccctgcaacaaatgaaccactcttcacaaattgcacaagagattttactggaactattgattacatattttacacagcggactcattgacagtggattcattattggaacttttggatgaagaaagcttaagaaaagacacagctctcccatcccctgaatggtcatcagatcacatagcactcttagctgagttccggtgcaagccaagaatcagacgttgacacattagctctccaggtcttgtagaaaaggtcattgtcatcatccttggtggtggaacaccgttccatgtgggaacttgaggcagggcgggaacgcgggctctcggggaagcaaacaaccaagcagcctcaggaaggggaagaggcttgtaacatttgatttttaccctcctacatttgagctcatgatacttaagatgcccctgtgtaccattactttctatagaagaaaaatacttgagagaaatatttgaagggttataaggcccgtttttcttttttgttcactgcggtcgcgttcgattccttttggctgtgtccatgctcgctgcctacaatacgcagccacgcaggagtcctcgacttctgtaaattctgtaccaatgtaataccagttccagtttttgttttccacaatgttgctggcgctggctc

SEQ ID NO: 4410 - DNA, 4398 bp, Zea Mays
cctccaacgtctcccctcccggcgaaggaaggaaacgaggcacgccctgacgcccacgcgaaagaaagttgacgcccacgccccacgcgcccaggaacaccaccggtgacgcgtgatcagactcgagaaccaatcccccccgactccctagccgccgcgctaaaatctacacaaagcctcgcaaatctggcctgatctcgcgcccccgatctcgcgctcgttcgcagcccaccgggaggtcctccagcctcccgccagatctcagcgtcgttcgttcgcttttagatttggtggggtaagggaggggaggcgggatgagcgcgcggataaaggagatggtgcgtgtggccacggcgcggctgggcggtgagcaggtgggggctggcggggtttcctcctcgggtatcgcgcgtcgggagtccacggcgcggctcggcggcgggggtacaagcctccggaggcagccgcagccgatggcgccctccgtgcgcaccgtctgctgcaacgaccgcgaggccaacgcccctgtcgggtacaagggaaattctgtgtcgactacaaagtacagcatcctgactttcctacctaaaggattatttgagcagttcaggcgggttgcaaatctttactttctcatgatctctatcttgtctactacacctatcagtccagttcatcctgtcactaatgtcgttcctctaagtcttgtgcttctggtgtctctcatcaaggaagcttttgaggattggaagcgtttccagaatgatatgtcaattaacaatgcacatgtcgatgtattgcaaggtcaatgttgggaaagtactccatggaaacgactgcaggttggagatattgtgaggatcaagcaagatggttatttccctgctgacttgctcttcctatcaagtacaaaccctgatggtatctgctacatagagacagcaaatcttgatggggaaacaaatctgaaaataaggaaggctttggagaaaacttgggactatgtaattcctgaaaaggcttctgagttcaaaggtgaagtgcagtgtgaacagccaaacaattccctttatacttttactggcaatcttatcatggacaagcaaactatacccctctcaccgaaccagttactcctaaggggatgcagtcttcgtaatacagaatacattgttggcgttgtcatattcactgggcacgagacaaaagttatgatgaattccatgaatgttccctcaaaaagaagtacattggaaaaaaagctagacaagcttatccttgctctttttgcaaccctctttacaatgtgtgttattggcgccattggaagtggcatatttattaatgaaaaatacttttatcttggattgcgtgggcatgtggaggatcagttcaatcctaaaaacagatttgtggtgaccattttaaccatgtttactctgataactctatactcaacgatcatccccatttccctttacgtgtccattgagatgatcaaattcatacagtgcacacaattcattaataacgatcttcatatgtaccatgctgagagtaacacccctgctttggcacggacttctaatcttaatgaggagcttggacaggttgaatatatattttctgacaaaactggcacacttacaagaaatctgatggaattctttaaatgctcaattggtggagaaatgtatggaactggcatcacagagattgagaaaggaggagcagaacgggctggaattagaatcgatgatgatgagggcaaaagatctgctaacgcggtccatgaaaaaggattcaattttgatgacgctagaatcatgcgcggtgcatggagaaacgaacctaatcctgaggcttgcaaggaattctttagatgccttgcaatctgtcatacagttcttccagagggtgaggagactccggaaaagataagttaccaggctgcctcacctgatgaggctgcacttgtgtctgctgctaaaaattttggtttcttcttttataggcgtacacccacaactgttatggttcgtgagtcacatgttgaaaggatggggagtatacaagatgttccatatgaaattctgaatgttctagaattcaacagtacaagaaagcgacaatcggtggtttgccggttcacaaatggaagactagttctctattgcaagggtgctgataatgttgtatatgaacgattggctgatggaaatcatgatatgaaaaagatcagtagagagcatctagagcaatttggttctgctggcttacgtacactttgtcttgcctatcgggatcttagtagggagcaatacgaaagctggaacgagaagtttgtacaagcaaagtcatctttacgagatcgtgataagaagcttgatgaggtggctgaattgattgaaaaagaccttatattagttgggtgcacagctatagaggacaaactgcaagaaggggtgccaacctgcattgaaactctctctgcagcgggcataaaaatttgggtgttaactggagataagatggaaacagcgattaacattgcatatgcatgtagcttggtaaacaatgacaccaaacagttcatcattagttcagagacaggcgctattagggaggctgaagaccggggtgaccctgtggaaattgcacgtgttattaaagattcagtaaaacagaatctgaaaagatttcacgaggaagcccggcattctttaattagcacccctgaaaggaagttggctctcattattgatggtagatgcctaatgtacgcactggacccaactcttcgtgttgatcttcttggattgagtctaagttgccactctgttatatgctgccgagtttctccgctgcagaaggcacaggttacaagcttagttaggaagggtgctgagaaaataactctcagcattggtgacggtgctaatgatgtgagtatgattcaagctgctcatgttgggattggcatcagtggccaagaaggaatgcaagctgttatggctagtgactttgccattgcacagtttcgttttcttactgatttgcttcttgtacatggacgatggtcttacttgagactgtgcaaggttatcacatacttcttctacaagaatctgacatttacactaactcagttctggttcacttttcaaactggtttttctggccagcggttttatgatgactggtttcagtctctatataacgttatttttactgcgctacctgtaattatagttggattgtttgataaggatgttagcgcgtcactgtcaaaaaaatacccacagctttacaaggaaggcatcaggaattcattcttcaagtggagagtgattgcagtgtggggtttctttgccttctatcagtcaatagtgttcttctacttcactgcagctgcaagtcggcatggtcagggttcatctggcaagattcttggcctatgggatgttagcaccatggcatttacttgtgtcgtggtgactgtgaatctccgccttctcatggcatgcaactctataacgaggtggcattacataagtgtggcgggcagtatagtggcctggtttatgtttattttcatatactctgcaataatgacgtcatttgacagacaggaaaatgtgtattttgtgatttatgttctgatgagcacctttttcttctatctgacaatcgtacttgttccgatcatcgccctgtttggggatttcctatatctatcgatccaaaggtggctcttcccctacgactaccaaataatacaggagcaacacaaggatgagccacacgagtacagcagggtgccactaccagagaccagccacctaagcccagaggaagcgagaagctacatgatctcgatgctcccacgggagtcatcaaagcacactggctttgccttcgactccccaggatacgagtcgttcttcgcctcgcagcaaggcatcggcgtgccacacaagccgtgggatgtagcccggagagcgagcatgaaaccgcaacgagcaggaaaatcctagtcgggcgaacacctctccgctgtgtaaagtcttgtatatctggtttcttgaccacaggagtttttgtataggtagcagtactgtagcccttttttcgtgtttgtcacccatatgttgttttgggatgaaaagtaggcaacggtccgtttggctgttaaacaatcatgtagggatacttggtagataaaaccaaaggggtattggacatgcagttaggaattttagtttctggcgttcattgcgtgatgtagtcgagttgattggtcggcccgccatgcaacttaaatcatgttactattattggaggcctgtgcattgatcatatcccattttatttcaatataagaacacatcctactcc

SEQ ID NO: 4411 - DNA, 4501 bp, Zea Mays
aaggaaggaaacgaggcacgccctgacgcccacgcgaaagaaagttgacgcccacgccccacgcgcccaggaacaccaccggtgacgcgtgatcagactcgagaaccaatcccccccgactccctagccgccgcgctaaaatctacacaaagcctcgcaaatctggcctgatctcgcgcccccgatctcgcgctcgttcgcagcccaccgggaggtcctccagcctcccgccagatctcagcgtcgttcgttcgcttttagatttggtggggtaagggaggggaggcgggatgagcgcgcggataaaggagatggtgcgtgtggccacggcgcggctgggcggtgagcaggtgggggctggcggggtttcctcctcgggtatcgcgcgtcgggagtccacggcgcggctcggcggcgggggtacaagcctccggaggcagccgcagccgatggcgccctccgtgcgcaccgtctgctgcaacgaccgcgaggccaacgcccctgtcgggtacaagggaaattctgtgtcgactacaaagtacagcatcctgactttcctacctaaaggattatttgagcagttcaggcgggttgcaaatctttactttctcatgatctctatcttgtctactacacctatcagtccagttcatcctgtcactaatgtcgttcctctaagtcttgtgcttctggtgtctctcatcaaggaagcttttgaggattggaagcgtttccagaatgatatgtcaattaacaatgcacatgtcgatgtattgcaaggtcaatgttgggaaagtactccatggaaacgactgcaggttggagatattgtgaggacagcaaatcttgatggggaaacaaatctgaaaataaggaaggctttggagaaaacttgggactatgtaattcctgaaaaggcttctgagttcaaaggtgaagtgcagtgtgaacagccaaacaattccctttatacttttactggcaatcttatcatggacaagcaaactatacccctctcaccgaaccagttactcctaaggacaagcaacatatttggagttcctaagattggccgcattgcattcaccggcggctgctccaatacaccggcgccggctctccaggactccaccagcgttgtctccagaccagcaccggtgagcaatgacgaagaggacttgatgactggtgctggtcccttccttctcccccttttctatcttattatcagtatgtctacactctgcggcgcctggtcggtcctccgggacgaccagctggtcgctcgacttgaaatcagtggtggtaaaggttatgatgaattccatgaatgttccctcaaaaagaagtacattggaaaaaaagctagacaagcttatccttgctctttttgcaaccctctttacaatgtgtgttattggcgccattggaagtggcatatttattaatgaaaaatacttttatcttggattgcgtgggcatgtggaggatcagttcaatcctaaaaacagatttgtggtgaccattttaaccatgtttactctgataactctatactcaacgatcatccccatttccctttacgtgtccattgagatgatcaaattcatacagtgcacacaattcattaataacgatcttcatatgtaccatgctgagagtaacacccctgctttggcacggacttctaatcttaatgaggagcttggacaggttgaatatatattttctgacaaaactggcacacttacaagaaatctgatggaattctttaaatgctcaattggtggagaaatgtatggaactggcatcacagagattgagaaaggaggagcagaacgggctggaattagaatcgatgatgatgagggcaaaagatctgctaacgcggtccatgaaaaaggattcaattttgatgacgctagaatcatgcgcggtgcatggagaaacgaacctaatcctgaggcttgcaaggaattctttagatgccttgcaatctgtcatacagttcttccagagggtgaggagactccggaaaagataagttaccaggctgcctcacctgatgaggctgcacttgtgtctgctgctaaaaattttggtttcttcttttataggcgtacacccacaactgttatggttcgtgagtcacatgttgaaaggatggggagtatacaagatgttccatatgaaattctgaatgttctagaattcaacagtacaagaaagcgacaatcggtggtttgccggttcacaaatggaagactagttctctattgcaagggtgctgataatgttgtatatgaacgattggctgatggaaatcatgatatgaaaaagatcagtagagagcatctagagcaatttggttctgctggcttacgtacactttgtcttgcctatcgggatcttagtagggagcaatacgaaagctggaacgagaagtttgtacaagcaaagtcatctttacgagatcgtgataagaagcttgatgaggtggctgaattgattgaaaaagaccttatattagttgggtgcacagctatagaggacaaactgcaagaaggggtgccaacctgcattgaaactctctctgcagcgggcataaaaatttgggtgttaactggagataagatggaaacagcgattaacattgcatatgcatgtagcttggtaaacaatgacaccaaacagttcatcattagttcagagacaggcgctattagggaggctgaagaccggggtgaccctgtggaaattgcacgtgttattaaagattcagtaaaacagaatctgaaaagatttcacgaggaagcccggcattctttaattagcacccctgaaaggaagttggctctcattattgatggtagatgcctaatgtacgcactggacccaactcttcgtgttgatcttcttggattgagtctaagttgccactctgttatatgctgccgagtttctccgctgcagaaggcacaggttacaagcttagttaggaagggtgctgagaaaataactctcagcattggtgacggtgctaatgatgtgagtatgattcaagctgctcatgttgggattggcatcagtggccaagaaggaatgcaagctgttatggctagtgactttgccattgcacagtttcgttttcttactgatttgcttcttgtacatggacgatggtcttacttgagactgtgcaaggttatcacatacttcttctacaagaatctgacatttacactaactcagttctggttcacttttcaaactggtttttctggccagcggttttatgatgactggtttcagtctctatataacgttatttttactgcgctacctgtaattatagttggattgtttgataaggatgttagcgcgtcactgtcaaaaaaatacccacagctttacaaggaaggcatcaggaattcattcttcaagtggagagtgattgcagtgtggggtttctttgccttctatcagtcaatagtgttcttctacttcactgcagctgcaagtcggcatggtcagggttcatctggcaagattcttggcctatgggatgttagcaccatggcatttacttgtgtcgtggtgactgtgaatctccgccttctcatggcatgcaactctataacgaggtggcattacataagtgtggcgggcagtatagtggcctggtttatgtttattttcatatactctgcaataatgacgtcatttgacagacaggaaaatgtgtattttgtgatttatgttctgatgagcacctttttcttctatctgacaatcgtacttgttccgatcatcgccctgtttggggatttcctatatctatcgatccaaaggtggctcttcccctacgactaccaaataatacaggagcaacacaaggatgagccacacgagtacagcagggtgccactaccagagaccagccacctaagcccagaggaagcgagaagctacatgatctcgatgctcccacgggagtcatcaaagcacactggctttgccttcgactccccaggatacgagtcgttcttcgcctcgcagcaaggcatcggcgtgccacacaagccgtgggatgtagcccggagagcgagcatgaaaccgcaacgagcaggaaaatcctagtcgggcgaacacctctccgctgtgtaaagtcttgtatatctggtttcttgaccacaggagtttttgtataggtagcagtactgtagcccttttttcgtgtttgtcacccatatgttgttttgggatgaaaagtaggcaacggtccgtttggctgttaaacaatcatgtagggatacttggtagataaaaccaaaggggtattggacatgcagttaggaattttagtttctggcgttcattgcgtgatgtagtcgagttgattggtcggcccgccatgcaacttaaatcatgttactattattggaggcctgtgcattgatcatatcccattttatttcaatataagaacacatcctactcc

SEQ ID NO: 4412 - DNA, 4360 bp, Zea Mays
ggcacgccctgacgcccacgcgaaagaaagttgacgcccacgccccacgcgcccaggaacaccaccggtgacgcgtgatcagactcgagaaccaatcccccccgactccctagccgccgcgctaaaatctacacaaagcctcgcaaatctggcctgatctcgcgcccccgatctcgcgctcgttcgcagcccaccgggaggtcctccagcctcccgccagatctcagcgtcgttcgttcgcttttagatttggtggggtaagggaggggaggcgggatgagcgcgcggataaaggagatggtgcgtgtggccacggcgcggctgggcggtgagcaggtgggggctggcggggtttcctcctcgggtatcgcgcgtcgggagtccacggcgcggctcggcggcgggggtacaagcctccggaggcagccgcagccgatggcgccctccgtgcgcaccgtctgctgcaacgaccgcgaggccaacgcccctgtcgggtacaagggaaattctgtgtcgactacaaagtacagcatcctgactttcctacctaaaggattatttgagcaggcgggttgcaaatctttactttctcatgatctctatcttgtctactacacctatcagtccagttcatcctgtcactaatgtcgttcctctaagtcttgtgcttctggtgtctctcatcaaggaagcttttgaggattggaagcgtttccagaatgatatgtcaattaacaatgcacatgtcgatgtattgcaaggtcaatgttgggaaagtactccatggaaacgactgcaggttggagatattgtgaggagcagatcaagcaagatggttatttccctgctgacttgctcttcctatcaagtacaaaccctgatggtatctgctacatagagacagcaaatcttgatggggaaacaaatctgaaaataaggaaggctttggagaaaacttgggactatgtaattcctgaaaaggcttctgagttcaaaggtgaagtgcagtgtgaacagccaaacaattccctttatacttttactggcaatcttatcatggacaagcaaactatacccctctcaccgaaccagttactcctaaggggatgcagtcttcgtaatacagaatacattgttggcgttgtcatattcactgggcacgagacaaaagttatgatgaattccatgaatgttccctcaaaaagaagtacattggaaaaaaagctagacaagcttatccttgctctttttgcaaccctctttacaatgtgtgttattggcgccattggaagtggcatatttattaatgaaaaatacttttatcttggattgcgtgggcatgtggaggatcagttcaatcctaaaaacagatttgtggtgaccattttaaccatgtttactctgataactctatactcaacgatcatccccatttccctttacgtgtccattgagatgatcaaattcatacagtgcacacaattcattaataacgatcttcatatgtaccatgctgagagtaacacccctgctttggcacggacttctaatcttaatgaggagcttggacaggttgaatatatattttctgacaaaactggcacacttacaagaaatctgatggaattctttaaatgctcaattggtggagaaatgtatggaactggcatcacagagattgagaaaggaggagcagaacgggctggaattagaatcgatgatgatgagggcaaaagatctgctaacgcggtccatgaaaaaggattcaattttgatgacgctagaatcatgcgcggtgcatggagaaacgaacctaatcctgaggcttgcaaggaattctttagatgccttgcaatctgtcatacagttcttccagagggtgaggagactccggaaaagataagttaccaggctgcctcacctgatgaggctgcacttgtgtctgctgctaaaaattttggtttcttcttttataggcgtacacccacaactgttatggttcgtgagtcacatgttgaaaggatggggagtatacaagatgttccatatgaaattctgaatgttctagaattcaacagtacaagaaagcgacaatcggtggtttgccggttcacaaatggaagactagttctctattgcaagggtgctgataatgttgtatatgaacgattggctgatggaaatcatgatatgaaaaagatcagtagagagcatctagagcaatttggttctgctggcttacgtacactttgtcttgcctatcgggatcttagtagggagcaatacgaaagctggaacgagaagtttgtacaagcaaagtcatctttacgagatcgtgataagaagcttgatgaggtggctgaattgattgaaaaagaccttatattagttgggtgcacagctatagaggacaaactgcaagaaggggtgccaacctgcattgaaactctctctgcagcgggcataaaaatttgggtgttaactggagataagatggaaacagcgattaacattgcatatgcatgtagcttggtaaacaatgacaccaaacagttcatcattagttcagagacaggcgctattagggaggctgaagaccggggtgaccctgtggaaattgcacgtgttattaaagattcagtaaaacagaatctgaaaagatttcacgaggaagcccggcattctttaattagcacccctgaaaggaagttggctctcattattgatggtagatgcctaatgtacgcactggacccaactcttcgtgttgatcttcttggattgagtctaagttgccactctgttatatgctgccgagtttctccgctgcagaaggcacaggttacaagcttagttaggaagggtgctgagaaaataactctcagcattggtgacggtgctaatgatgtgagtatgattcaagctgctcatgttgggattggcatcagtggccaagaaggaatgcaagctgttatggctagtgactttgccattgcacagtttcgttttcttactgatttgcttcttgtacatggacgatggtcttacttgagactgtgcaaggttatcacatacttcttctacaagaatctgacatttacactaactcagttctggttcacttttcaaactggtttttctggccagcggttttatgatgactggtttcagtctctatataacgttatttttactgcgctacctgtaattatagttggattgtttgataaggatgttagcgcgtcactgtcaaaaaaatacccacagctttacaaggaaggcatcaggaattcattcttcaagtggagagtgattgcagtgtggggtttctttgccttctatcagtcaatagtgttcttctacttcactgcagctgcaagtcggcatggtcagggttcatctggcaagattcttggcctatgggatgttagcaccatggcatttacttgtgtcgtggtgactgtgaatctccgccttctcatggcatgcaactctataacgaggtggcattacataagtgtggcgggcagtatagtggcctggtttatgtttattttcatatactctgcaataatgacgtcatttgacagacaggaaaatgtgtattttgtgatttatgttctgatgagcacctttttcttctatctgacaatcgtacttgttccgatcatcgccctgtttggggatttcctatatctatcgatccaaaggtggctcttcccctacgactaccaaataatacaggagcaacacaaggatgagccacacgagtacagcagggtgccactaccagagaccagccacctaagcccagaggaagcgagaagctacatgatctcgatgctcccacgggagtcatcaaagcacactggctttgccttcgactccccaggatacgagtcgttcttcgcctcgcagcaaggcatcggcgtgccacacaagccgtgggatgtagcccggagagcgagcatgaaaccgcaacgagcaggaaaatcctagtcgggcgaacacctctccgctgtgtaaagtcttgtatatctggtttcttgaccacaggagtttttgtataggtagcagtactgtagcccttttttcgtgtttgtcacccatatgttgttttgggatgaaaagtaggcaacggtccgtttggctgttaaacaatcatgtagggatacttggtagataaaaccaaaggggtattggacatgcagttaggaattttagtttctggcgttcattgcgtgatgtagtcgagttgattggtcggcccgccatgcaacttaaatcatgttactattattggaggcctgtgcattgatcatatcccattttatttcaatataagaacacatcctactcc

SEQ ID NO: 4413 - DNA, 2575 bp, Zea Mays
ccctgacgcccacgcgaaagaaagttgacgcccacgccccacgcgcccaggaacaccaccggtgacgcgtgatcagactcgagaaccaatcccccccgactccctagccgccgcgctaaaatctacacaaagcctcgcaaatctggcctgatctcgcgcccccgatctcgcgctcgttcgcagcccaccgggaggtcctccagcctcccgccagatctcagcgtcgttcgttcgcttttagatttggtggggtaagggaggggaggcgggatgagcgcgcggataaaggagatggtgcgtgtggccacggcgcggctgggcggtgagcaggtgggggctggcggggtttcctcctcgggtatcgcgcgtcgggagtccacggcgcggctcggcggcgggggtacaagcctccggaggcagccgcagccgatggcgccctccgtgcgcaccgtctgctgcaacgaccgcgaggccaacgcccctgtcgggtacaagggaaattctgtgtcgactacaaagtacagcatcctgactttcctacctaaaggattatttgagcagttcaggcgggttgcaaatctttactttctcatgatctctatcttgtctactacacctatcagtccagttcatcctgtcactaatgtcgttcctctaagtcttgtgcttctggtgtctctcatcaaggaagcttttgaggattggaagcgtttccagaatgatatgtcaattaacaatgcacatgtcgatgtattgcaaggtcaatgttgggaaagtactccatggaaacgactgcaggttggagatattgtgaggacagcaaatcttgatggggaaacaaatctgaaaataaggaaggctttggagaaaacttgggactatgtaattcctgaaaaggcttctgagttcaaaggtgaagtgcagtgtgaacagccaaacaattccctttatacttttactggcaatcttatcatggacaagcaaactatacccctctcaccgaaccagttactcctaaggacaagcaacatatttggagttcctaagattggccgcattgcattcaccggcggctgctccaatacaccggcgccggctctccaggactccaccagcgttgtctccagaccagcaccggtgagcaatgacgaagaggacttgatgactggtgctggtcccttccttctcccccttttctatcttattatcagtatgtctacactctgcggcgcctggtcggtcctccgggacgaccagctggtcgctcgacttgaaatcagtggtggtaaaggttatgatgaattccatgaatgttccctcaaaaagaagtacattggaaaaaaagctagacaagcttatccttgctctttttgcaaccctctttacaatgtgtgttattggcgccattggaagtggcatatttattaatgaaaaatacttttatcttggattgcgtgggcatgtggaggatcagttcaatcctaaaaacagatttgtggtgaccattttaaccatgtttactctgataactctatactcaacgatcatccccatttccctttacgtgtccattgagtgcacacaattcattaataacgatcttcatatgtaccatgctgagagtaacacccctgctttggcacggacttctaatcttaatgaggagcttggacaggttgaatatatattttctgacaaaactggcacacttacaagaaatctgatggaattctttaaatgctcaattggtggagaaatgtatggaactggcatcacagagattgagaaaggaggagcagaacgggctggaattagaatcgatgatgatgagggcaaaagatctgctaacgcggtccatgaaaaaggattcaattttgatgacgctagaatcatgcgcggtgcatggagaaacgaacctaatcctgaggcttgcaaggaattctttagatgccttgcaatctgtcatacagttcttccagagggtgaggagactccggaaaagataagttaccaggctgcctcacctgatgaggctgcacttgtgtctgctgctaaaaattttggtttcttcttttataggcgtacacccacaactgttatggttcgtgagtcacatgttgaaaggatggggagtatacaagatgttccatatgaaattctgaatgttctagaattcaacagtacaagaaagcgacaatcggtggtttgccggttcacaaatggaagactagttctctattgcaagggtgctgataatgttgtatatgaacgattggctgatggaaatcatgatatgaaaaagatcagtagagagcatctagagcaatttggttctgctggcttacgtacactttgtcttgcctatcgggatcttagtagggagcaatacgaaagctggaacgagaagtttgtacaagcaaagtcatctttacgagatcgtgataagaagcttgatgaggttaatgagttaccatcttttggttatatgacaattgacatgaactctgacagtgtattctgtatttgcttgaaaatgtggtcctttctgttagaacttatgctactggatctataa

SEQ ID NO: 4414 - DNA, 2490 bp, Zea Mays
ccctgacgcccacgcgaaagaaagttgacgcccacgccccacgcgcccaggaacaccaccggtgacgcgtgatcagactcgagaaccaatcccccccgactccctagccgccgcgctaaaatctacacaaagcctcgcaaatctggcctgatctcgcgcccccgatctcgcgctcgttcgcagcccaccgggaggtcctccagcctcccgccagatctcagcgtcgttcgttcgcttttagatttggtggggtaagggaggggaggcgggatgagcgcgcggataaaggagatggtgcgtgtggccacggcgcggctgggcggtgagcaggtgggggctggcggggtttcctcctcgggtatcgcgcgtcgggagtccacggcgcggctcggcggcgggggtacaagcctccggaggcagccgcagccgatggcgccctccgtgcgcaccgtctgctgcaacgaccgcgaggccaacgcccctgtcgggtacaagggaaattctgtgtcgactacaaagtacagcatcctgactttcctacctaaaggattatttgagcagttcaggcgggttgcaaatctttactttctcatgatctctatcttgtctactacacctatcagtccagttcatcctgtcactaatgtcgttcctctaagtcttgtgcttctggtgtctctcatcaaggaagcttttgaggattggaagcgtttccagaatgatatgtcaattaacaatgcacatgtcgatgtattgcaaggtcaatgttgggaaagtactccatggaaacgactgcaggttggagatattgtgaggacagcaaatcttgatggggaaacaaatctgaaaataaggaaggctttggagaaaacttgggactatgtaattcctgaaaaggcttctgagttcaaaggtgaagtgcagtgtgaacagccaaacaattccctttatacttttactggcaatcttatcatggacaagcaaactatacccctctcaccgaaccagttactcctaaggacaagcaacatatttggagttcctaagattggccgcattgcattcaccggcggctgctccaatacaccggcgccggctctccaggactccaccagcgttgtctccagaccagcaccggtgagcaatgacgaagaggacttgatgactggtgctggtcccttccttctcccccttttctatcttattatcagtatgtctacactctgcggcgcctggtcggtcctccgggacgaccagctggtcgctcgacttgaaatcagtggtggtaaaggttatgatgaattccatgaatgttccctcaaaaagaagtacattggaaaaaaagctagacaagcttatccttgctctttttgcaaccctctttacaatgtgtgttattggcgccattggaaggtgaccattttaaccatgtttactctgataactctatactcaacgatcatccccatttccctttacgtgtccattgagtgcacacaattcattaataacgatcttcatatgtaccatgctgagagtaacacccctgctttggcacggacttctaatcttaatgaggagcttggacaggttgaatatatattttctgacaaaactggcacacttacaagaaatctgatggaattctttaaatgctcaattggtggagaaatgtatggaactggcatcacagagattgagaaaggaggagcagaacgggctggaattagaatcgatgatgatgagggcaaaagatctgctaacgcggtccatgaaaaaggattcaattttgatgacgctagaatcatgcgcggtgcatggagaaacgaacctaatcctgaggcttgcaaggaattctttagatgccttgcaatctgtcatacagttcttccagagggtgaggagactccggaaaagataagttaccaggctgcctcacctgatgaggctgcacttgtgtctgctgctaaaaattttggtttcttcttttataggcgtacacccacaactgttatggttcgtgagtcacatgttgaaaggatggggagtatacaagatgttccatatgaaattctgaatgttctagaattcaacagtacaagaaagcgacaatcggtggtttgccggttcacaaatggaagactagttctctattgcaagggtgctgataatgttgtatatgaacgattggctgatggaaatcatgatatgaaaaagatcagtagagagcatctagagcaatttggttctgctggcttacgtacactttgtcttgcctatcgggatcttagtagggagcaatacgaaagctggaacgagaagtttgtacaagcaaagtcatctttacgagatcgtgataagaagcttgatgaggttaatgagttaccatcttttggttatatgacaattgacatgaactctgacagtgtattctgtatttgcttgaaaatgtggtcctttctgttagaacttatgctactggatctataa

SEQ ID NO: 4415 - DNA, 4336 bp, Zea Mays
ccctgacgcccacgcgaaagaaagttgacgcccacgccccacgcgcccaggaacaccaccggtgacgcgtgatcagactcgagaaccaatcccccccgactccctagccgccgcgctaaaatctacacaaagcctcgcaaatctggcctgatctcgcgcccccgatctcgcgctcgttcgcagcccaccgggaggtcctccagcctcccgccagatctcagcgtcgttcgttcgcttttagatttggtggggtaagggaggggaggcgggatgagcgcgcggataaaggagatggtgcgtgtggccacggcgcggctgggcggtgagcaggtgggggctggcggggtttcctcctcgggtatcgcgcgtcgggagtccacggcgcggctcggcggcgggggtacaagcctccggaggcagccgcagccgatggcgccctccgtgcgcaccgtctgctgcaacgaccgcgaggccaacgcccctgtcgggtacaagggaaattctgtgtcgactacaaagtacagcatcctgactttcctacctaaaggattatttgagcagttcaggcgggttgcaaatctttactttctcatgatctctatcttgtctactacacctatcagtccagttcatcctgtcactaatgtcgttcctctaagtcttgtgcttctggtgtctctcatcaaggaagcttttgaggattggaagcgtttccagaatgatatgtcaattaacaatgcacatgtcgatgtattgcaaggtcaatgttgggaaagtactccatggaaacgactgcaggttggagatattgtgaggatcaagcaagatggttatttccctgctgacttgctcttcctatcaagtacaaaccctgatggtatctgctacatagagacagcaaatcttgatggggaaacaaatctgaaaataaggaaggctttggagaaaacttgggactatgtaattcctgaaaaggcttctgagttcaaaggtgaagtgcagtgtgaacagccaaacaattccctttatacttttactggcaatcttatcatggacaagcaaactatacccctctcaccgaaccagttactcctaaggggatgcagtcttcgtaatacagaatacattgttggcgttgtcatattcactgggcacgagacaaaagttatgatgaattccatgaatgttccctcaaaaagaagtacattggaaaaaaagctagacaagcttatccttgctctttttgcaaccctctttacaatgtgtgttattggcgccattggaagtggcatatttattaatgaaaaatacttttatcttggattgcgtgggcatgtggaggatcagttcaatcctaaaaacagatttgtggtgaccattttaaccatgtttactctgataactctatactcaacgatcatccccatttccctttacgtgtccattgagtgcacacaattcattaataacgatcttcatatgtaccatgctgagagtaacacccctgctttggcacggacttctaatcttaatgaggagcttggacaggttgaatatatattttctgacaaaactggcacacttacaagaaatctgatggaattctttaaatgctcaattggtggagaaatgtatggaactggcatcacagagattgagaaaggaggagcagaacgggctggaattagaatcgatgatgatgagggcaaaagatctgctaacgcggtccatgaaaaaggattcaattttgatgacgctagaatcatgcgcggtgcatggagaaacgaacctaatcctgaggcttgcaaggaattctttagatgccttgcaatctgtcatacagttcttccagagggtgaggagactccggaaaagataagttaccaggctgcctcacctgatgaggctgcacttgtgtctgctgctaaaaattttggtttcttcttttataggcgtacacccacaactgttatggttcgtgagtcacatgttgaaaggatggggagtatacaagatgttccatatgaaattctgaatgttctagaattcaacagtacaagaaagcgacaatcggtggtttgccggttcacaaatggaagactagttctctattgcaagggtgctgataatgttgtatatgaacgattggctgatggaaatcatgatatgaaaaagatcagtagagagcatctagagcaatttggttctgctggcttacgtacactttgtcttgcctatcgggatcttagtagggagcaatacgaaagctggaacgagaagtttgtacaagcaaagtcatctttacgagatcgtgataagaagcttgatgaggtggctgaattgattgaaaaagaccttatattagttgggtgcacagctatagaggacaaactgcaagaaggggtgccaacctgcattgaaactctctctgcagcgggcataaaaatttgggtgttaactggagataagatggaaacagcgattaacattgcatatgcatgtagcttggtaaacaatgacaccaaacagttcatcattagttcagagacaggcgctattagggaggctgaagaccggggtgaccctgtggaaattgcacgtgttattaaagattcagtaaaacagaatctgaaaagatttcacgaggaagcccggcattctttaattagcacccctgaaaggaagttggctctcattattgatggtagatgcctaatgtacgcactggacccaactcttcgtgttgatcttcttggattgagtctaagttgccactctgttatatgctgccgagtttctccgctgcagaaggcacaggttacaagcttagttaggaagggtgctgagaaaataactctcagcattggtgacggtgctaatgatgtgagtatgattcaagctgctcatgttgggattggcatcagtggccaagaaggaatgcaagctgttatggctagtgactttgccattgcacagtttcgttttcttactgatttgcttcttgtacatggacgatggtcttacttgagactgtgcaaggttatcacatacttcttctacaagaatctgacatttacactaactcagttctggttcacttttcaaactggtttttctggccagcggttttatgatgactggtttcagtctctatataacgttatttttactgcgctacctgtaattatagttggattgtttgataaggatgttagcgcgtcactgtcaaaaaaatacccacagctttacaaggaaggcatcaggaattcattcttcaagtggagagtgattgcagtgtggggtttctttgccttctatcagtcaatagtgttcttctacttcactgcagctgcaagtcggcatggtcagggttcatctggcaagattcttggcctatgggatgttagcaccatggcatttacttgtgtcgtggtgactgtgaatctccgccttctcatggcatgcaactctataacgaggtggcattacataagtgtggcgggcagtatagtggcctggtttatgtttattttcatatactctgcaataatgacgtcatttgacagacaggaaaatgtgtattttgtgatttatgttctgatgagcacctttttcttctatctgacaatcgtacttgttccgatcatcgccctgtttggggatttcctatatctatcgatccaaaggtggctcttcccctacgactaccaaataatacaggagcaacacaaggatgagccacacgagtacagcagggtgccactaccagagaccagccacctaagcccagaggaagcgagaagctacatgatctcgatgctcccacgggagtcatcaaagcacactggctttgccttcgactccccaggatacgagtcgttcttcgcctcgcagcaaggcatcggcgtgccacacaagccgtgggatgtagcccggagagcgagcatgaaaccgcaacgagcaggaaaatcctagtcgggcgaacacctctccgctgtgtaaagtcttgtatatctggtttcttgaccacaggagtttttgtataggtagcagtactgtagcccttttttcgtgtttgtcacccatatgttgttttgggatgaaaagtaggcaacggtccgtttggctgttaaacaatcatgtagggatacttggtagataaaaccaaaggggtattggacatgcagttaggaattttagtttctggcgttcattgcgtgatgtagtcgagttgattggtcggcccgccatgcaacttaaatcatgttactattattggaggcctgtgcattgatcatatcccattttatttcaatataagaacacatcctactcc

SEQ ID NO: 4416 - DNA, 4210 bp, Zea Mays
ccctgacgcccacgcgaaagaaagttgacgcccacgccccacgcgcccaggaacaccaccggtgacgcgtgatcagactcgagaaccaatcccccccgactccctagccgccgcgctaaaatctacacaaagcctcgcaaatctggcctgatctcgcgcccccgatctcgcgctcgttcgcagcccaccgggaggtcctccagcctcccgccagatctcagcgtcgttcgttcgcttttagatttggtggggtaagggaggggaggcgggatgagcgcgcggataaaggagatggtgcgtgtggccacggcgcggctgggcggtgagcaggtgggggctggcggggtttcctcctcgggtatcgcgcgtcgggagtccacggcgcggctcggcggcgggggtacaagcctccggaggcagccgcagccgatggcgccctccgtgcgcaccgtctgctgcaacgaccgcgaggccaacgcccctgtcgggtacaagggaaattctgtgtcgactacaaagtacagcatcctgactttcctacctaaaggattatttgagcagttcaggcgggttgcaaatctttactttctcatgatctctatcttgtctactacacctatcagtccagttcatcctgtcactaatgtcgttcctctaagtcttgtgcttctggtgtctctcatcaaggaagcttttgaggattggaagcgtttccagaatgatatgtcaattaacaatgcacatgtcgatgtattgcaaggtcaatgttgggaaagtactccatggaaacgactgcaggttggagatattgtgaggacagcaaatcttgatggggaaacaaatctgaaaataaggaaggctttggagaaaacttgggactatgtaattcctgaaaaggcttctgagttcaaaggtgaagtgcagtgtgaacagccaaacaattccctttatacttttactggcaatcttatcatggacaagcaaactatacccctctcaccgaaccagttactcctaagggttatgatgaattccatgaatgttccctcaaaaagaagtacattggaaaaaaagctagacaagcttatccttgctctttttgcaaccctctttacaatgtgtgttattggcgccattggaagtggcatatttattaatgaaaaatacttttatcttggattgcgtgggcatgtggaggatcagttcaatcctaaaaacagatttgtggtgaccattttaaccatgtttactctgataactctatactcaacgatcatccccatttccctttacgtgtccattgagatgatcaaattcatacagtgcacacaattcattaataacgatcttcatatgtaccatgctgagagtaacacccctgctttggcacggacttctaatcttaatgaggagcttggacaggttgaatatatattttctgacaaaactggcacacttacaagaaatctgatggaattctttaaatgctcaattggtggagaaatgtatggaactggcatcacagagattgagaaaggaggagcagaacgggctggaattagaatcgatgatgatgagggcaaaagatctgctaacgcggtccatgaaaaaggattcaattttgatgacgctagaatcatgcgcggtgcatggagaaacgaacctaatcctgaggcttgcaaggaattctttagatgccttgcaatctgtcatacagttcttccagagggtgaggagactccggaaaagataagttaccaggctgcctcacctgatgaggctgcacttgtgtctgctgctaaaaattttggtttcttcttttataggcgtacacccacaactgttatggttcgtgagtcacatgttgaaaggatggggagtatacaagatgttccatatgaaattctgaatgttctagaattcaacagtacaagaaagcgacaatcggtggtttgccggttcacaaatggaagactagttctctattgcaagggtgctgataatgttgtatatgaacgattggctgatggaaatcatgatatgaaaaagatcagtagagagcatctagagcaatttggttctgctggcttacgtacactttgtcttgcctatcgggatcttagtagggagcaatacgaaagctggaacgagaagtttgtacaagcaaagtcatctttacgagatcgtgataagaagcttgatgaggtggctgaattgattgaaaaagaccttatattagttgggtgcacagctatagaggacaaactgcaagaaggggtgccaacctgcattgaaactctctctgcagcgggcataaaaatttgggtgttaactggagataagatggaaacagcgattaacattgcatatgcatgtagcttggtaaacaatgacaccaaacagttcatcattagttcagagacaggcgctattagggaggctgaagaccggggtgaccctgtggaaattgcacgtgttattaaagattcagtaaaacagaatctgaaaagatttcacgaggaagcccggcattctttaattagcacccctgaaaggaagttggctctcattattgatggtagatgcctaatgtacgcactggacccaactcttcgtgttgatcttcttggattgagtctaagttgccactctgttatatgctgccgagtttctccgctgcagaaggcacaggttacaagcttagttaggaagggtgctgagaaaataactctcagcattggtgacggtgctaatgatgtgagtatgattcaagctgctcatgttgggattggcatcagtggccaagaaggaatgcaagctgttatggctagtgactttgccattgcacagtttcgttttcttactgatttgcttcttgtacatggacgatggtcttacttgagactgtgcaaggttatcacatacttcttctacaagaatctgacatttacactaactcagttctggttcacttttcaaactggtttttctggccagcggttttatgatgactggtttcagtctctatataacgttatttttactgcgctacctgtaattatagttggattgtttgataaggatgttagcgcgtcactgtcaaaaaaatacccacagctttacaaggaaggcatcaggaattcattcttcaagtggagagtgattgcagtgtggggtttctttgccttctatcagtcaatagtgttcttctacttcactgcagctgcaagtcggcatggtcagggttcatctggcaagattcttggcctatgggatgttagcaccatggcatttacttgtgtcgtggtgactgtgaatctccgccttctcatggcatgcaactctataacgaggtggcattacataagtgtggcgggcagtatagtggcctggtttatgtttattttcatatactctgcaataatgacgtcatttgacagacaggaaaatgtgtattttgtgatttatgttctgatgagcacctttttcttctatctgacaatcgtacttgttccgatcatcgccctgtttggggatttcctatatctatcgatccaaaggtggctcttcccctacgactaccaaataatacaggagcaacacaaggatgagccacacgagtacagcagggtgccactaccagagaccagccacctaagcccagaggaagcgagaagctacatgatctcgatgctcccacgggagtcatcaaagcacactggctttgccttcgactccccaggatacgagtcgttcttcgcctcgcagcaaggcatcggcgtgccacacaagccgtgggatgtagcccggagagcgagcatgaaaccgcaacgagcaggaaaatcctagtcgggcgaacacctctccgctgtgtaaagtcttgtatatctggtttcttgaccacaggagtttttgtataggtagcagtactgtagcccttttttcgtgtttgtcacccatatgttgttttgggatgaaaagtaggcaacggtccgtttggctgttaaacaatcatgtagggatacttggtagataaaaccaaaggggtattggacatgcagttaggaattttagtttctggcgttcattgcgtgatgtagtcgagttgattggtcggcccgccatgcaacttaaatcatgttactattattggaggcctgtgcattgatcatatcccattttatttcaatataagaacacatcctactcc

SEQ ID NO: 4417 - DNA, 4398 bp, Zea Mays
ccctgacgcccacgcgaaagaaagttgacgcccacgccccacgcgcccaggaacaccaccggtgacgcgtgatcagactcgagaaccaatcccccccgactccctagccgccgcgctaaaatctacacaaagcctcgcaaatctggcctgatctcgcgcccccgatctcgcgctcgttcgcagcccaccgggaggtcctccagcctcccgccagatctcagcgtcgttcgttcgcttttagatttggtggggtaagggaggggaggcgggatgagcgcgcggataaaggagatggtgcgtgtggccacggcgcggctgggcggtgagcaggtgggggctggcggggtttcctcctcgggtatcgcgcgtcgggagtccacggcgcggctcggcggcgggggtacaagcctccggaggcagccgcagccgatggcgccctccgtgcgcaccgtctgctgcaacgaccgcgaggccaacgcccctgtcgggtacaagggaaattctgtgtcgactacaaagtacagcatcctgactttcctacctaaaggattatttgagcaggcgggttgcaaatctttactttctcatgatctctatcttgtctactacacctatcagtccagttcatcctgtcactaatgtcgttcctctaagtcttgtgcttctggtgtctctcatcaaggaagcttttgaggattggaagcgtttccagaatgatatgtcaattaacaatgcacatgtcgatgtattgcaaggtcaatgttgggaaagtactccatggaaacgactgcaggttggagatattgtgaggatcaagcaagatggttatttccctgctgacttgctcttcctatcaagtacaaaccctgatggtatctgctacatagagacagcaaatcttgatggggaaacaaatctgaaaataaggaaggctttggagaaaacttgggactatgtaattcctgaaaaggcttctgagttcaaaggtgaagtgcagtgtgaacagccaaacaattccctttatacttttactggcaatcttatcatggacaagcaaactatacccctctcaccgaaccagttactcctaaggggatgcagtcttcgtaatacagaatacattgttggcgttgtcatattcactgggcacgagacaaaagttatgatgaattccatgaatgttccctcaaaaagaagtacattggaaaaaaagctagacaagcttatccttgctctttttgcaaccctctttacaatgtgtgttattggcgccattggaagtggcatatttattaatgaaaaatacttttatcttggattgcgtgggcatgtggaggatcagttcaatcctaaaaacagatttgtggtgaccattttaaccatgtttactctgataactctatactcaacgatcatccccatttccctttacgtgtccattgagtgcacacaattcattaataacgatcttcatatgtaccatgctgagagtaacacccctgctttggcacggacttctaatcttaatgaggagcttggacaggttgaatatatattttctgacaaaactggcacacttacaagaaatctgatggaattctttaaatgctcaattggtggagaaatgtatggaactggcatcacagagattgagaaaggaggagcagaacgggctggaattagaatcgatgatgatgagggcaaaagatctgctaacgcggtccatgaaaaaggattcaattttgatgacgctagaatcatgcgcggtgcatggagaaacgaacctaatcctgaggcttgcaaggaattctttagatgccttgcaatctgtcatacagttcttccagagggtgaggagactccggaaaagataagttaccaggctgcctcacctgatgaggctgcacttgtgtctgctgctaaaaattttggtttcttcttttataggcgtacacccacaactgttatggttcgtgagtcacatgttgaaaggatggggagtatacaagatgttccatatgaaattctgaatgttctagaattcaacagtacaagaaagcgacaatcggtggtttgccggttcacaaatggaagactagttctctattgcaagggtgctgataatgttgtatatgaacgattggctgatggaaatcatgatatgaaaaagatcagtagagagcatctagagcaatttggttctgctggcttacgtacactttgtcttgcctatcgggatcttagtagggagcaatacgaaagctggaacgagaagtttgtacaagcaaagtcatctttacgagatcgtgataagaagcttgatgaggtggctgaattgattgaaaaagaccttatattagttgggtgcacagctatagaggacaaactgcaagaaggggtgccaacctgcattgaaactctctctgcagcgggcataaaaatttgggtgttaactggagataagatggaaacagcgattaacattgcatatgcatgtagcttggtaaacaatgacaccaaacagttcatcattagttcagagacaggcgctattagggaggctgaagaccggggtgaccctgtggaaattgcacgtgttattaaagattcagtaaaacagaatctgaaaagatttcacgaggaagcccggcattctttaattagcacccctgaaaggaagttggctctcattattgatggtagatgcctaatgtacgcactggacccaactcttcgtgttgatcttcttggattgagtctaagttgccactctgttatatgctgccgagtttctccgctgcagaaggcacaggttacaagcttagttaggaagggtgctgagaaaataactctcagcattggtgacggtgctaatgatgtgagtatgattcaagctgctcatgttgggattggcatcagtggccaagaaggaatgcaagctgttatggctagtgactttgccattgcacagtttcgttttcttactgatttgcttcttgtacatggacgatggtcttacttgagactgtgcaaggttatcacatacttcttctacaagaatctgacatttacactaactcagttctggttcacttttcaaactggtttttctggccagcggttttatgatgactggtttcagtctctatataacgttatttttactgcgctacctgtaattatagttggattgtttgataaggtaggattattcttacttgtttatggagttgtctcctgcaattgcactaagctctgagtcgtttcaggatgttagcgcgtcactgtcaaaaaaatacccacagctttacaaggaaggcatcaggaattcattcttcaagtggagagtgattgcagtgtggggtttctttgccttctatcagtcaatagtgttcttctacttcactgcagctgcaagtcggcatggtcagggttcatctggcaagattcttggcctatgggatgttagcaccatggcatttacttgtgtcgtggtgactgtgaatctccgccttctcatggcatgcaactctataacgaggtggcattacataagtgtggcgggcagtatagtggcctggtttatgtttattttcatatactctgcaataatgacgtcatttgacagacaggaaaatgtgtattttgtgatttatgttctgatgagcacctttttcttctatctgacaatcgtacttgttccgatcatcgccctgtttggggatttcctatatctatcgatccaaaggtggctcttcccctacgactaccaaataatacaggagcaacacaaggatgagccacacgagtacagcagggtgccactaccagagaccagccacctaagcccagaggaagcgagaagctacatgatctcgatgctcccacgggagtcatcaaagcacactggctttgccttcgactccccaggatacgagtcgttcttcgcctcgcagcaaggcatcggcgtgccacacaagccgtgggatgtagcccggagagcgagcatgaaaccgcaacgagcaggaaaatcctagtcgggcgaacacctctccgctgtgtaaagtcttgtatatctggtttcttgaccacaggagtttttgtataggtagcagtactgtagcccttttttcgtgtttgtcacccatatgttgttttgggatgaaaagtaggcaacggtccgtttggctgttaaacaatcatgtagggatacttggtagataaaaccaaaggggtattggacatgcagttaggaattttagtttctggcgttcattgcgtgatgtagtcgagttgattggtcggcccgccatgcaacttaaatcatgttactattattggaggcctgtgcattgatcatatcccattttatttcaatataagaacacatcctactcc

SEQ ID NO: 4418 - DNA, 4336 bp, Zea Mays
ccctgacgcccacgcgaaagaaagttgacgcccacgccccacgcgcccaggaacaccaccggtgacgcgtgatcagactcgagaaccaatcccccccgactccctagccgccgcgctaaaatctacacaaagcctcgcaaatctggcctgatctcgcgcccccgatctcgcgctcgttcgcagcccaccgggaggtcctccagcctcccgccagatctcagcgtcgttcgttcgcttttagatttggtggggtaagggaggggaggcgggatgagcgcgcggataaaggagatggtgcgtgtggccacggcgcggctgggcggtgagcaggtgggggctggcggggtttcctcctcgggtatcgcgcgtcgggagtccacggcgcggctcggcggcgggggtacaagcctccggaggcagccgcagccgatggcgccctccgtgcgcaccgtctgctgcaacgaccgcgaggccaacgcccctgtcgggtacaagggaaattctgtgtcgactacaaagtacagcatcctgactttcctacctaaaggattatttgagcagttcaggcgggttgcaaatctttactttctcatgatctctatcttgtctactacacctatcagtccagttcatcctgtcactaatgtcgttcctctaagtcttgtgcttctggtgtctctcatcaaggaagcttttgaggattggaagcgtttccagaatgatatgtcaattaacaatgcacatgtcgatgtattgcaaggtcaatgttgggaaagtactccatggaaacgactgcagatcaagcaagatggttatttccctgctgacttgctcttcctatcaagtacaaaccctgatggtatctgctacatagagacagcaaatcttgatggggaaacaaatctgaaaataaggaaggctttggagaaaacttgggactatgtaattcctgaaaaggcttctgagttcaaaggtgaagtgcagtgtgaacagccaaacaattccctttatacttttactggcaatcttatcatggacaagcaaactatacccctctcaccgaaccagttactcctaaggggatgcagtcttcgtaatacagaatacattgttggcgttgtcatattcactgggcacgagacaaaagttatgatgaattccatgaatgttccctcaaaaagaagtacattggaaaaaaagctagacaagcttatccttgctctttttgcaaccctctttacaatgtgtgttattggcgccattggaagtggcatatttattaatgaaaaatacttttatcttggattgcgtgggcatgtggaggatcagttcaatcctaaaaacagatttgtggtgaccattttaaccatgtttactctgataactctatactcaacgatcatccccatttccctttacgtgtccattgagatgatcaaattcatacagtgcacacaattcattaataacgatcttcatatgtaccatgctgagagtaacacccctgctttggcacggacttctaatcttaatgaggagcttggacaggttgaatatatattttctgacaaaactggcacacttacaagaaatctgatggaattctttaaatgctcaattggtggagaaatgtatggaactggcatcacagagattgagaaaggaggagcagaacgggctggaattagaatcgatgatgatgagggcaaaagatctgctaacgcggtccatgaaaaaggattcaattttgatgacgctagaatcatgcgcggtgcatggagaaacgaacctaatcctgaggcttgcaaggaattctttagatgccttgcaatctgtcatacagttcttccagagggtgaggagactccggaaaagataagttaccaggctgcctcacctgatgaggctgcacttgtgtctgctgctaaaaattttggtttcttcttttataggcgtacacccacaactgttatggttcgtgagtcacatgttgaaaggatggggagtatacaagatgttccatatgaaattctgaatgttctagaattcaacagtacaagaaagcgacaatcggtggtttgccggttcacaaatggaagactagttctctattgcaagggtgctgataatgttgtatatgaacgattggctgatggaaatcatgatatgaaaaagatcagtagagagcatctagagcaatttggttctgctggcttacgtacactttgtcttgcctatcgggatcttagtagggagcaatacgaaagctggaacgagaagtttgtacaagcaaagtcatctttacgagatcgtgataagaagcttgatgaggtggctgaattgattgaaaaagaccttatattagttgggtgcacagctatagaggacaaactgcaagaaggggtgccaacctgcattgaaactctctctgcagcgggcataaaaatttgggtgttaactggagataagatggaaacagcgattaacattgcatatgcatgtagcttggtaaacaatgacaccaaacagttcatcattagttcagagacaggcgctattagggaggctgaagaccggggtgaccctgtggaaattgcacgtgttattaaagattcagtaaaacagaatctgaaaagatttcacgaggaagcccggcattctttaattagcacccctgaaaggaagttggctctcattattgatggtagatgcctaatgtacgcactggacccaactcttcgtgttgatcttcttggattgagtctaagttgccactctgttatatgctgccgagtttctccgctgcagaaggcacaggttacaagcttagttaggaagggtgctgagaaaataactctcagcattggtgacggtgctaatgatgtgagtatgattcaagctgctcatgttgggattggcatcagtggccaagaaggaatgcaagctgttatggctagtgactttgccattgcacagtttcgttttcttactgatttgcttcttgtacatggacgatggtcttacttgagactgtgcaaggttatcacatacttcttctacaagaatctgacatttacactaactcagttctggttcacttttcaaactggtttttctggccagcggttttatgatgactggtttcagtctctatataacgttatttttactgcgctacctgtaattatagttggattgtttgataaggatgttagcgcgtcactgtcaaaaaaatacccacagctttacaaggaaggcatcaggaattcattcttcaagtggagagtgattgcagtgtggggtttctttgccttctatcagtcaatagtgttcttctacttcactgcagctgcaagtcggcatggtcagggttcatctggcaagattcttggcctatgggatgttagcaccatggcatttacttgtgtcgtggtgactgtgaatctccgccttctcatggcatgcaactctataacgaggtggcattacataagtgtggcgggcagtatagtggcctggtttatgtttattttcatatactctgcaataatgacgtcatttgacagacaggaaaatgtgtattttgtgatttatgttctgatgagcacctttttcttctatctgacaatcgtacttgttccgatcatcgccctgtttggggatttcctatatctatcgatccaaaggtggctcttcccctacgactaccaaataatacaggagcaacacaaggatgagccacacgagtacagcagggtgccactaccagagaccagccacctaagcccagaggaagcgagaagctacatgatctcgatgctcccacgggagtcatcaaagcacactggctttgccttcgactccccaggatacgagtcgttcttcgcctcgcagcaaggcatcggcgtgccacacaagccgtgggatgtagcccggagagcgagcatgaaaccgcaacgagcaggaaaatcctagtcgggcgaacacctctccgctgtgtaaagtcttgtatatctggtttcttgaccacaggagtttttgtataggtagcagtactgtagcccttttttcgtgtttgtcacccatatgttgttttgggatgaaaagtaggcaacggtccgtttggctgttaaacaatcatgtagggatacttggtagataaaaccaaaggggtattggacatgcagttaggaattttagtttctggcgttcattgcgtgatgtagtcgagttgattggtcggcccgccatgcaacttaaatcatgttactattattggaggcctgtgcattgatcatatcccattttatttcaatataagaacacatcctactcc

SEQ ID NO: 4419 - DNA, 4294 bp, Zea Mays
ccctgacgcccacgcgaaagaaagttgacgcccacgccccacgcgcccaggaacaccaccggtgacgcgtgatcagactcgagaaccaatcccccccgactccctagccgccgcgctaaaatctacacaaagcctcgcaaatctggcctgatctcgcgcccccgatctcgcgctcgttcgcagcccaccgggaggtcctccagcctcccgccagatctcagcgtcgttcgttcgcttttagatttggtggggtaagggaggggaggcgggatgagcgcgcggataaaggagatggtgcgtgtggccacggcgcggctgggcggtgagcaggtgggggctggcggggtttcctcctcgggtatcgcgcgtcgggagtccacggcgcggctcggcggcgggggtacaagcctccggaggcagccgcagccgatggcgccctccgtgcgcaccgtctgctgcaacgaccgcgaggccaacgcccctgtcgggtacaagggaaattctgtgtcgactacaaagtacagcatcctgactttcctacctaaaggattatttgagcaggcgggttgcaaatctttactttctcatgatctctatcttgtctactacacctatcagtccagttcatcctgtcactaatgtcgttcctctaagtcttgtgcttctggtgtctctcatcaaggaagcttttgaggattgggtcaatgttgggaaagtactccatggaaacgactgcaggttggagatattgtgaggatcaagcaagatggttatttccctgctgacttgctcttcctatcaagtacaaaccctgatggtatctgctacatagagacagcaaatcttgatggggaaacaaatctgaaaataaggaaggctttggagaaaacttgggactatgtaattcctgaaaaggcttctgagttcaaaggtgaagtgcagtgtgaacagccaaacaattccctttatacttttactggcaatcttatcatggacaagcaaactatacccctctcaccgaaccagttactcctaaggggatgcagtcttcgtaatacagaatacattgttggcgttgtcatattcactgggcacgagacaaaagttatgatgaattccatgaatgttccctcaaaaagaagtacattggaaaaaaagctagacaagcttatccttgctctttttgcaaccctctttacaatgtgtgttattggcgccattggaagtggcatatttattaatgaaaaatacttttatcttggattgcgtgggcatgtggaggatcagttcaatcctaaaaacagatttgtggtgaccattttaaccatgtttactctgataactctatactcaacgatcatccccatttccctttacgtgtccattgagatgatcaaattcatacagtgcacacaattcattaataacgatcttcatatgtaccatgctgagagtaacacccctgctttggcacggacttctaatcttaatgaggagcttggacaggttgaatatatattttctgacaaaactggcacacttacaagaaatctgatggaattctttaaatgctcaattggtggagaaatgtatggaactggcatcacagagattgagaaaggaggagcagaacgggctggaattagaatcgatgatgatgagggcaaaagatctgctaacgcggtccatgaaaaaggattcaattttgatgacgctagaatcatgcgcggtgcatggagaaacgaacctaatcctgaggcttgcaaggaattctttagatgccttgcaatctgtcatacagttcttccagagggtgaggagactccggaaaagataagttaccaggctgcctcacctgatgaggctgcacttgtgtctgctgctaaaaattttggtttcttcttttataggcgtacacccacaactgttatggttcgtgagtcacatgttgaaaggatggggagtatacaagatgttccatatgaaattctgaatgttctagaattcaacagtacaagaaagcgacaatcggtggtttgccggttcacaaatggaagactagttctctattgcaagggtgctgataatgttgtatatgaacgattggctgatggaaatcatgatatgaaaaagatcagtagagagcatctagagcaatttggttctgctggcttacgtacactttgtcttgcctatcgggatcttagtagggagcaatacgaaagctggaacgagaagtttgtacaagcaaagtcatctttacgagatcgtgataagaagcttgatgaggtggctgaattgattgaaaaagaccttatattagttgggtgcacagctatagaggacaaactgcaagaaggggtgccaacctgcattgaaactctctctgcagcgggcataaaaatttgggtgttaactggagataagatggaaacagcgattaacattgcatatgcatgtagcttggtaaacaatgacaccaaacagttcatcattagttcagagacaggcgctattagggaggctgaagaccggggtgaccctgtggaaattgcacgtgttattaaagattcagtaaaacagaatctgaaaagatttcacgaggaagcccggcattctttaattagcacccctgaaaggaagttggctctcattattgatggtagatgcctaatgtacgcactggacccaactcttcgtgttgatcttcttggattgagtctaagttgccactctgttatatgctgccgagtttctccgctgcagaaggcacaggttacaagcttagttaggaagggtgctgagaaaataactctcagcattggtgacggtgctaatgatgtgagtatgattcaagctgctcatgttgggattggcatcagtggccaagaaggaatgcaagctgttatggctagtgactttgccattgcacagtttcgttttcttactgatttgcttcttgtacatggacgatggtcttacttgagactgtgcaaggttatcacatacttcttctacaagaatctgacatttacactaactcagttctggttcacttttcaaactggtttttctggccagcggttttatgatgactggtttcagtctctatataacgttatttttactgcgctacctgtaattatagttggattgtttgataaggatgttagcgcgtcactgtcaaaaaaatacccacagctttacaaggaaggcatcaggaattcattcttcaagtggagagtgattgcagtgtggggtttctttgccttctatcagtcaatagtgttcttctacttcactgcagctgcaagtcggcatggtcagggttcatctggcaagattcttggcctatgggatgttagcaccatggcatttacttgtgtcgtggtgactgtgaatctccgccttctcatggcatgcaactctataacgaggtggcattacataagtgtggcgggcagtatagtggcctggtttatgtttattttcatatactctgcaataatgacgtcatttgacagacaggaaaatgtgtattttgtgatttatgttctgatgagcacctttttcttctatctgacaatcgtacttgttccgatcatcgccctgtttggggatttcctatatctatcgatccaaaggtggctcttcccctacgactaccaaataatacaggagcaacacaaggatgagccacacgagtacagcagggtgccactaccagagaccagccacctaagcccagaggaagcgagaagctacatgatctcgatgctcccacgggagtcatcaaagcacactggctttgccttcgactccccaggatacgagtcgttcttcgcctcgcagcaaggcatcggcgtgccacacaagccgtgggatgtagcccggagagcgagcatgaaaccgcaacgagcaggaaaatcctagtcgggcgaacacctctccgctgtgtaaagtcttgtatatctggtttcttgaccacaggagtttttgtataggtagcagtactgtagcccttttttcgtgtttgtcacccatatgttgttttgggatgaaaagtaggcaacggtccgtttggctgttaaacaatcatgtagggatacttggtagataaaaccaaaggggtattggacatgcagttaggaattttagtttctggcgttcattgcgtgatgtagtcgagttgattggtcggcccgccatgcaacttaaatcatgttactattattggaggcctgtgcattgatcatatcccattttatttcaatataagaacacatcctactcc

SEQ ID NO: 4420 - DNA, 4299 bp, Zea Mays
ccctgacgcccacgcgaaagaaagttgacgcccacgccccacgcgcccaggaacaccaccggtgacgcgtgatcagactcgagaaccaatcccccccgactccctagccgccgcgctaaaatctacacaaagcctcgcaaatctggcctgatctcgcgcccccgatctcgcgctcgttcgcagcccaccgggaggtcctccagcctcccgccagatctcagcgtcgttcgttcgcttttagatttggtggggtaagggaggggaggcgggatgagcgcgcggataaaggagatggtgcgtgtggccacggcgcggctgggcggtgagcaggtgggggctggcggggtttcctcctcgggtatcgcgcgtcgggagtccacggcgcggctcggcggcgggggtacaagcctccggaggcagccgcagccgatggcgccctccgtgcgcaccgtctgctgcaacgaccgcgaggccaacgcccctgtcgggtacaagggaaattctgtgtcgactacaaagtacagcatcctgactttcctacctaaaggattatttgagcagttcaggcgggttgcaaatctttactttctcatgatctctatcttgtctactacacctatcagtccagttcatcctgtcactaatgtcgttcctctaagtcttgtgcttctggtgtctctcatcaaggaagcttttgaggattgggtcaatgttgggaaagtactccatggaaacgactgcaggttggagatattgtgaggatcaagcaagatggttatttccctgctgacttgctcttcctatcaagtacaaaccctgatggtatctgctacatagagacagcaaatcttgatggggaaacaaatctgaaaataaggaaggctttggagaaaacttgggactatgtaattcctgaaaaggcttctgagttcaaaggtgaagtgcagtgtgaacagccaaacaattccctttatacttttactggcaatcttatcatggacaagcaaactatacccctctcaccgaaccagttactcctaaggggatgcagtcttcgtaatacagaatacattgttggcgttgtcatattcactgggcacgagacaaaagttatgatgaattccatgaatgttccctcaaaaagaagtacattggaaaaaaagctagacaagcttatccttgctctttttgcaaccctctttacaatgtgtgttattggcgccattggaagtggcatatttattaatgaaaaatacttttatcttggattgcgtgggcatgtggaggatcagttcaatcctaaaaacagatttgtggtgaccattttaaccatgtttactctgataactctatactcaacgatcatccccatttccctttacgtgtccattgagatgatcaaattcatacagtgcacacaattcattaataacgatcttcatatgtaccatgctgagagtaacacccctgctttggcacggacttctaatcttaatgaggagcttggacaggttgaatatatattttctgacaaaactggcacacttacaagaaatctgatggaattctttaaatgctcaattggtggagaaatgtatggaactggcatcacagagattgagaaaggaggagcagaacgggctggaattagaatcgatgatgatgagggcaaaagatctgctaacgcggtccatgaaaaaggattcaattttgatgacgctagaatcatgcgcggtgcatggagaaacgaacctaatcctgaggcttgcaaggaattctttagatgccttgcaatctgtcatacagttcttccagagggtgaggagactccggaaaagataagttaccaggctgcctcacctgatgaggctgcacttgtgtctgctgctaaaaattttggtttcttcttttataggcgtacacccacaactgttatggttcgtgagtcacatgttgaaaggatggggagtatacaagatgttccatatgaaattctgaatgttctagaattcaacagtacaagaaagcgacaatcggtggtttgccggttcacaaatggaagactagttctctattgcaagggtgctgataatgttgtatatgaacgattggctgatggaaatcatgatatgaaaaagatcagtagagagcatctagagcaatttggttctgctggcttacgtacactttgtcttgcctatcgggatcttagtagggagcaatacgaaagctggaacgagaagtttgtacaagcaaagtcatctttacgagatcgtgataagaagcttgatgaggtggctgaattgattgaaaaagaccttatattagttgggtgcacagctatagaggacaaactgcaagaaggggtgccaacctgcattgaaactctctctgcagcgggcataaaaatttgggtgttaactggagataagatggaaacagcgattaacattgcatatgcatgtagcttggtaaacaatgacaccaaacagttcatcattagttcagagacaggcgctattagggaggctgaagaccggggtgaccctgtggaaattgcacgtgttattaaagattcagtaaaacagaatctgaaaagatttcacgaggaagcccggcattctttaattagcacccctgaaaggaagttggctctcattattgatggtagatgcctaatgtacgcactggacccaactcttcgtgttgatcttcttggattgagtctaagttgccactctgttatatgctgccgagtttctccgctgcagaaggcacaggttacaagcttagttaggaagggtgctgagaaaataactctcagcattggtgacggtgctaatgatgtgagtatgattcaagctgctcatgttgggattggcatcagtggccaagaaggaatgcaagctgttatggctagtgactttgccattgcacagtttcgttttcttactgatttgcttcttgtacatggacgatggtcttacttgagactgtgcaaggttatcacatacttcttctacaagaatctgacatttacactaactcagttctggttcacttttcaaactggtttttctggccagcggttttatgatgactggtttcagtctctatataacgttatttttactgcgctacctgtaattatagttggattgtttgataaggatgttagcgcgtcactgtcaaaaaaatacccacagctttacaaggaaggcatcaggaattcattcttcaagtggagagtgattgcagtgtggggtttctttgccttctatcagtcaatagtgttcttctacttcactgcagctgcaagtcggcatggtcagggttcatctggcaagattcttggcctatgggatgttagcaccatggcatttacttgtgtcgtggtgactgtgaatctccgccttctcatggcatgcaactctataacgaggtggcattacataagtgtggcgggcagtatagtggcctggtttatgtttattttcatatactctgcaataatgacgtcatttgacagacaggaaaatgtgtattttgtgatttatgttctgatgagcacctttttcttctatctgacaatcgtacttgttccgatcatcgccctgtttggggatttcctatatctatcgatccaaaggtggctcttcccctacgactaccaaataatacaggagcaacacaaggatgagccacacgagtacagcagggtgccactaccagagaccagccacctaagcccagaggaagcgagaagctacatgatctcgatgctcccacgggagtcatcaaagcacactggctttgccttcgactccccaggatacgagtcgttcttcgcctcgcagcaaggcatcggcgtgccacacaagccgtgggatgtagcccggagagcgagcatgaaaccgcaacgagcaggaaaatcctagtcgggcgaacacctctccgctgtgtaaagtcttgtatatctggtttcttgaccacaggagtttttgtataggtagcagtactgtagcccttttttcgtgtttgtcacccatatgttgttttgggatgaaaagtaggcaacggtccgtttggctgttaaacaatcatgtagggatacttggtagataaaaccaaaggggtattggacatgcagttaggaattttagtttctggcgttcattgcgtgatgtagtcgagttgattggtcggcccgccatgcaacttaaatcatgttactattattggaggcctgtgcattgatcatatcccattttatttcaatataagaacacatcctactcc

SEQ ID NO: 4421 - DNA, 4359 bp, Zea Mays
ccctgacgcccacgcgaaagaaagttgacgcccacgccccacgcgcccaggaacaccaccggtgacgcgtgatcagactcgagaaccaatcccccccgactccctagccgccgcgctaaaatctacacaaagcctcgcaaatctggcctgatctcgcgcccccgatctcgcgctcgttcgcagcccaccgggaggtcctccagcctcccgccagatctcagcgtcgttcgttcgcttttagatttggtggggtaagggaggggaggcgggatgagcgcgcggataaaggagatggtgcgtgtggccacggcgcggctgggcggtgagcaggtgggggctggcggggtttcctcctcgggtatcgcgcgtcgggagtccacggcgcggctcggcggcgggggtacaagcctccggaggcagccgcagccgatggcgccctccgtgcgcaccgtctgctgcaacgaccgcgaggccaacgcccctgtcgggtacaagggaaattctgtgtcgactacaaagtacagcatcctgactttcctacctaaaggattatttgagcagttcaggcgggttgcaaatctttactttctcatgatctctatcttgtctactacacctatcagtccagttcatcctgtcactaatgtcgttcctctaagtcttgtgcttctggtgtctctcatcaaggaagcttttgaggattggaagcgtttccagaatgatatgtcaattaacaatgcacatgtcgatgtattgcaaggtcaatgttgggaaagtactccatggaaacgactgcaggttggagatattgtgaggagcagatcaagcaagatggttatttccctgctgacttgctcttcctatcaagtacaaaccctgatggtatctgctacatagagacagcaaatcttgatggggaaacaaatctgaaaataaggaaggctttggagaaaacttgggactatgtaattcctgaaaaggcttctgagttcaaaggtgaagtgcagtgtgaacagccaaacaattccctttatacttttactggcaatcttatcatggacaagcaaactatacccctctcaccgaaccagttactcctaaggggatgcagtcttcgtaatacagaatacattgttggcgttgtcatattcactgggcacgagacaaaagttatgatgaattccatgaatgttccctcaaaaagaagtacattggaaaaaaagctagacaagcttatccttgctctttttgcaaccctctttacaatgtgtgttattggcgccattggaagtggcatatttattaatgaaaaatacttttatcttggattgcgtgggcatgtggaggatcagttcaatcctaaaaacagatttgtggtgaccattttaaccatgtttactctgataactctatactcaacgatcatccccatttccctttacgtgtccattgagatgatcaaattcatacagtgcacacaattcattaataacgatcttcatatgtaccatgctgagagtaacacccctgctttggcacggacttctaatcttaatgaggagcttggacaggttgaatatatattttctgacaaaactggcacacttacaagaaatctgatggaattctttaaatgctcaattggtggagaaatgtatggaactggcatcacagagattgagaaaggaggagcagaacgggctggaattagaatcgatgatgatgagggcaaaagatctgctaacgcggtccatgaaaaaggattcaattttgatgacgctagaatcatgcgcggtgcatggagaaacgaacctaatcctgaggcttgcaaggaattctttagatgccttgcaatctgtcatacagttcttccagagggtgaggagactccggaaaagataagttaccaggctgcctcacctgatgaggctgcacttgtgtctgctgctaaaaattttggtttcttcttttataggcgtacacccacaactgttatggttcgtgagtcacatgttgaaaggatggggagtatacaagatgttccatatgaaattctgaatgttctagaattcaacagtacaagaaagcgacaatcggtggtttgccggttcacaaatggaagactagttctctattgcaagggtgctgataatgttgtatatgaacgattggctgatggaaatcatgatatgaaaaagatcagtagagagcatctagagcaatttggttctgctggcttacgtacactttgtcttgcctatcgggatcttagtagggagcaatacgaaagctggaacgagaagtttgtacaagcaaagtcatctttacgagatcgtgataagaagcttgatgaggtggctgaattgattgaaaaagaccttatattagttgggtgcacagctatagaggacaaactgcaagaaggggtgccaacctgcattgaaactctctctgcagcgggcataaaaatttgggtgttaactggagataagatggaaacagcgattaacattgcatatgcatgtagcttggtaaacaatgacaccaaacagttcatcattagttcagagacaggcgctattagggaggctgaagaccggggtgaccctgtggaaattgcacgtgttattaaagattcagtaaaacagaatctgaaaagatttcacgaggaagcccggcattctttaattagcacccctgaaaggaagttggctctcattattgatggtagatgcctaatgtacgcactggacccaactcttcgtgttgatcttcttggattgagtctaagttgccactctgttatatgctgccgagtttctccgctgcagaaggcacaggttacaagcttagttaggaagggtgctgagaaaataactctcagcattggtgacggtgctaatgatgtgagtatgattcaagctgctcatgttgggattggcatcagtggccaagaaggaatgcaagctgttatggctagtgactttgccattgcacagtttcgttttcttactgatttgcttcttgtacatggacgatggtcttacttgagactgtgcaaggttatcacatacttcttctacaagaatctgacatttacactaactcagttctggttcacttttcaaactggtttttctggccagcggttttatgatgactggtttcagtctctatataacgttatttttactgcgctacctgtaattatagttggattgtttgataaggatgttagcgcgtcactgtcaaaaaaatacccacagctttacaaggaaggcatcaggaattcattcttcaagtggagagtgattgcagtgtggggtttctttgccttctatcagtcaatagtgttcttctacttcactgcagctgcaagtcggcatggtcagggttcatctggcaagattcttggcctatgggatgttagcaccatggcatttacttgtgtcgtggtgactgtgaatctccgccttctcatggcatgcaactctataacgaggtggcattacataagtgtggcgggcagtatagtggcctggtttatgtttattttcatatactctgcaataatgacgtcatttgacagacaggaaaatgtgtattttgtgatttatgttctgatgagcacctttttcttctatctgacaatcgtacttgttccgatcatcgccctgtttggggatttcctatatctatcgatccaaaggtggctcttcccctacgactaccaaataatacaggagcaacacaaggatgagccacacgagtacagcagggtgccactaccagagaccagccacctaagcccagaggaagcgagaagctacatgatctcgatgctcccacgggagtcatcaaagcacactggctttgccttcgactccccaggatacgagtcgttcttcgcctcgcagcaaggcatcggcgtgccacacaagccgtgggatgtagcccggagagcgagcatgaaaccgcaacgagcaggaaaatcctagtcgggcgaacacctctccgctgtgtaaagtcttgtatatctggtttcttgaccacaggagtttttgtataggtagcagtactgtagcccttttttcgtgtttgtcacccatatgttgttttgggatgaaaagtaggcaacggtccgtttggctgttaaacaatcatgtagggatacttggtagataaaaccaaaggggtattggacatgcagttaggaattttagtttctggcgttcattgcgtgatgtagtcgagttgattggtcggcccgccatgcaacttaaatcatgttactattattggaggcctgtgcattgatcatatcccattttatttcaatataagaacacatcctactcc

SEQ ID NO: 4422 - DNA, 4504 bp, Zea Mays
ccctgacgcccacgcgaaagaaagttgacgcccacgccccacgcgcccaggaacaccaccggtgacgcgtgatcagactcgagaaccaatcccccccgactccctagccgccgcgctaaaatctacacaaagcctcgcaaatctggcctgatctcgcgcccccgatctcgcgctcgttcgcagcccaccgggaggtcctccagcctcccgccagatctcagcgtcgttcgttcgcttttagatttggtggggtaagggaggggaggcgggatgagcgcgcggataaaggagatggtgcgtgtggccacggcgcggctgggcggtgagcaggtgggggctggcggggtttcctcctcgggtatcgcgcgtcgggagtccacggcgcggctcggcggcgggggtacaagcctccggaggcagccgcagccgatggcgccctccgtgcgcaccgtctgctgcaacgaccgcgaggccaacgcccctgtcgggtacaagggaaattctgtgtcgactacaaagtacagcatcctgactttcctacctaaaggattatttgagcagttcaggcgggttgcaaatctttactttctcatgatctctatcttgtctactacacctatcagtccagttcatcctgtcactaatgtcgttcctctaagtcttgtgcttctggtgtctctcatcaaggaagcttttgaggattgggtcaatgttgggaaagtactccatggaaacgactgcaggttggagatattgtgaggatcaagcaagatggttatttccctgctgacttgctcttcctatcaagtacaaaccctgatggtatctgctacatagagacagcaaatcttgatggggaaacaaatctgaaaataaggaaggctttggagaaaacttgggactatgtaattcctgaaaaggcttctgagttcaaaggtgaagtgcagtgtgaacagccaaacaattccctttatacttttactggcaatcttatcatggacaagcaaactatacccctctcaccgaaccagttactcctaaggacaagcaacatatttggagttcctaagattggccgcattgcattcaccggcggctgctccaatacaccggcgccggctctccaggactccaccagcgttgtctccagaccagcaccggtgagcaatgacgaagaggacttgatgactggtgctggtcccttccttctcccccttttctatcttattatcagtatgtctacactctgcggcgcctggtcggtcctccgggacgaccagctggtcgctcgacttgaaatcagtggtggtaaaggttatgatgaattccatgaatgttccctcaaaaagaagtacattggaaaaaaagctagacaagcttatccttgctctttttgcaaccctctttacaatgtgtgttattggcgccattggaagtggcatatttattaatgaaaaatacttttatcttggattgcgtgggcatgtggaggatcagttcaatcctaaaaacagatttgtggtgaccattttaaccatgtttactctgataactctatactcaacgatcatccccatttccctttacgtgtccattgagatgatcaaattcatacagtgcacacaattcattaataacgatcttcatatgtaccatgctgagagtaacacccctgctttggcacggacttctaatcttaatgaggagcttggacaggttgaatatatattttctgacaaaactggcacacttacaagaaatctgatggaattctttaaatgctcaattggtggagaaatgtatggaactggcatcacagagattgagaaaggaggagcagaacgggctggaattagaatcgatgatgatgagggcaaaagatctgctaacgcggtccatgaaaaaggattcaattttgatgacgctagaatcatgcgcggtgcatggagaaacgaacctaatcctgaggcttgcaaggaattctttagatgccttgcaatctgtcatacagttcttccagagggtgaggagactccggaaaagataagttaccaggctgcctcacctgatgaggctgcacttgtgtctgctgctaaaaattttggtttcttcttttataggcgtacacccacaactgttatggttcgtgagtcacatgttgaaaggatggggagtatacaagatgttccatatgaaattctgaatgttctagaattcaacagtacaagaaagcgacaatcggtggtttgccggttcacaaatggaagactagttctctattgcaagggtgctgataatgttgtatatgaacgattggctgatggaaatcatgatatgaaaaagatcagtagagagcatctagagcaatttggttctgctggcttacgtacactttgtcttgcctatcgggatcttagtagggagcaatacgaaagctggaacgagaagtttgtacaagcaaagtcatctttacgagatcgtgataagaagcttgatgaggtggctgaattgattgaaaaagaccttatattagttgggtgcacagctatagaggacaaactgcaagaaggggtgccaacctgcattgaaactctctctgcagcgggcataaaaatttgggtgttaactggagataagatggaaacagcgattaacattgcatatgcatgtagcttggtaaacaatgacaccaaacagttcatcattagttcagagacaggcgctattagggaggctgaagaccggggtgaccctgtggaaattgcacgtgttattaaagattcagtaaaacagaatctgaaaagatttcacgaggaagcccggcattctttaattagcacccctgaaaggaagttggctctcattattgatggtagatgcctaatgtacgcactggacccaactcttcgtgttgatcttcttggattgagtctaagttgccactctgttatatgctgccgagtttctccgctgcagaaggcacaggttacaagcttagttaggaagggtgctgagaaaataactctcagcattggtgacggtgctaatgatgtgagtatgattcaagctgctcatgttgggattggcatcagtggccaagaaggaatgcaagctgttatggctagtgactttgccattgcacagtttcgttttcttactgatttgcttcttgtacatggacgatggtcttacttgagactgtgcaaggttatcacatacttcttctacaagaatctgacatttacactaactcagttctggttcacttttcaaactggtttttctggccagcggttttatgatgactggtttcagtctctatataacgttatttttactgcgctacctgtaattatagttggattgtttgataaggatgttagcgcgtcactgtcaaaaaaatacccacagctttacaaggaaggcatcaggaattcattcttcaagtggagagtgattgcagtgtggggtttctttgccttctatcagtcaatagtgttcttctacttcactgcagctgcaagtcggcatggtcagggttcatctggcaagattcttggcctatgggatgttagcaccatggcatttacttgtgtcgtggtgactgtgaatctccgccttctcatggcatgcaactctataacgaggtggcattacataagtgtggcgggcagtatagtggcctggtttatgtttattttcatatactctgcaataatgacgtcatttgacagacaggaaaatgtgtattttgtgatttatgttctgatgagcacctttttcttctatctgacaatcgtacttgttccgatcatcgccctgtttggggatttcctatatctatcgatccaaaggtggctcttcccctacgactaccaaataatacaggagcaacacaaggatgagccacacgagtacagcagggtgccactaccagagaccagccacctaagcccagaggaagcgagaagctacatgatctcgatgctcccacgggagtcatcaaagcacactggctttgccttcgactccccaggatacgagtcgttcttcgcctcgcagcaaggcatcggcgtgccacacaagccgtgggatgtagcccggagagcgagcatgaaaccgcaacgagcaggaaaatcctagtcgggcgaacacctctccgctgtgtaaagtcttgtatatctggtttcttgaccacaggagtttttgtataggtagcagtactgtagcccttttttcgtgtttgtcacccatatgttgttttgggatgaaaagtaggcaacggtccgtttggctgttaaacaatcatgtagggatacttggtagataaaaccaaaggggtattggacatgcagttaggaattttagtttctggcgttcattgcgtgatgtagtcgagttgattggtcggcccgccatgcaacttaaatcatgttactattattggaggcctgtgcattgatcatatcccattttatttcaatataagaacacatcctactcc

SEQ ID NO: 4423 - DNA, 4258 bp, Zea Mays
ccctgacgcccacgcgaaagaaagttgacgcccacgccccacgcgcccaggaacaccaccggtgacgcgtgatcagactcgagaaccaatcccccccgactccctagccgccgcgctaaaatctacacaaagcctcgcaaatctggcctgatctcgcgcccccgatctcgcgctcgttcgcagcccaccgggaggtcctccagcctcccgccagatctcagcgtcgttcgttcgcttttagatttggtggggtaagggaggggaggcgggatgagcgcgcggataaaggagatggtgcgtgtggccacggcgcggctgggcggtgagcaggtgggggctggcggggtttcctcctcgggtatcgcgcgtcgggagtccacggcgcggctcggcggcgggggtacaagcctccggaggcagccgcagccgatggcgccctccgtgcgcaccgtctgctgcaacgaccgcgaggccaacgcccctgtcgggtacaagggaaattctgtgtcgactacaaagtacagcatcctgactttcctacctaaaggattatttgagcagttcaggcgggttgcaaatctttactttctcatgatctctatcttgtctactacacctatcagtccagttcatcctgtcactaatgtcgttcctctaagtcttgtgcttctggtgtctctcatcaaggaagcttttgaggattggaagcgtttccagaatgatatgtcaattaacaatgcacatgtcgatgtattgcaaggtcaatgttgggaaagtactccatggaaacgactgcaggttggagatattgtgaggacagcaaatcttgatggggaaacaaatctgaaaataaggaaggctttggagaaaacttgggactatgtaattcctgaaaaggcttctgagttcaaaggtgaagtgcagtgtgaacagccaaacaattccctttatacttttactggcaatcttatcatggacaagcaaactatacccctctcaccgaaccagttactcctaaggggatgcagtcttcgtaatacagaatacattgttggcgttgtcatattcactgggcacgagacaaaagttatgatgaattccatgaatgttccctcaaaaagaagtacattggaaaaaaagctagacaagcttatccttgctctttttgcaaccctctttacaatgtgtgttattggcgccattggaagtggcatatttattaatgaaaaatacttttatcttggattgcgtgggcatgtggaggatcagttcaatcctaaaaacagatttgtggtgaccattttaaccatgtttactctgataactctatactcaacgatcatccccatttccctttacgtgtccattgagtgcacacaattcattaataacgatcttcatatgtaccatgctgagagtaacacccctgctttggcacggacttctaatcttaatgaggagcttggacaggttgaatatatattttctgacaaaactggcacacttacaagaaatctgatggaattctttaaatgctcaattggtggagaaatgtatggaactggcatcacagagattgagaaaggaggagcagaacgggctggaattagaatcgatgatgatgagggcaaaagatctgctaacgcggtccatgaaaaaggattcaattttgatgacgctagaatcatgcgcggtgcatggagaaacgaacctaatcctgaggcttgcaaggaattctttagatgccttgcaatctgtcatacagttcttccagagggtgaggagactccggaaaagataagttaccaggctgcctcacctgatgaggctgcacttgtgtctgctgctaaaaattttggtttcttcttttataggcgtacacccacaactgttatggttcgtgagtcacatgttgaaaggatggggagtatacaagatgttccatatgaaattctgaatgttctagaattcaacagtacaagaaagcgacaatcggtggtttgccggttcacaaatggaagactagttctctattgcaagggtgctgataatgttgtatatgaacgattggctgatggaaatcatgatatgaaaaagatcagtagagagcatctagagcaatttggttctgctggcttacgtacactttgtcttgcctatcgggatcttagtagggagcaatacgaaagctggaacgagaagtttgtacaagcaaagtcatctttacgagatcgtgataagaagcttgatgaggtggctgaattgattgaaaaagaccttatattagttgggtgcacagctatagaggacaaactgcaagaaggggtgccaacctgcattgaaactctctctgcagcgggcataaaaatttgggtgttaactggagataagatggaaacagcgattaacattgcatatgcatgtagcttggtaaacaatgacaccaaacagttcatcattagttcagagacaggcgctattagggaggctgaagaccggggtgaccctgtggaaattgcacgtgttattaaagattcagtaaaacagaatctgaaaagatttcacgaggaagcccggcattctttaattagcacccctgaaaggaagttggctctcattattgatggtagatgcctaatgtacgcactggacccaactcttcgtgttgatcttcttggattgagtctaagttgccactctgttatatgctgccgagtttctccgctgcagaaggcacaggttacaagcttagttaggaagggtgctgagaaaataactctcagcattggtgacggtgctaatgatgtgagtatgattcaagctgctcatgttgggattggcatcagtggccaagaaggaatgcaagctgttatggctagtgactttgccattgcacagtttcgttttcttactgatttgcttcttgtacatggacgatggtcttacttgagactgtgcaaggttatcacatacttcttctacaagaatctgacatttacactaactcagttctggttcacttttcaaactggtttttctggccagcggttttatgatgactggtttcagtctctatataacgttatttttactgcgctacctgtaattatagttggattgtttgataaggatgttagcgcgtcactgtcaaaaaaatacccacagctttacaaggaaggcatcaggaattcattcttcaagtggagagtgattgcagtgtggggtttctttgccttctatcagtcaatagtgttcttctacttcactgcagctgcaagtcggcatggtcagggttcatctggcaagattcttggcctatgggatgttagcaccatggcatttacttgtgtcgtggtgactgtgaatctccgccttctcatggcatgcaactctataacgaggtggcattacataagtgtggcgggcagtatagtggcctggtttatgtttattttcatatactctgcaataatgacgtcatttgacagacaggaaaatgtgtattttgtgatttatgttctgatgagcacctttttcttctatctgacaatcgtacttgttccgatcatcgccctgtttggggatttcctatatctatcgatccaaaggtggctcttcccctacgactaccaaataatacaggagcaacacaaggatgagccacacgagtacagcagggtgccactaccagagaccagccacctaagcccagaggaagcgagaagctacatgatctcgatgctcccacgggagtcatcaaagcacactggctttgccttcgactccccaggatacgagtcgttcttcgcctcgcagcaaggcatcggcgtgccacacaagccgtgggatgtagcccggagagcgagcatgaaaccgcaacgagcaggaaaatcctagtcgggcgaacacctctccgctgtgtaaagtcttgtatatctggtttcttgaccacaggagtttttgtataggtagcagtactgtagcccttttttcgtgtttgtcacccatatgttgttttgggatgaaaagtaggcaacggtccgtttggctgttaaacaatcatgtagggatacttggtagataaaaccaaaggggtattggacatgcagttaggaattttagtttctggcgttcattgcgtgatgtagtcgagttgattggtcggcccgccatgcaacttaaatcatgttactattattggaggcctgtgcattgatcatatcccattttatttcaatataagaacacatcctactcc

SEQ ID NO: 4424 - DNA, 1344 bp, Zea Mays
gtcttaagtgcctatttagtatcttatcaagcaagatggttatttccctgctgacttgctcttcctatcaagtacaaaccctgatggtatctgctacatagagacagcaaatcttgatggggaaacaaatctgaaaataaggaaggctttggagaaaacttgggactatgtaattcctgaaaaggcttctgagttcaaagtgtgaacagccaaacaattccctttatacttttactggcaatcttatcatggacaagcaaactatacccctctcaccgaaccagttactcctaagggttatgatgaattccatgaatgttccctcaaaaagaagtacattggaaaaaaagctagacaagcttatccttgctctttttgcaaccctctttacaatgtgtgttattggcgccattggaaggtgaccattttaaccatgtttactctgataactctatactcaacgatcatccccatttccctttacgtgtccattgagatgatcaaattcatacagtgcacacaattcattaataacgatcttcatatgtaccatgctgagagtaacacccctgctttggcacggacttctaatcttaatgaggagcttggacagaaatgtatggaactggcatcacagagattgagaaaggaggagcagaacgggctggaattagaatcgatgatgatgagggcaaaagatctgctaacgcggtccatgaaaaaggattcaattttgatgacgctagaatcatgcgcggtgcatggagaaacgaacctaatcctgaggcttgcaaggaattctttagatgccttgcaatctgtcatacagttcttccagagggtgaggagactccggaaaagataagttaccaggctgcctcacctgatgaggctgcacttgtgtctgctgctaaaaattttggtttcttcttttataggcgtacacccacaactgttatggttcgtgagtcacatgttgaaaggatggggagtatacaagatgttccatatgaaattctgaatgttctagaattcaacagtacaagaaagcgacaatcggtggtttgccggttcacaaatggaagactagttctctattgcaagggtgctgataatgttgtatatgaacgattggctgatggaaatcatgatatgaaaaagatcagtagagagcatctagagcaatttggttctgctggcttacgtacactttgtcttgcctatcgggatcttagtagggagcaatacgaaagctggaacgagaagtttgtacaagcaaagtcatctttacgagatcgtgataagaagcttgatgaggtaatttcgattaaactttaaggggag

SEQ ID NO: 4425 - DNA, 3948 bp, Zea Mays
tcaagcaagatggttatttccctgctgacttgctcttcctatcaagtacaaaccctgatggtatctgctacatagagacagcaaatcttgatggggaaacaaatctgaaaataaggaaggctttggagaaaacttgggactatgtaattcctgaaaaggcttctgagttcaaaggtgaagtgcagtgtgaacagccaaacaattccctttatacttttactggcaatcttatcatggacaagcaaactatacccctctcaccgaaccagttactcctaagggttatgatgaattccatgaatgttccctcaaaaagaagtacattggaaaaaaagctagacaagcttatccttgctctttttgcaaccctctttacaatgtgtgttattggcgccattggaagagctcagagctagccgttaggttgacaggtgggccgcgcttggctgataggggggcaccggccgctgggggtccatcgtgcctcaccctcgagctttggatccctaaggacttcacgtcaaggtcctggatgcattcccgttatcccacgtacgacaccgaagtggagtgcttgcccttcggccttgccacgtcttccccctggctaggacccatcgcctacatgtccgagccgaggcaagatgggaagttagtaggaaatgtgatcgaggtcagggtttggcttcacccaatagataccatgctggagatagctgtggtcaatgtagtcaaggtagttgatgttgaggtggctgtatatgaagctgctgacacaaagaggtgccatgatgatgacaaagatgtgtcgggtggcatatttattaatgaaaaatacttttatcttggattgcgtgggcatgtggaggatcagttcaatcctaaaaacagatttgtggtgaccattttaaccatgtttactctgataactctatactcaacgatcatccccatttccctttacgtgtccattgagatgatcaaattcatacagtgcacacaattcattaataacgatcttcatatgtaccatgctgagagtaacacccctgctttggcacggacttctaatcttaatgaggagcttggacaggttgaatatatattttctgacaaaactggcacacttacaagaaatctgatggaattctttaaatgctcaattggtggagaaatgtatggaactggcatcacagagattgagaaaggaggagcagaacgggctggaattagaatcgatgatgatgagggcaaaagatctgctaacgcggtccatgaaaaaggattcaattttgatgacgctagaatcatgcgcggtgcatggagaaacgaacctaatcctgaggcttgcaaggaattctttagatgccttgcaatctgtcatacagttcttccagagggtgaggagactccggaaaagataagttaccaggctgcctcacctgatgaggctgcacttgtgtctgctgctaaaaattttggtttcttcttttataggcgtacacccacaactgttatggttcgtgagtcacatgttgaaaggatggggagtatacaagatgttccatatgaaattctgaatgttctagaattcaacagtacaagaaagcgacaatcggtggtttgccggttcacaaatggaagactagttctctattgcaagggtgctgataatgttgtatatgaacgattggctgatggaaatcatgatatgaaaaagatcagtagagagcatctagagcaatttggttctgctggcttacgtacactttgtcttgcctatcgggatcttagtagggagcaatacgaaagctggaacgagaagtttgtacaagcaaagtcatctttacgagatcgtgataagaagcttgatgaggtggctgaattgattgaaaaagaccttatattagttgggtgcacagctatagaggacaaactgcaagaaggggtgccaacctgcattgaaactctctctgcagcgggcataaaaatttgggtgttaactggagataagatggaaacagcgattaacattgcatatgcatgtagcttggtaaacaatgacaccaaacagttcatcattagttcagagacaggcgctattagggaggctgaagaccggggtgaccctgtggaaattgcacgtgttattaaagattcagtaaaacagaatctgaaaagatttcacgaggaagcccggcattctttaattagcacccctgaaaggaagttggctctcattattgatggtagatgcctaatgtacgcactggacccaactcttcgtgttgatcttcttggattgagtctaagttgccactctgttatatgctgccgagtttctccgctgcagaaggcacaggttacaagcttagttaggaagggtgctgagaaaataactctcagcattggtgacggtgctaatgatgtgagtatgattcaagctgctcatgttgggattggcatcagtggccaagaaggaatgcaagctgttatggctagtgactttgccattgcacagtttcgttttcttactgatttgcttcttgtacatggacgatggtcttacttgagactgtgcaaggttatcacatacttcttctacaagaatctgacatttacactaactcagttctggttcacttttcaaactggtttttctggccagcggttttatgatgactggtttcagtctctatataacgttatttttactgcgctacctgtaattatagttggattgtttgataaggtaggattattcttacttgtttatggagttgtctcctgcaattgcactaagctctgagtcgtttcaggatgttagcgcgtcactgtcaaaaaaatacccacagctttacaaggaaggcatcaggaattcattcttcaagtggagagtgattgcagtgtggggtttctttgccttctatcagtcaatagtgttcttctacttcactgcagctgcaagtcggcatggtcagggttcatctggcaagattcttggcctatgggatgttagcaccatggcatttacttgtgtcgtggtgactgtgaatctccgccttctcatggcatgcaactctataacgaggtggcattacataagtgtggcgggcagtatagtggcctggtttatgtttattttcatatactctgcaataatgacgtcatttgacagacaggaaaatgtgtattttgtgatttatgttctgatgagcacctttttcttctatctgacaatcgtacttgttccgatcatcgccctgtttggggatttcctatatctatcgatccaaaggtggctcttcccctacgactaccaaataatacaggagcaacacaaggatgagccacacgagtacagcagggtgccactaccagagaccagccacctaagcccagaggaagcgagaagctacatgatctcgatgctcccacgggagtcatcaaagcacactggctttgccttcgactccccaggatacgagtcgttcttcgcctcgcagcaaggcatcggcgtgccacacaagccgtgggatgtagcccggagagcgagcatgaaaccgcaacgagcaggaaaatcctagtcgggcgaacacctctccgctgtgtaaagtcttgtatatctggtttcttgaccacaggagtttttgtataggtagcagtactgtagcccttttttcgtgtttgtcacccatatgttgttttgggatgaaaagtaggcaacggtccgtttggctgttaaacaatcatgtagggatacttggtagataaaaccaaaggggtattggacatgcagttaggaattttagtttctggcgttcattgcgtgatgtagtcgagttgattggtcggcccgccatgcaacttaaatcatgttactattattggaggcctgtgcattgatcatatcccattttatttcaatataagaacacatcctactcc

SEQ ID NO: 4426 - DNA, 3935 bp, Zea Mays
gttatttccctgctgacttgctcttcctatcaagtacaaaccctgatggtatctgctacatagagacagcaaatcttgatggggaaacaaatctgaaaataaggaaggctttggagaaaacttgggactatgtaattcctgaaaaggcttctgagttcaaaggtgaagtgcagtgtgaacagccaaacaattccctttatacttttactggcaatcttatcatggacaagcaaactatacccctctcaccgaaccagttactcctaaggggatgcagtcttcgtaatacagaatacattgttggcgttgtcatattcactgggcacgagacaaaagttatgatgaattccatgaatgttccctcaaaaagaagtacattggaaaaaaagctagacaagcttatccttgctctttttgcaaccctctttacaatgtgtgttattggcgccattggaagagctcagagctagccgttaggttgacaggtgggccgcgcttggctgataggggggcaccggccgctgggggtccatcgtgcctcaccctcgagctttggatccctaaggacttcacgtcaaggtcctggatgcattcccgttatcccacgtacgacaccgaagtggagtgcttgcccttcggccttgccacgtcttccccctggctaggacccatcgcctacatgtccgagccgaggcaagatgggaagttagtaggaaatgtgatcgaggtcagggtttggcttcacccaatagataccatgctggagatagctgtggtcaatgtagtcaaggtagttgatgttgaggtggctgtatatgaagctgctgacacaaagaggtgccatgatgatgacaaagatgtgtcgggtggcatatttattaatgaaaaatacttttatcttggattgcgtgggcatgtggaggatcagttcaatcctaaaaacagatttgtggtgaccattttaaccatgtttactctgataactctatactcaacgatcatccccatttccctttacgtgtccattgagatgatcaaattcatacagtgcacacaattcattaataacgatcttcatatgtaccatgctgagagtaacacccctgctttggcacggacttctaatcttaatgaggagcttggacaggttgaatatatattttctgacaaaactggcacacttacaagaaatctgatggaattctttaaatgctcaattggtggagaaatgtatggaactggcatcacagagattgagaaaggaggagcagaacgggctggaattagaatcgatgatgatgagggcaaaagatctgctaacgcggtccatgaaaaaggattcaattttgatgacgctagaatcatgcgcggtgcatggagaaacgaacctaatcctgaggcttgcaaggaattctttagatgccttgcaatctgtcatacagttcttccagagggtgaggagactccggaaaagataagttaccaggctgcctcacctgatgaggctgcacttgtgtctgctgctaaaaattttggtttcttcttttataggcgtacacccacaactgttatggttcgtgagtcacatgttgaaaggatggggagtatacaagatgttccatatgaaattctgaatgttctagaattcaacagtacaagaaagcgacaatcggtggtttgccggttcacaaatggaagactagttctctattgcaagggtgctgataatgttgtatatgaacgattggctgatggaaatcatgatatgaaaaagatcagtagagagcatctagagcaatttggttctgctggcttacgtacactttgtcttgcctatcgggatcttagtagggagcaatacgaaagctggaacgagaagtttgtacaagcaaagtcatctttacgagatcgtgataagaagcttgatgaggtggctgaattgattgaaaaagaccttatattagttgggtgcacagctatagaggacaaactgcaagaaggggtgccaacctgcattgaaactctctctgcagcgggcataaaaatttgggtgttaactggagataagatggaaacagcgattaacattgcatatgcatgtagcttggtaaacaatgacaccaaacagttcatcattagttcagagacaggcgctattagggaggctgaagaccggggtgaccctgtggaaattgcacgtgttattaaagattcagtaaaacagaatctgaaaagatttcacgaggaagcccggcattctttaattagcacccctgaaaggaagttggctctcattattgatggtagatgcctaatgtacgcactggacccaactcttcgtgttgatcttcttggattgagtctaagttgccactctgttatatgctgccgagtttctccgctgcagaaggcacaggttacaagcttagttaggaagggtgctgagaaaataactctcagcattggtgacggtgctaatgatgtgagtatgattcaagctgctcatgttgggattggcatcagtggccaagaaggaatgcaagctgttatggctagtgactttgccattgcacagtttcgttttcttactgatttgcttcttgtacatggacgatggtcttacttgagactgtgcaaggttatcacatacttcttctacaagaatctgacatttacactaactcagttctggttcacttttcaaactggtttttctggccagcggttttatgatgactggtttcagtctctatataacgttatttttactgcgctacctgtaattatagttggattgtttgataaggatgttagcgcgtcactgtcaaaaaaatacccacagctttacaaggaaggcatcaggaattcattcttcaagtggagagtgattgcagtgtggggtttctttgccttctatcagtcaatagtgttcttctacttcactgcagctgcaagtcggcatggtcagggttcatctggcaagattcttggcctatgggatgttagcaccatggcatttacttgtgtcgtggtgactgtgaatctccgccttctcatggcatgcaactctataacgaggtggcattacataagtgtggcgggcagtatagtggcctggtttatgtttattttcatatactctgcaataatgacgtcatttgacagacaggaaaatgtgtattttgtgatttatgttctgatgagcacctttttcttctatctgacaatcgtacttgttccgatcatcgccctgtttggggatttcctatatctatcgatccaaaggtggctcttcccctacgactaccaaataatacaggagcaacacaaggatgagccacacgagtacagcagggtgccactaccagagaccagccacctaagcccagaggaagcgagaagctacatgatctcgatgctcccacgggagtcatcaaagcacactggctttgccttcgactccccaggatacgagtcgttcttcgcctcgcagcaaggcatcggcgtgccacacaagccgtgggatgtagcccggagagcgagcatgaaaccgcaacgagcaggaaaatcctagtcgggcgaacacctctccgctgtgtaaagtcttgtatatctggtttcttgaccacaggagtttttgtataggtagcagtactgtagcccttttttcgtgtttgtcacccatatgttgttttgggatgaaaagtaggcaacggtccgtttggctgttaaacaatcatgtagggatacttggtagataaaaccaaaggggtattggacatgcagttaggaattttagtttctggcgttcattgcgtgatgtagtcgagttgattggtcggcccgccatgcaacttaaatcatgttactattattggaggcctgtgcattgatcatatcccattttatttcaatataagaacacatcctactcc

SEQ ID NO: 4427 - DNA, 3350 bp, Zea Mays
tgacttgctcttcctatcaagtacaaaccctgatggtatctgctacatagagacagcaaatcttgatggggaaacaaatctgaaaataaggaaggctttggagaaaacttgggactatgtaattcctgaaaaggcttctgagttcaaaggtgaagtgcagtgtgaacagccaaacaattccctttatacttttactggcaatcttatcatggacaagcaaactatacccctctcaccgaaccagttactcctaagggttatgatgaattccatgaatgttccctcaaaaagaagtacattggaaaaaaagctagacaagcttatccttgctctttttgcaaccctctttacaatgtgtgttattggcgccattggaagatgatcaaattcatacagtgcacacaattcattaataacgatcttcatatgtaccatgctgagagtaacacccctgctttggcacggacttctaatcttaatgaggagcttggacaggttgaatatatattttctgacaaaactggcacacttacaagaaatctgatggaattctttaaatgctcaattggtggagaaatgtatggaactggcatcacagagattgagaaaggaggagcagaacgggctggaattagaatcgatgatgatgagggcaaaagatctgctaacgcggtccatgaaaaaggattcaattttgatgacgctagaatcatgcgcggtgcatggagaaacgaacctaatcctgaggcttgcaaggaattctttagatgccttgcaatctgtcatacagttcttccagagggtgaggagactccggaaaagataagttaccaggctgcctcacctgatgaggctgcacttgtgtctgctgctaaaaattttggtttcttcttttataggcgtacacccacaactgttatggttcgtgagtcacatgttgaaaggatggggagtatacaagatgttccatatgaaattctgaatgttctagaattcaacagtacaagaaagcgacaatcggtggtttgccggttcacaaatggaagactagttctctattgcaagggtgctgataatgttgtatatgaacgattggctgatggaaatcatgatatgaaaaagatcagtagagagcatctagagcaatttggttctgctggcttacgtacactttgtcttgcctatcgggatcttagtagggagcaatacgaaagctggaacgagaagtttgtacaagcaaagtcatctttacgagatcgtgataagaagcttgatgaggtggctgaattgattgaaaaagaccttatattagttgggtgcacagctatagaggacaaactgcaagaaggggtgccaacctgcattgaaactctctctgcagcgggcataaaaatttgggtgttaactggagataagatggaaacagcgattaacattgcatatgcatgtagcttggtaaacaatgacaccaaacagttcatcattagttcagagacaggcgctattagggaggctgaagaccggggtgaccctgtggaaattgcacgtgttattaaagattcagtaaaacagaatctgaaaagatttcacgaggaagcccggcattctttaattagcacccctgaaaggaagttggctctcattattgatggtagatgcctaatgtacgcactggacccaactcttcgtgttgatcttcttggattgagtctaagttgccactctgttatatgctgccgagtttctccgctgcagaaggcacaggttacaagcttagttaggaagggtgctgagaaaataactctcagcattggtgacggtgctaatgatgtgagtatgattcaagctgctcatgttgggattggcatcagtggccaagaaggaatgcaagctgttatggctagtgactttgccattgcacagtttcgttttcttactgatttgcttcttgtacatggacgatggtcttacttgagactgtgcaaggttatcacatacttcttctacaagaatctgacatttacactaactcagttctggttcacttttcaaactggtttttctggccagcggttttatgatgactggtttcagtctctatataacgttatttttactgcgctacctgtaattatagttggattgtttgataaggtaggattattcttacttgtttatggagttgtctcctgcaattgcactaagctctgagtcgtttcaggatgttagcgcgtcactgtcaaaaaaatacccacagctttacaaggaaggcatcaggaattcattcttcaagtggagagtgattgcagtgtggggtttctttgccttctatcagtcaatagtgttcttctacttcactgcagctgcaagtcggcatggtcagggttcatctggcaagattcttggcctatgggatgttagcaccatggcatttacttgtgtcgtggtgactgtgaatctccgccttctcatggcatgcaactctataacgaggtggcattacataagtgtggcgggcagtatagtggcctggtttatgtttattttcatatactctgcaataatgacgtcatttgacagacaggaaaatgtgtattttgtgatttatgttctgatgagcacctttttcttctatctgacaatcgtacttgttccgatcatcgccctgtttggggatttcctatatctatcgatccaaaggtggctcttcccctacgactaccaaataatacaggagcaacacaaggatgagccacacgagtacagcagggtgccactaccagagaccagccacctaagcccagaggaagcgagaagctacatgatctcgatgctcccacgggagtcatcaaagcacactggctttgccttcgactccccaggatacgagtcgttcttcgcctcgcagcaaggcatcggcgtgccacacaagccgtgggatgtagcccggagagcgagcatgaaaccgcaacgagcaggaaaatcctagtcgggcgaacacctctccgctgtgtaaagtcttgtatatctggtttcttgaccacaggagtttttgtataggtagcagtactgtagcccttttttcgtgtttgtcacccatatgttgttttgggatgaaaagtaggcaacggtccgtttggctgttaaacaatcatgtagggatacttggtagataaaaccaaaggggtattggacatgcagttaggaattttagtttctggcgttcattgcgtgatgtagtcgagttgattggtcggcccgccatgcaacttaaatcatgttactattattggaggcctgtgcattgatcatatcccattttatttcaatataagaacacatcctactcc

SEQ ID NO: 4428 - DNA, 3370 bp, Zea Mays
gtatctgctacatagagacagcaaatcttgatggggaaacaaatctgaaaataaggaaggctttggagaaaacttgggactatgtaattcctgaaaaggcttctgagttcaaagggatgcagtcttcgtaatacagaatacattgttggcgttgtcatattcactgggcacgagacaaaagttatgatgaattccatgaatgttccctcaaaaagaagtacattggaaaaaaagctagacaagcttatccttgctctttttgcaaccctctttacaatgtgtgttattggcgccattggaagtggcatatttattaatgaaaaatacttttatcttggattgcgtgggcatgtggaggatcagttcaatcctaaaaacagatttgtggtgaccattttaaccatgtttactctgataactctatactcaacgatcatccccatttccctttacgtgtccattgagatgatcaaattcatacagtgcacacaattcattaataacgatcttcatatgtaccatgctgagagtaacacccctgctttggcacggacttctaatcttaatgaggagcttggacaggttgaatatatattttctgacaaaactggcacacttacaagaaatctgatggaattctttaaatgctcaattggtggagaaatgtatggaactggcatcacagagattgagaaaggaggagcagaacgggctggaattagaatcgatgatgatgagggcaaaagatctgctaacgcggtccatgaaaaaggattcaattttgatgacgctagaatcatgcgcggtgcatggagaaacgaacctaatcctgaggcttgcaaggaattctttagatgccttgcaatctgtcatacagttcttccagagggtgaggagactccggaaaagataagttaccaggctgcctcacctgatgaggctgcacttgtgtctgctgctaaaaattttggtttcttcttttataggcgtacacccacaactgttatggttcgtgagtcacatgttgaaaggatggggagtatacaagatgttccatatgaaattctgaatgttctagaattcaacagtacaagaaagcgacaatcggtggtttgccggttcacaaatggaagactagttctctattgcaagggtgctgataatgttgtatatgaacgattggctgatggaaatcatgatatgaaaaagatcagtagagagcatctagagcaatttggttctgctggcttacgtacactttgtcttgcctatcgggatcttagtagggagcaatacgaaagctggaacgagaagtttgtacaagcaaagtcatctttacgagatcgtgataagaagcttgatgaggtggctgaattgattgaaaaagaccttatattagttgggtgcacagctatagaggacaaactgcaagaaggggtgccaacctgcattgaaactctctctgcagcgggcataaaaatttgggtgttaactggagataagatggaaacagcgattaacattgcatatgcatgtagcttggtaaacaatgacaccaaacagttcatcattagttcagagacaggcgctattagggaggctgaagaccggggtgaccctgtggaaattgcacgtgttattaaagattcagtaaaacagaatctgaaaagatttcacgaggaagcccggcattctttaattagcacccctgaaaggaagttggctctcattattgatggtagatgcctaatgtacgcactggacccaactcttcgtgttgatcttcttggattgagtctaagttgccactctgttatatgctgccgagtttctccgctgcagaaggcacaggttacaagcttagttaggaagggtgctgagaaaataactctcagcattggtgacggtgctaatgatgtgagtatgattcaagctgctcatgttgggattggcatcagtggccaagaaggaatgcaagctgttatggctagtgactttgccattgcacagtttcgttttcttactgatttgcttcttgtacatggacgatggtcttacttgagactgtgcaaggttatcacatacttcttctacaagaatctgacatttacactaactcagttctggttcacttttcaaactggtttttctggccagcggttttatgatgactggtttcagtctctatataacgttatttttactgcgctacctgtaattatagttggattgtttgataaggatgttagcgcgtcactgtcaaaaaaatacccacagctttacaaggaaggcatcaggaattcattcttcaagtggagagtgattgcagtgtggggtttctttgccttctatcagtcaatagtgttcttctacttcactgcagctgcaagtcggcatggtcagggttcatctggcaagattcttggcctatgggatgttagcaccatggcatttacttgtgtcgtggtgactgtgaatctccgccttctcatggcatgcaactctataacgaggtggcattacataagtgtggcgggcagtatagtggcctggtttatgtttattttcatatactctgcaataatgacgtcatttgacagacaggaaaatgtgtattttgtgatttatgttctgatgagcacctttttcttctatctgacaatcgtacttgttccgatcatcgccctgtttggggatttcctatatctatcgatccaaaggtggctcttcccctacgactaccaaataatacaggagcaacacaaggatgagccacacgagtacagcagggtgccactaccagagaccagccacctaagcccagaggaagcgagaagctacatgatctcgatgctcccacgggagtcatcaaagcacactggctttgccttcgactccccaggatacgagtcgttcttcgcctcgcagcaaggcatcggcgtgccacacaagccgtgggatgtagcccggagagcgagcatgaaaccgcaacgagcaggaaaatcctagtcgggcgaacacctctccgctgtgtaaagtcttgtatatctggtttcttgaccacaggagtttttgtataggtagcagtactgtagcccttttttcgtgtttgtcacccatatgttgttttgggatgaaaagtaggcaacggtccgtttggctgttaaacaatcatgtagggatacttggtagataaaaccaaaggggtattggacatgcagttaggaattttagtttctggcgttcattgcgtgatgtagtcgagttgattggtcggcccgccatgcaacttaaatcatgttactattattggaggcctgtgcattgatcatatcccattttatttcaatataagaacacatcctactcc

SEQ ID NO: 4429 - DNA, 1392 bp, Zea Mays
cttcgtcgtacggctttacgcattcaaccgaagcatctttgcgtgctacttcaggcgaagtcattgagttcgtctgcggtaaggcatcccatgttcctccgccgccgtctcctctccaccgctgccgctgcgaccgccgcccgcggcccaccgccgatccgcgtgtccctaacggagtccgcgggccgcggcgtcttcgctacccgcccagtatcttctggcgagctcctccactcagcgcagcccctcgtctcccacccctcccactctctgctccacgaggtttgctacaattgcctcagaaggaagcccggggaagggcgcgcttcaagcgggggtgactacttctgcagcgatgcttgcagggaccacgccaaggggttccatgacattgaaaagaatgtagattggtctttattcgattaccactgcagttcacgtgatctgaagtacccatacatggccaagcgccttgcttgcatggttatatcaggagctgctaatgcagattgccttaacatacttcagccagctctgttgcaccaggggacgctgattgagatgaaagaggaatttgagttgttggaatccacttttagaaaagctggatttcaggaagaaatcacaacctattggtacatcaatgtattggcaagaatacgcataaatgcttttcgtattgaattggttgcaagttcatatgaggatctcttatcctcagcggcagcctctgtatcatgtgattcatcagttggcaatgcggtttatatgctcccatctttctacaaccatgactgcgatccgaatgctcacattgtttggctgcaaaacgcggacgcgaaattgaaggctctccgcgacattgaagaaggcgaggagctgtgcatctgctacatcgatgctagcatggatgccgacgctagacagaagattcttgctgatggatttggcttcgagtgccgttgccttcggtgcttgtctggagactagaaaccatgtctactttcttcctgagcatgagtttgtcttcgattgtagcggattgaagcggttggtgctgagtaccatcagaatcttaagttgcaatcttctgtacactagttacagccacgccaattgagttgtggttaagcattactttgccttttgcacttccctaccacgacatgctagaaatgttgtggtgtaaatgttgtagccgtttttgtttagcttcttgttcagtccttagtgtcagaaataaaatttcgataatactcggatcatttgaataccggaaaccttgtagctgtagttggggtagcattacatatattatactcttgactctctccgttttttttacttgtcgtgttttagtataaaaatgaactatggagcgataaatttgag

SEQ ID NO: 4430 - DNA, 1577 bp, Zea Mays
acgcattcaaccgaagcatctttgcgtgctacttcaggcgaagtcattgagttcgtctgcggtaaggcatcccatgttcctccgccgccgtctcctctccaccgctgccgctgcgaccgccgcccgcggcccaccgccgatccgcgtgtccctaacggagtccgcgggccgcggcgtcttcgctacccgcccagtatcttctggcgagctcctccactcagcgcagcccctcgtctcccacccctcccactctctgctccacgaggtttgctacaattgcctcagaaggaagcccggggaagggcgcgcttcaagcgggggtgactacttctgcagcgatgcttgcagggaccacgccaaggggttccatgacattgaaaagaatgtagattggtctttattcgattaccactgcagcgccttgcttgcatggttatatcaggagctgctaatgcagattgccttaacatacttcagccagctctgttgcaccaggggacgctgattgagatgaaagaggaatttgagttgttggaatccacttttagaaaagctggatttcaggaagaaatcacaacctttttgaccatagattggtacatcaatgtattggcaagaatacgcataaatgcttttcgtattgaattggttgcaagttcatatgaggatctcttatcctcagcggcagcctctgtatcatgtgattcatcagttggcaatgcggtttatatgctcccatctttctacaaccatgactgcggtatgctcttcacttatacatttggaatgaatgcattttcttatcatcttcactacttgaatttcgttttgctaccagtgattcagttgaaaggttgaccaaccaaactccaggatttatcaccacccttgtggtatagtgcttgttcactatactactgaacttgtcatatctatattagaccattagtctctattgtattgcatagtggatgtctttgctagactactttcgatataaggacaaatttagctaagcttttgtatgtatggtaatgtaattgttatgtacggacaggcctatactaggcgcaacagggcctcacgatagggcccaaggcccatagttcatacttatctagatagcttagttcatacttatctagatagctagctttcttataaatacttgtaagacaccttgggattgtttaagcataaacaagattgtttccggcttcctttagggagtcgggattcctccagttctagccctagccgccacctctggccctagccggccgcccctgtgggctgcgccgtcaactacggcgtcggctcggcgttcctcgcacttcaagcctcgacccccaatctcccaccgctataacctacgatcagtaaggctagaggatttggtacataacaatctggtatcagagacctcgacgatcatgagcacgtccgccccctccaagccaccatcgccggtgcagcagccgccgccgtcgtcgggccagtctgcagcactgcccgctaccctggccgcgacccccatgtcgtcaggcgccatggtgatcgtccctcccggcgcgtcc

SEQ ID NO: 4431 - DNA, 1353 bp, Zea Mays
acgcattcaaccgaagcatctttgcgtgctacttcaggcgaagtcattgagttcgtctgcggtaaggcatcccatgttcctccgccgccgtctcctctccaccgctgccgctgcgaccgccgcccgcggcccaccgccgatccgcgtgtccctaacggagtccgcgggccgcggcgtcttcgctacccgcccagtatcttctggcgagctcctccactcagcgcagcccctcgtctcccacccctcccactctctgctccacgaggtttgctacaattgcctcagaaggaagcccggggaagggcgcgcttcaagcgggggtgactacttctgcagcgatgcttgcagggaccacgccaaggggttccatgacattgaaaagaatgtagattggtctttattcgattaccactgcagcgccttgcttgcatggttatatcaggagctgctaatgcagattgccttaacatacttcagccagctctgttgcaccaggggacgctgattgagatgaaagaggaatttgagttgttggaatccacttttagaaaagctggatttcaggaagaaatcacaacctttttgaccatagattggtacatcaatgtattggcaagaatacgcataaatgcttttcgtattgaattggttgcaagttcatatgaggatctcttatcctcagcggcagcctctgtatcatgtgattcatcagttggcaatgcggtttatatgctcccatctttctacaaccatgactgcgatccgaatgctcacattgtttggctgcaaaacgcggacgcgaaattgaaggctctccgcgacattgaagaaggcgaggagctgtgcatctgctacatcgatgctagcatggatgccgacgctagacagaagattcttgctgatggatttggcttcgagtgccgttgccttcggtgcttgtctggagactagaaaccatgtctactttcttcctgagcatgagtttgtcttcgattgtagcggattgaagcggttggtgctgagtaccatcagaatcttaagttgcaatcttctgtacactagttacagccacgccaattgagttgtggttaagcattactttgccttttgcacttccctaccacgacatgctagaaatgttgtggtgtaaatgttgtagccgtttttgtttagcttcttgttcagtccttagtgtcagaaataaaatttcgataatactcggatcatttgaataccggaaaccttgtagctgtagttggggtagcattacatatattatactcttgactctctccgttttttttacttgtcgtgttttagtataaaaatgaactatggagcgataaatttgag

SEQ ID NO: 4432 - DNA, 1328 bp, Zea Mays
acgcattcaaccgaagcatctttgcgtgctacttcaggcgaagtcattgagttcgtctgcggtaaggcatcccatgttcctccgccgccgtctcctctccaccgctgccgctgcgaccgccgcccgcggcccaccgccgatccgcgtgtccctaacggagtccgcgggccgcggcgtcttcgctacccgcccagtatcttctggcgagctcctccactcagcgcagcccctcgtctcccacccctcccactctctgctccacgaggtttgctacaattgcctcagaaggaagcccggggaagggcgcgcttcaagcgggggtgactacttctgcagcgatgcttgcagggaccacgccaaggggttccatgacattgaaaagaatgtagattggtctttattcgattaccactgcaggagctgctaatgcagattgccttaacatacttcagccagctctgttgcaccaggggacgctgattgagatgaaagaggaatttgagttgttggaatccacttttagaaaagctggatttcaggaagaaatcacaacctttttgaccatagattggtacatcaatgtattggcaagaatacgcataaatgcttttcgtattgaattggttgcaagttcatatgaggatctcttatcctcagcggcagcctctgtatcatgtgattcatcagttggcaatgcggtttatatgctcccatctttctacaaccatgactgcgatccgaatgctcacattgtttggctgcaaaacgcggacgcgaaattgaaggctctccgcgacattgaagaaggcgaggagctgtgcatctgctacatcgatgctagcatggatgccgacgctagacagaagattcttgctgatggatttggcttcgagtgccgttgccttcggtgcttgtctggagactagaaaccatgtctactttcttcctgagcatgagtttgtcttcgattgtagcggattgaagcggttggtgctgagtaccatcagaatcttaagttgcaatcttctgtacactagttacagccacgccaattgagttgtggttaagcattactttgccttttgcacttccctaccacgacatgctagaaatgttgtggtgtaaatgttgtagccgtttttgtttagcttcttgttcagtccttagtgtcagaaataaaatttcgataatactcggatcatttgaataccggaaaccttgtagctgtagttggggtagcattacatatattatactcttgactctctccgttttttttacttgtcgtgttttagtataaaaatgaactatggagcgataaatttgag

SEQ ID NO: 4433 - DNA, 1819 bp, Zea Mays
ttcaccgtctgctcaggtcgctgcctccatatctcagcgtgaggcgctgcgccaccgatgtccgttccccacaggccaccgcctcgacatcccttcgacgacctctcacattcgacgactccccatggcagggattccacgggccatcaccgcctcgctttcccgcggattctctccaccgtcgtcatctcggatagcggcacgccggcacaagctacagcgcctccacaggcagacaagctattagctccagagtttcagccttctgtggaggcacttgttcatttccttccacctagtcggcaacagcaacctttcctgttaatgtcaagggattcaaagagaaatatcttcctagaccttatgtgattaatctaagggttaatcatgtctgtgccattataattttccatgttttgatatgtgccactgaactttttaagcttacaaatgtgccattaaacttccagtcaaatatgaaatagaccattttatacggttttgtctgaatcagaccatccaccagtgatgtattttcgtatttctttgtacccttgcttgaacgaacactgattttgcgatgaacgcatcacgacttgtattctcctggctgctggagctgcacttcctaccagagctgcgcttgctcttgaagtgctaaatcaagaacccgctgaagaaatcgatggcccatgaatgaaaaggctgaagaaacaactcaacagagcaccatgctagcatctgaggagacaacgccaagatatcacaagggagccacctgtagatattcaatcacagaaccaggaaccagtagataaaaaagaagctactgtagaagaaagataggttgctgaaagctgaaacagttgttactgaagcaccagtgcaacaaagcaccagatcaacataatctaggtgttgcaaataacacagtgcgagaagacaccgaaagctcctgcgggtggcacagctccggcaggaggcacaactccggtggtggctactagggttaaaggaggcgcaggtatggagagacgaatgggtatacataaattgtgttgcatttgtctaataaaaacaggcattcgtcaaagcaagggtaaatacgaaaatatgttcactggtgcaaggtctgatttagacaaccgtataaaatggtctatttcagatttgattagaagtttaatggcatatttgcaagcttaagaagtttagtggcacatatcaaaacatgaaaaattataatggcacaaacataattaacccttaatctaatcaatgaaataaccctgaaaggaatcacacaatactatgcttttgtggaagacagaaagttcattgcctgtatatacttttctcaaggtacagcaaacattaactctatgttttctgtttcatccatataagtctaaactgacatatttcctgttttttttgtgtttttgccagcttcaaattgatcaatccgttatatgaaggtttctttataagagtatcatggctctctttgttgcaggtctgtttacctgaagaattgatatccaggctgttaatgtgatcaataattttgactttcctaagacatctgagacatttacacagagtgcttttttttatcttttctttctcgagaagctgattgttttataaccttcctgaatttaaaatttttgtgttgccatgttcctaggttaactaagtgtcacagagatgtgtatgttgcgttggatatgtgggcacacaagattggaccgagtaagaaacgatgacatacgcaatcggctaggagtaacgtcaattgaagaaaaggttattcaac

SEQ ID NO: 4434 - DNA, 2118 bp, Zea Mays
ctcctttggtccacgcttttttcgctgatgatcccaccgtgaccgaggttttgtcaaaaaaaaaaaaaaacaacaacagtccctcccctcccctccctgctcctctaccccttcctctcccggcgaccagctggcctctcctttgttgaggcgagagacccccacccgatccggcgatggacgccgcgtccaggccgcctccgccccacggaacaggggtccgcgtccgcgccccgctggtggagtctgtctcctgctactgcagattagatacaggccttaaaactgttgttgaggccaggaagtttgttcctggcgcgaaaatgtgcatgcaacctgaagtcaaacaaaacaagcgcaagtcaaggggctcaaaaaaggaaagcccaaactcaggatggtttgcaaaagatggaaccgtcttttgtctgggaattacttttactccttgcgtaagaaaattggagtggcagaagaatgggtatatgtctttaaaagggaccgtgaagggaagatatcctggtatgcctttgatccactccaccagctatggaagtcactcccaccagttccacaagagtattcagaagcattgggctttgggtgtgccgttctgagtggttgctatctgtacttgtttggcgggaaagatcctttgaggggttctatgaggcgtgttgtattctacaatgctcgtacaaacaaatggcaccgggctccggatatgatgaggaaacgtcacttttttggttcttgtgtaataaacaattgtctctatgttgctggaggagagtgtgaaggaatacagaggacgctgcagtctgcagaagtttatgatccaaataggaacagatgggcctgtgttactgaaatgaacaatgggatggtgcctttcattggagttgtatatgatggcaagtggttcttaaaggggctagattcccatcgccaagtaactagtgaggtctacttaccatcatccaatacatggtcagcaattgatgatgagatggtcacaggctggcggaacccaagtatttctttcaatggccgtctctattcagctgactgccgggatggctgcaagcttagagtctatgatgagaacacaggaacatggacaaggttcatggacagcaagcaccacttgggcagctcacgtgcctttgaagctgcagctttggtgtcactaaatgggaaactctgtgtcatcaggaacaacatgagcataactcttgttgatgtctccaacccaacaatgagtgtcgagacagatagtgcgcgcatgtgggaaactgttgttcggaagggccagcacaggtcgtttgtggcgaacttatggtcgagcattgcaggacggaacttaaagagtcacattatccattgccatgtgctgcaagtttgaggtcaggttttgttagtgggaacatgatcaagttttttaagaagcaaaaggttcagatcagtgacagaaccctccatttcgaaggtagtaaggtttcattgcagaatcgcggggaaaaaggtcattggcgtgccactgctgcccccaaagtcccaaatagttatttgctctcttccagaactgaaaattccaattactttctggcaacatttgaagactcttatcattcatggataaggttttttcagattttgagtgcaaaccagaaagtgactaggaacttccctagtgtaatgacattttccccttgctggcaggctgggaaatgtgtttggtggatatattggtctcttatcatatttatctatctttgcattgtgtaatatgtggcatcttactgtgtaatgttggtgtatattgtagcggcggactagctagactccaggattagagtagtcaggattatgcctattatgcttcaattttttgttggaatgcctgatatcctccgttaataaatatgtgttaataaatatgtgataccgtgggcttttttaaaaagattgaccactcgtcttattcaaaaaataataagttatcatttatttttttgatttattttatcacttaaggttctttgtatttgacttcaaattttacatttttgaataaatattttaaataaagtgagtggtcaaagtttttgaaaaaat

SEQ ID NO: 4435 - DNA, 1938 bp, Zea Mays
ctcctttggtccacgcttttttcgctgatgatcccaccgtgaccgaggttttgtcaaaaaaaaaaaaaaacaacaacagtccctcccctcccctccctgctcctctaccccttcctctcccggcgaccagctggcctctcctttgttgaggcgagagacccccacccgatccggcgatggacgccgcgtccaggccgcctccgccccacggaacaggggtccgcgtccgcgccccgctggtggagtctgtctcctgctactgcagattagatacaggccttaaaactgttgttgaggccaggaagtttgttcctggcgcgaaaatgtgcatgcaacctgaagtcaaacaaaacaagcgcaagtcaaggggctcaaaaaaggaaaggtgcaggactcaagcaccacttttacctggccttcctgatgatcttgctattgcctgccttatacgagttcctcgacttgaacagcccaaactcaggatggtttgcaaaagatggaaccgtcttttgtctgggaattacttttactccttgcgtaagaaaattggagtggcagaagaatgggtatatgtctttaaaagggaccgtgaagggaagatatcctggtatgcctttgatccactccaccagctatggaagtcactcccaccagttccacaagagtattcagaagcattgggctttgggtgtgccgttctgagtggttgctatctgtacttgtttggcgggaaagatcctttgaggggttctatgaggcgtgttgtattctacaatgctcgtacaaacaaatggcaccgggctccggatatgatgaggaaacgtcacttttttggttcttgtgtaataaacaattgtctctatgttgctggaggagagtgtgaaggaatacagaggacgctgcagtctgcagaagtttatgatccaacacaggaacatggacaaggttcatggacagcaagcaccacttgggcagctcacgtgcctttgaagctgcagctttggtgtcactaaatgggaaactctgtgtcatcaggaacaacatgagcataactcttgttgatgtctccaacccaacaatgagtgtcgagacagatagtgcgcgcatgtgggaaactgttgttcggaagggccagcacaggtcgtttgtggcgaacttatggtcgagcattgcaggacggaacttaaagagtcacattatccattgccatgtgctgcaagtttgaggtcaggttttgttagtgggaacatgatcaagttttttaagaagcaaaaggttcagatcagtgacagaaccctccatttcgaaggtagtaaggtttcattgcagaatcgcggggaaaaaggtcattggcgtgccactgctgcccccaaagtcccaaatagttatttgctctcttccagaactgaaaattccaattactttctggcaacatttgaagactcttatcattcatggataaggttttttcagattttgagtgcaaaccagaaagtgactaggaacttccctagtgtaatgacattttccccttgctggcaggctgggaaatgtgtttggtggatatattggtctcttatcatatttatctatctttgcattgtgtaatatgtggcatcttactgtgtaatgttggtgtatattgtagcggcggactagctagactccaggattagagtagtcaggattatgcctattatgcttcaattttttgttggaatgcctgatatcctccgttaataaatatgtgttaataaatatgtgataccgtgggcttttttaaaaagattgaccactcgtcttattcaaaaaataataagttatcatttatttttttgatttattttatcacttaaggttctttgtatttgacttcaaattttacatttttgaataaatattttaaataaagtgagtggtcaaagtttttgaaaaaat

SEQ ID NO: 4436 - DNA, 1959 bp, Zea Mays
agaaaatgttcctcgcaaagtttggctgacggcacccaccgcccacagaagcgcacctctgttctttggtgtgtggccgtgtggattcaaaaccgctgaccggccgcttatttaagcccttgccccgccggttttctcttctcccgtcggcgctggtccacgcggctccaacacctgcctgcctgcctgattcttacaccaaccaaccacgcgcgccaagccgaattcgtcttccaccgatccgccccgcccgtttcccattgcttagcttgctatggcgcagcagcagccggtgcggcggattctgaaggtggcaccgccggggaagggggacggggaatccttccccacggtgcaggcggcggtcgacgcggtgccgctgggcaaccgggcgcgcgtcgtcatccgcctcgcgccgggggtctacagggagcctgtctacgtcgccaagaccaagaacttcatcaccgtcgcgggggcctcgcccgaggccaccgtcgtgtcatgggacaacaccgccacgcgcatcaggcactcgcaggtacgccgcggcgtctgctcccttctccgcctgcctgcgtccagctcgacgaaatgcccgacaggcttgtgtgcatgtgctacggtcgctatgattagtaggtcccaaggatcggattttagctgagctgattaacgtaaacctttcttagcttccgccacatagtttgatcaaagtcatgcagatgtttggagttttatcataagatgcatgtgtcttcacattaaaagcagacacaatactgctggtgcatatgcatatatatagagacaaccaagaaactgttcctgcatggtttcaccaatttcattcctcgaaatgtgcttaatattttgactaattcttatttacatatctcataacgatgaactgctgctgttttctttttctctcataaagtcatccagggttataggaactggaacattcggctgtggtacgttcatcattgagggggaagatttcattgcagagaatatcacgtttgagaactcagctccccagggctctgggcaggccgttgcagtccgggtaaccgcagataggtgtgctttctacaactgccggttcctcggttggcaagacacattatacttacactacgggaaacagtacttaagagactgttatattgaaggccattgtgacttcatctttggtaactctgtcgcccttatggagcattgccatatccattgcaaagcagcgggatacatcactgctcatagccggaagtccacatcagaatctactggctatgtgttcttgaggtgtactattactggacatggagaagctggatacatgttcctaggtcggccatgggggccctttggaagggttgtctttgcgtacactttcatggatcgatgcatcaagccttctgggtggcacaactgggacaaatccgagaacgagcgaactgcttgcttttatgagtacaggtgctcagggccaggcgccctcccatcgaaccgggtcacatggtgtagacagttgctggatgttgaagcagagcagttccttgcgcacacttttatcgacccagacgtcgataggccatggctcctccagatgatggcgataagaataccagcctcagcatagtttgatcccggcagccgcaggtcctgcatggttcatgcctcctttctagcctatttaaataaactaagttggaggatgcattatatttgcataagtttgtaacgtttggtgaattagtatccactttcatctcactgtgggcggtggggatagggaatgagagagcttctcttgtaacgaaccccagcactaggctgaaatatatgcagattttattttgcatgaactttttttgtttcattcagaactcgagcactttctctttcttttttttgcgtgttataagcgtatatggtaccacagattatact

SEQ ID NO: 4437 - DNA, 1530 bp, Zea Mays
agaaaatgttcctcgcaaagtttggctgacggcacccaccgcccacagaagcgcacctctgttctttggtgtgtggccgtgtggattcaaaaccgctgaccggccgcttatttaagcccttgccccgccggttttctcttctcccgtcggcgctggtccacgcggctccaacacctgcctgcctgcctgattcttacaccaaccaaccacgcgcgccaagccgaattcgtcttccaccgatccgccccgcccgtttcccattgcttagcttgctatggcgcagcagcagccggtgcggcggattctgaaggtggcaccgccggggaagggggacggggaatccttccccacggtgcaggcggcggtcgacgcggtgccgctgggcaaccgggcgcgcgtcgtcatccgcctcgcgccgggggtctacagggagcctgtctacgtcgccaagaccaagaacttcatcaccgtcgcgggggcctcgcccgaggccaccgtcgtgtcatgggacaacaccgccacgcgcatcaggcactcgcagtcatccagggttataggaactggaacattcggctgtggtacgttcatcattgagggggaagatttcattgcagagaatatcacgtttgagaactcagctccccagggctctgggcaggccgttgcagtccgggtaaccgcagataggtgtgctttctacaactgccggttcctcggttggcaatacttaagagactgttatattgaaggccattgtgacttcatctttggtaactctgtcgcccttatggagcattgccatatccattgcaaagcagcgggatacatcactgctcatagccggaagtccacatcagaatctactggctatgtgttcttgaggtgtactattactggacatggagaagctggatacatgttcctaggtcggccatgggggccctttggaagggttgtctttgcgtacactttcatggatcgatgcatcaagccttctgggtggcacaactgggacaaatccgagaacgagcgaactgcttgcttttatgagtacaggtgctcagggccaggcgccctcccatcgaaccgggtcacatggtgtagacagttgctggatgttgaagcagagcagttccttgcgcacacttttatcgacccagacgtcgataggccatggctcctccagatgatggcgataagaataccagcctcagcatagtttgatcccggcagccgcaggtcctgcatggttcatgcctcctttctagcctatttaaataaactaagttggaggatgcattatatttgcataagtttgtaacgtttggtgaattagtatccactttcatctcactgtgggcggtggggatagggaatgagagagcttctcttgtaacgaaccccagcactaggctgaaatatatgcagattttattttgcatgaactttttttgtttcattcagaactcgagcactttctctttcttttttttgcgtgttataagcgtatatggtaccacagattatact

SEQ ID NO: 4438 - DNA, 918 bp, Zea Mays
tggcttccaagtacgaagtcatatgaagcacatattaggaggtggagtgcaagcaagagctcaggaaagtaaatcctgcaaatgcaatgattgcaaaataagcacaacaaacaagtagcattttttattccttcagcacggaaagagtgaattgatatgctatgtaagcctcctcagttacctctcaacgcattctgttggcttcactggttcaaggagtggaacatctaggtcatccttcacaagatctcctaccttctcagtgactacccaatcatttgcccgtgcagtctcaagtaaaccggttacagcagcacgcatgcggtgcatggacataacattctcgaagagaatccagaagggcatcaaatggagagacctgatatatcacacaatataatccaaagatggccacattgacggaagatggaaggttgagcattgttggattatgcgtaccaaggatttctgatggcgttcatacatgtgattgcagtgggaatatagaccagcccccatacaggaatgctgacaccaggaaccatggcagacaaagggatgacaacacaataaaacaagaatgtcacaaggggagcaataacccttcggacaaagaaaaagctgtataacagatgatgtttcttccatattgacacctcctgcatcatgtgcagatggcaattataacatgagaaactcatcataattccttacagggtgaggaccaagagaacaaaccttgttcgtaatgatttcccatgccattttcctgaagagattggcggcaccacaagtccacctatgttgttgatgacggtaggctttgaaggtacttggtagttcactcttaacctgtataagattcacaataattgtaatgctgacatggtacaatagatatagctcatcaaaaagcaa

SEQ ID NO: 4439 - DNA, 140 bp, Zea Mays
cggttatacaatctagcgaccgcgacgtgtaacagggagaaaatgggccagcaattaatcaggtcacaacacatgtagcttgtgcccaaaagtagaacgctccccacctcccgctcgttgtacatcgggatctgcacgag

SEQ ID NO: 4440 - DNA, 2254 bp, Zea Mays
tggatagattattatagttatgaacgggatacccgtgaaaaactcggcccttccgatggccggactgcatcaacacaccggtccaacggacgaccacatgaattggaccaaagaaagaaaaaaaaaagtggccgaaaaggagaccccgtgccgtgcgtggacatggcgcctggcggaaacacatgagccgcatggcagtcagcgccccgacttttccgccttccttgcaccaccccgtcatatctcggcaacaatttctcggcgccaaccggccgatccatcctcgtcgtaagtctgcgctttcatcccttattgttccaggaacaaacaaaatctacaggtttccaagacaccaggacggagacatcgaggaggcggcggagacgccgccgcgtccttccgcttctgagccgtataacaacaaacccctcggccccgtcccctctgtccatcgatcaccttgaccacgtgcctgtgccgcaggccgcagccaggcatctccggcgaatctggtttgaggcgcggagagaggatatttgcatgcgggactgatcaatcaaagcaatggcagtagcgcccatggactgcggtgctggttcgattagtctaggccacaaggttttatgccgtttcggagtacccaacagcagtagattgcgatgggtgggatatgacaggaaacaaaggacagatcagttgattgctagagccgtatccgtggatcggacacaactagacttctcgaatccggactggaagacgcagtttcaagaggatttcgataagcgcttcagcttgccacacttgacagatgtaattgatgtggaaccgaggccaactactttttctctcaagagcagagcccctcttgagaacgcgaatggtaccatgcaaggatcatggaacggctatgtcaatgatgatgacagagcacttttgaaggttattaagtttgcctcaccaacttctgctggagctgactgcattgaccctgattgtagctgggttgaacaatgggtgcaccgtgctggtccacgcaaacaaatatattttgagcctcaatatgtgaaggctgggattgtgtcgtgtggtgggctctgcccaggtctcaatgatgtcattcggcagattgtgcttacacttgaaaaatatggggtgaaaaacattgttgggatacagcatggattccgtggattttttgaggatcacttatcagaagtgccactttctaggcatgtagtccaaaatatcaatcttgctggtggtagcttcttaggagtctctcgcggtggtgcaaacatttcagacattgttgacagtattcaggctaggaggcttgatatgctatttgtgcttggtggaaatggaacacatgctggagctaatgctatacatgatgaggcacattctgcatttcatggcattggactggtcaagctgatgggaagaagcagcggcttcatcacaatgcatgcctccctgtcaagtggccaagtagatatctgtctgatacctgaggtaccattcactgttgatggaccgaatggagttcttcgacatctcgaacacctgatagagaccaagggatttgctctggtttgcgttgctgaaggagcaggacaggaatactttcaaaagtcaaatgcaactgatgcatcagggaacatggttcttagtgacattggtgtgcaccttcagcagaagatcaagtcccattttaaggacataggagtccattctgatgtcaagtatattgatccaacatacatgctccgcgctgtgcgagccaatgcatccgatgccatcctgtgcaccgtgcttggtcagaatgctgttcatggtgcctttgcgggttttagcggcatcacaaccggggtgtgcaacacacacaatgtgtacttgccgataccggaagtgatcaaatccacgaggtttattgatccaaacagtcggatgtggcaccggtgcctgacctcaaccgggcaaccagacttccattgatcaattattaaggaagcttgtagtagcatccgagtgtaaaggaaggttgtgtatagtatagcgaaagggacctaattgctttgtcaggccttgtctagcagcatatggttctgcaaaacattgttttgcattgtagataggctaagtttgaaataagaggtgagataggcaggatagccttagtatggcaaaatgatcatcttgaaggattcatgagtgaatgatagctaataaaatatttacgcttgatcaa

SEQ ID NO: 4441 - DNA, 1943 bp, Zea Mays
gttcgatttgctgatgcggccggctggtttgatcgtttttgggtgcgattgttgtgattgttttgtgagcttgcggcaggatatttgcatgcgggactgatcaatcaaagcaatggcagtagcgcccatggactgcggtgctggttcgattagtctaggccacaaggttttatgccgtttcggagtacccaacagcagtagattgcgatgggtgggatatgacaggaaacaaaggacagatcagttgattgctagagccgtatccgtggatcggacacaactagacttctcgaatccggactggaagacgcagtttcaagaggatttcgataagcgcttcagcttgccacacttgacagatgtaattgatgtggaaccgaggccaactactttttctctcaagagcagagcccctcttgagaacgcgaatggtaccatgcaaggatcatggaacggctatgtcaatgatgatgacagagcacttttgaaggttattaagtttgcctcaccaacttctgctggagctgactgcattgaccctgattgtagctgggttgaacaatgggtgcaccgtgctggtccacgcaaacaaatatattttgagcctcaatatgtgaaggctgggattgtgtcgtgtggtgggctctgcccaggtctcaatgatgtcattcggcagattgtgcttacacttgaaaaatatggggtgaaaaacattgttgggatacagcatggattccgtggattttttgaggatcacttatcagaagtgccactttctaggcatgtagtccaaaatatcaatcttgctggtggtagcttcttaggagtctctcgcggtggtgcaaacatttcagacattgttgacagtattcaggctaggaggcttgatatgctatttgtgcttggtggaaatggaacacatgctggagctaatgctatacatgatgagtgccgcaagagaaaactgcaagtatcgattgtatgtgtccccaaaactattgacaatgacatattactgatggacaagacctttggatttgatactgcagtggaagctgcacaaagagctatcaactctgcatacattgaggcacattctgcatttcatggcattggactggtcaagctgatgggaagaagcagcggcttcatcacaatgcatgcctccctgtcaagtggccaagtagatatctgtctgatacctgaggtaccattcactgttgatggaccgaatggagttcttcgacatctcgaacacctgatagagaccaagggatttgctctggtttgcgttgctgaaggagcaggacaggaatactttcaaaagtcaaatgcaactgatgcatcagggaacatggttcttagtgacattggtgtgcaccttcagcagaagatcaagtcccattttaaggacataggagtccattctgatgtcaagtatattgatccaacatacatgctccgcgctgtgcgagccaatgcatccgatgccatcctgtgcaccgtgcttggtcagaatgctgttcatggtgcctttgcgggttttagcggcatcacaaccggggtgtgcaacacacacaatgtgtacttgccgataccggaagtgatcaaatccacgaggtttattgatccaaacagtcggatgtggcaccggtgcctgacctcaaccgggcaaccagacttccattgatcaattattaaggaagcttgtagtagcatccgagtgtaaaggaaggttgtgtatagtatagcgaaagggacctaattgctttgtcaggccttgtctagcagcatatggttctgcaaaacattgttttgcattgtagataggctaagtttgaaataagaggtgagataggcaggatagccttagtatggcaaaatgatcatcttgaaggattcatgagtgaatgatagctaataaaatatttacgcttgatcaa

SEQ ID NO: 4442 - DNA, 498 bp, Zea Mays
cacatattttactcgtttcgtggccggcagctggacccataccgtcagcctgttcgtgcttttgctttttggctacgaagggaactgggctgtagcctacaaggaaacaacctcgcgcgagatttcaggttttagttgggatttgtatttgctccagggtatataatggagcacctgatatcctctcccatctatcgcaaaggaacgaacagaacccagaaaaaaaaatcgaagtagacctcgcggacgccaagagctaggagagagagagaggatgctgtcgaagtagaattgaagccatagtcgccgtcgtgcctctgctggggttcgcagggagacgaccgaccttgtgaagatgttcgaagaagtcgccgagcacgatgatgaatcggggctgtggggactcttcaccaaagtttgtgagagctacagaaccgcacaacaatgaggccaggaaattccaccatcaccatcgtgaggatacgtgttatcagaaga

SEQ ID NO: 4443 - DNA, 881 bp, Zea Mays
actcgatccatctaccaatcacgtaccatcatggcgctcaagggaggcggaggcggcggagggaggcaggaggcggcgtcggagctcatcaacctcaacgtcagagagacggaggcgtcctgcagcgagaataacagctccgagatcaacggcctcgacgtctccaggcctgatccggccgccggcgagagccccgccatgaacagctaccgcggcggcctcccgttctacgcctccgctgccgcccgcgccgacatccaccaccagctcctgcacagcggcggccagccgtccccagccgcggcggcgccgcctaagatggagctcgcccccggcagtcctcccgccacggccggtggcggcggaggcacctttggcagcctgctgtgcggcgccgctgtcgacgagccgccgccgttctggtcgtgggccgacggacaccacacctgcttccagtgaacaagtcaaatacgtacgattcttcccattcgtcatacacggtgagccacggatccaacagcacgtcgtcggccgccgccgacgtatatgttgtgggcaatgcaaatgcctcgtacgtgttgaacaaattgatcaaagaagcagctcggatatgcgaggtgatccattggatgagatgttccaatttgagttcgatcgagattaggatcatgcacggagtgaatcatatatacgagtatagctagattttggagttgagtagtatgtttttcttcttctttctattattacttaattatttctcccatctctctttatttatcactgttttcctgtttaattaatatcatatataggtgaatacatttgtgaggcagtggtgatgttatatattatgcatataggattatggtaccttgtca

SEQ ID NO: 4444 - DNA, 2417 bp, Zea Mays
ggttagaaaacagaaccaaaataaaagcagcacaaaagaagaggagaaaacgaattagaataagtaaaagagaagaatcccaagtacacattttaggtgcgtgtacaccacattgcagaggggagagagcgtgctacggcggcggcggcggcacagcaggggaagaacgtacacccgcagtcgaaagaggacggcgagacagctctcttcctatccacattctatataatctatggctaatcaggtagagattagagtgattgagagagcggggaaggaagttttgtacagagaagagaaagaggtagttgatgggaagggtttgatgtgattgccctttcttttctctttgcttcctggacacaacagccgccgccacttcctgccatcctttcgtcgttgattcggtgttcttggatcggatgccttcatctgcctagatcggagctagagcaaggtgcgtggtgtaaatcccgagaggaggaagaggggagggggtccaggccgcttgttcttgccgcgtacggttcttccaagaacccgcggcggggatggatctctacgatgagggagaggaaatggccttacaagacggggactcctgcctcgcgccacgggcttcgcggggcggatgcgaggtggacttgcagtgggcggatggcctcctcgaaggcgccgaccggaagcggcgtgcgcgggaaggcttcaaggatgaggtccatttcgtccaggaaatggacgaggtggatggcagcggcaagcgcagcaagccgccgtcgccgcaaccgcacacaccagatattcgtgaagctcatgcccctggccgccgtcgcaccgtggtggccggcggtggggagctcagctgtggcggtggtgatctcataggacaaattggccgggacctgtccatcaactgcctcctccggctgtgccggtcagaatatggctcagtggcatcgctgaatcatgatttccggtctcttgtgcgaggaggggagatctacaggctgcgacggcagaataacatcgcggagcattgggtgtacttctcctgtaatgttttggagtgggatgcttatgacccttaccgcaagcgttggatctcggtgcccaagatgcctcctgacgagtgcttcatgtgctcagacaaggagtctttggctgtgggcaccgagctacttgtgtttggaatggcacacattgtcttcagatacagtatactgacaaactcttggacacgaggtgaggtgatgaattctcctcggtgtctatttgggtcagcaagcgttggggagaaggcatatgttgctggtggcactgattcttttggcaggattctcagctcagcagagctgtacaactcggagacacatacttggacaccactccctagcatgaataaggcacgtaaaaattgctctggggtgttcatagatggcaagttttgtgtcattggtggtgtgacaaacaacaacatgatcttgacctgcggtgaagtgtacgatgtgcagagcaagacttggagggtgattgagaacatgtctgggggtcttaatggagtgagcggtgcacccccacttgttgcagtggttaagaatgagctgtatgctgctgattacagcgggaaggatgtgaagaagtatgacaagcagaataatgggtggatcacacttggtaaattgcctgagcggtctgtgtccatgaatggatggggccttgcattcagggcatgtggtgagaggcttattgtcattggtggcccaagaacaccagttgggggcatgattgagctgacctcatggactcctgatgacaagccacctgtgtggaatttgatggacagacggccatctggaaattttgtgtataattgcgctgtgatgggctgctgagctcgcttcatcaagggtctgcatagtgatgtttacaaagagaggggctgcggacatatgatggctgctgtttctggtttctcattatcgtcagcgtcacatggatctacacttagagatggcagatggcaaaggggcccgattccccttttttttgcggggaattcctcttgtttggttaggtatgaattggtgggaatttaagtggaatccactcaaattctcattaatccacccataaccgaacaagcctagagagatgtaaacggggaaaaaattatctcggcggataaagagagatggagaagcattcctcattatcgtttcccgcgggtccaatttatatatgatgatgttttcatatacacaaaatgatttcttacatgtaaattactttatcaagagaccaatcgttgtataaatgtgttaattttgacgtacacaaaatgattttttacatgtaacaatatgtgtaagtgacaatgttgtattaataacaaataaagtatgccatgattataattt

SEQ ID NO: 4445 - DNA, 861 bp, Zea Mays
tacataatgaaaagcattaaaatatctacattaaaattattagcacataattatgaagctaacaaaacaatatttaacttatttctgtttgaaatacccgttttattatgaacacactactatagagacacatatttaattattcgtagaattgaaggggtagaaaataagaatctaggaccccttcctaaatgaaaaaattgctattttagcccttctaacgtgggctctctgctattatgtgaccctctgtctatgacttgtgtgaccatttatgtttatgatttatgagcttggtggtaaaatagagaagtctaaacctgagagtgacaaaatagcaaattccccccttctaaatacatttgtattgctgcagaaagtgtgggcataaattacaaaagaccagtggccaaaaaatgaaaattggtcatcttctatctctagttcttgcgttcgcagcagctcatcgacaaatgaagggaggagagaaattgcgttgggctcgacgatgagcaggggaggggctggcgagtgttcggcgagcaggagcaggggtcgacgcgggcacagcgtcaaggtcaccggctgtccttgacggcgagcagctctaggctccggcgacgagcaaggttccggcgatggcgaccagaggctgcaacgacgagtttcatggcgagagagaagagagcgcgtggagaggttggggcggccaagcactggctccacgaggcctgagctcgttatttatagagaggggaaagcagagggagcgccagggagagaaatggaggtcgttgcaccattaacgtcaataatggtgctgccgttaccagagaagagtgagggaggggagagggaaag

SEQ ID NO: 4446 - DNA, 1811 bp, Zea Mays
gagaatcgaggattattatcgaataacagaacaccacttacctggtattcatgcgtcgaccatcaccggcgacggcgtatctccgtgctcacgtcccggcgtcccgagccggcggccacgggccataacagacccggaggacatcaccagcgcgagcgccgccagccccaagcaccgaggccgagccgcccgagcgcggagcggcggtaccacgccacccgcccgccgccgcccgttgcggaggctgtgcagcacagccgttggggtgccgaggcaccgatcaggctgcgcaaccgccgaagtcggcctccgggtggcgccaagctgcagagcagcgcgccagcgcccctgtatcggactacctttttcggcgagaccaccctagtagaggatgatatacaccgcgattgacacgttctacctgacggaggagcagctgcgcaactcaccatcacggaaggatgggatcgacgaggccactgagactgtgctccgcgtctatggctgcgacctcatccaggagagcggcatcctcctcaggctaccacaagcagtgatggccacggcacaagtattgttccatcgcttttactgcaaaaaatcatttgttcgatttagtgcaaagagagttgctgctagttgtgtttggctggcagggaagttggaggagagtcccaggaaatcaaagcatattatatttgtcttccatagaatggaatgtaggagagagaacttgccaattgaattcttagatgtcttttcaaagaaatattcagaactgaggcgtgacctgatacggacagaacgacatctgttgaaggagatggggtttatttgccatgtcgagcacccccataagttcatatcaaactaccttgcaacacttgaagcccctcccgagcttactcaagaggcatggaaccttgccaatgatagcttaaggacaactctgtgtgtgcgatttaagagtgaagtagtagcatgtggagttgtgtatgctgcagctaggagacaccgggttccccttcctgaagatcctccgtggtggactgtctttgatgctgatgaagcaggaattcaggaagtttgcagtgttcttgctcacctctacagcctgcccaaggctcaatacattccagtgtataaagaatatgattcctttactgttaagagaatctctgatccacaggctttaaaggaaagtccagcaagggctgttgctagcgataagggtacccctataccctcaagttctaaccaggagaaggattcagtggctaagactataccgaatagggtgaaggaaaaaagtgatgacgaaggacactcagacaaggagaaatcaaggcgccatccatcacacgaccgagttgactactacagttcgcattcatctcgtgaaaaagatcggcatagacaccattgatcaaggtgaggaggatcccgggtttgcagggctttgctgcatggagaccaccacatggcagtgccgacagaatcatgaaaacttgtagattgtcatctcattggcggttgcatttgcttcattgtgttttgcaccttggattgtaacttgcagagcaacatgaatttgtagaaccttcatctccactagttcccaaaattctcgagaattaatttagggtgttactaataaaaaatcatcctctaaccgttttttaaataggtttcaaatatacgaacttcgtaaatattcctatttactctctagacttggggggcctcttgtgaactctcaatatcctattttgcccgtcaattacaccgtaaaattacatcgtaaaattatt

SEQ ID NO: 4447 - DNA, 1717 bp, Zea Mays
atttgggcttattgattgtgtatatgcgaaattggactacctttttcggcgagaccaccctagtagaggatgatatacaccgcgattgacacgttctacctgacggaggagcagctgcgcaactcaccatcacggaaggatgggatcgacgaggccactgagactgtgctccgcgtctatggctgcgacctcatccaggagagcggcatcctcctcaggctaccacaagcagtgatggccacggcacaagtattgttccatcgcttttactgcaaaaaatcatttgttcgatttagtgcaaagagagttgctgctagttgtgtttggctggcagggaagttggaggagagtcccaggaaatcaaagcatattatatttgtcttccatagaatggaatgtaggagagagaacttgccaattgaattcttagatgtcttttcaaagaaatattcagaactgaggcgtgacctgatacggacagaacgacatctgttgaaggagatggggtttatttgccatgtcgagcacccccataagttcatatcaaactaccttgcaacacttgaagcccctcccgagcttactcaagaggcatggaaccttgccaatgatagcttaaggacaactctgtgtgtgcgatttaagagtgaagtagtagcatgtggagttgtgtatgctgcagctaggagacaccgggttccccttcctgaagatcctccgtggtggactgtctttgatgctgatgaagcaggaattcaggaagtttgcagtgttcttgctcacctctacagcctgcccaaggctcaatacattccagtgtataaagaatatgattcctttactgttaagagaatctctgatccacaggctttaaaggaaagtccagcaagggctgttgctagcgataagggtacccctataccctcaagttctaaccaggagaaggattcagtggctaagactataccgaatagggtgaaggaaaaaagtgatgacgaaggtagacacttgcctgctgaatttgatggaaaagaaaacctggtggtgaactcaaaaattgagaagtctgattctggtgttgactggagtcgagaaagagaaagagaaagagagagatcaagagggcgggaacgtgatgctaggggtagggattctgatcatgatagcaggggtcgtgactctgatcgcgagagggatcggagacgtcgctctagggatagaagttcaggacactcagacaaggagaaatcaaggcgccatccatcacacgaccgagttgactactacagttcgcattcatctcgtgaaaaagatcggcatagacaccattgatcaaggtgaggaggatcccgggtttgcagggctttgctgcatggagaccaccacatggcagtgccgacagaatcatgaaaacttgtagattgtcatctcattggcggttgcatttgcttcattgtgttttgcaccttggattgtaacttgcagagcaacatgaatttgtagaaccttcatctccactagttcccaaaattctcgagaattaatttagggtgttactaataaaaaatcatcctctaaccgttttttaaataggtttcaaatatacgaacttcgtaaatattcctatttactctctagacttggggggcctcttgtgaactctcaatatcctattttgcccgtcaattacaccgtaaaattacatcgtaaaattatt

SEQ ID NO: 4448 - DNA, 1135 bp, Zea Mays
cacgccctgcacgcgatagaaaacatttagtaaaataagtgcttaaggacaactctgtgtgtgcgatttaagagtgaagtagtagcatgtggagttgtgtatgctgcagctaggagacaccgggttccccttcctgaagatcctccgtggtggactgtctttgatgctgatgaagcaggaattcaggaagtttgcagtgttcttgctcacctctacagcctgcccaaggctcaatacattccagtgtataaagaatatgattcctttactgttaagagaatctctgatccacaggctttaaaggaaagtccagcaagggctgttgctagcgataagggtacccctataccctcaagttctaaccaggagaaggattcagtggctaagactataccgaatagggtgaaggaaaaaagtgatgacgaaggtagacacttgcctgctgaatttgatggaaaagaaaacctggtggtgaactcaaaaattgagaagtctgattctggtgttgactggagtcgagaaagagaaagagaaagagagagatcaagagggcgggaacgtgatgctaggggtagggattctgatcatgatagcaggggtcgtgactctgatcgcgagagggatcggagacgtcgctctagggatagaagttcagacaaggagaaatcaaggcgccatccatcacacgaccgagttgactactacagttcgcattcatctcgtgaaaaagatcggcatagacaccattgatcaaggtgaggaggatcccgggtttgcagggctttgctgcatggagaccaccacatggcagtgccgacagaatcatgaaaacttgtagattgtcatctcattggcggttgcatttgcttcattgtgttttgcaccttggattgtaacttgcagagcaacatgaatttgtagaaccttcatctccactagttcccaaaattctcgagaattaatttagggtgttactaataaaaaatcatcctctaaccgttttttaaataggtttcaaatatacgaacttcgtaaatattcctatttactctctagacttggggggcctcttgtgaactctcaatatcctattttgcccgtcaattacaccgtaaaattacatcgtaaaattatt

SEQ ID NO: 4449 - DNA, 1141 bp, Zea Mays
gccctgcacgcgatagaaaacatttagtaaaataagtgcttaaggacaactctgtgtgtgcgatttaagagtgaagtagtagcatgtggagttgtgtatgctgcagctaggagacaccgggttccccttcctgaagatcctccgtggtggactgtctttgatgctgatgaagcaggaattcaggaagtttgcagtgttcttgctcacctctacagcctgcccaaggctcaatacattccagtgtataaagaatatgattcctttactgttaagagaatctctgatccacaggctttaaaggaaagtccagcaagggctgttgctagcgataagggtacccctataccctcaagttctaaccaggagaaggattcagtggctaagactataccgaatagggtgaaggaaaaaagtgatgacgaaggtagacacttgcctgctgaatttgatggaaaagaaaacctggtggtgaactcaaaaattgagaagtctgattctggtgttgactggagtcgagaaagagaaagagaaagagagagatcaagagggcgggaacgtgatgctaggggtagggattctgatcatgatagcaggggtcgtgactctgatcgcgagagggatcggagacgtcgctctagggatagaagttcaggacactcagacaaggagaaatcaaggcgccatccatcacacgaccgagttgactactacagttcgcattcatctcgtgaaaaagatcggcatagacaccattgatcaaggtgaggaggatcccgggtttgcagggctttgctgcatggagaccaccacatggcagtgccgacagaatcatgaaaacttgtagattgtcatctcattggcggttgcatttgcttcattgtgttttgcaccttggattgtaacttgcagagcaacatgaatttgtagaaccttcatctccactagttcccaaaattctcgagaattaatttagggtgttactaataaaaaatcatcctctaaccgttttttaaataggtttcaaatatacgaacttcgtaaatattcctatttactctctagacttggggggcctcttgtgaactctcaatatcctattttgcccgtcaattacaccgtaaaattacatcgtaaaattatt

SEQ ID NO: 4450 - DNA, 506 bp, Zea Mays
atcgctgagaaccaatcagattttcaacaaggagaaatcaaggcgccatccatcacacgaccgagttgactactacagttcgcattcatctcgtgaaaaagatcggcatagacaccattgatcaaggtgaggaggatcccgggtttgcagggctttgctgcatggagaccaccacatggcagtgccgacagaatcatgaaaacttgtagattgtcatctcattggcggttgcatttgcttcattgtgttttgcaccttggattgtaacttgcagagcaacatgaatttgtagaaccttcatctccactagttcccaaaattctcgagaattaatttagggtgttactaataaaaaatcatcctctaaccgttttttaaataggtttcaaatatacgaacttcgtaaatattcctatttactctctagacttggggggcctcttgtgaactctcaatatcctattttgcccgtcaattacaccgtaaaattacatcgtaaaattatt

SEQ ID NO: 4451 - DNA, 1649 bp, Zea Mays
taattatgtctcctctcgtcagctgagagatcacgtccgaggatttataatcatgtttggtttctagcaaattatcctcgacagggagattaggagtcgagttacatatgaaattatctgatcttaaatcatatcaaacacaatttttaaatagcatgaccgatgttgtggagcgatccgatcgtatctcacccagatccaaacgtgcgggtataaatatctagtaaaaattttatttgatttttttgaacgtctaccaaaatgagcatcgtctaaatactgaagtcaatctccttttggtccaatccatttatgcctatgttaaaccttaatccgagcatcatatttatccataagttataacaaaaaaaatggaaaatcccatttctattatctattccatcggccttatccagctaccatccatggcttatcctcacgtacgtagctcctggaattctcaagaagccactgttcacaggtcttgtcattatttaaaatttaagtggaccaaagtaattagaactgaaccaaataattgctaatcagtttgtggctcggtttcataatctgaaaagcgaaataggggtcccaaatacattttggggtggctcatttgaactcttcccaaaccatagaaactagatacgtgcttatgattttgtaaacaatgggagaagaaatatctgatttcttatccttctcaccgctcaactcctatcccttatccttccacgctgtgctcgtcggctgccctgcagttcccccatggacgcctcctttctaatctgtgtgcaggggtttccttcccatggtcgccctcaaccccatggtcgacctcgcctagcccttcccccatctcctccccaagctcggttcggcatggaggctggccacaggacgcagcacaccaacctcaccggccataccctctgcttttccccactgtccgcagccctgatgtcgtcgtcgtgattagacatgtgtggcgaaaagaaagattctagagtttggtgggaaaggaaagctctatcacgacgaccaccaggtacgttcattgatcacgtattgtggaggacaacaacaactggaataatctcaaagtgggattgatgaatgaacccaaagctgaatgatctgatcgtactggaatgggaggtgctcgccaagcgagtatcatctaacaacactgacttagtgtttatcccaggcaagccccggtgcatttgccacccccttgttgttataaaactttttatcacttatatgttgcattaggtgataggagttgtgtgaataaacaattgatgcattaccattccttagaattttattactattccttgattcctctttataaaagagaactaaagatgcttagtcctgcttagataattaaaaagttgttctttttaataaagatgatgtgttacacgggatatgggaaatttttgtgaaaaagaaattgggatggtgaatccatatggccatgatggattcaacgtccagaaaaagtacctctgtcaggtaccaaggattgggaaacggtttaactaaaatgagaccagacgttgagcaggaaaggtcgcccgtctgtgtcgattaaggaccgttccgattgttggcctgctgatctaggaccctttaac

SEQ ID NO: 4452 - DNA, 1257 bp, Zea Mays
cccatttctattatctattccatcggccttatccagctaccatccatggcttatcctcacgtacgtagctcctggaattctcaagaagccactgttcacaggtcttgtcattatttaaaatttaagtggaccaaagtaattagaactgaaccaaataattgctaatcagtttgtggctcggtttcataatctgaaaagcgaaataggggtcccaaatacattttggggtggctcatttgaactcttcccaaaccatagaaactagatacgtgcttatgattttgtaaacaatgggagaagaaatatctgatttcttatccttctcaccgctcaactcctatcccttatccttccacgctgtgctcgtcggctgccctgcagttcccccatggacgcctcctttctaatctgtgtgcaggggtttccttcccatggtcgccctcaaccccatggtcgacctcgcctagcccttcccccatctcctccccaagctcggttcggcatggaggctggccacaggacgcagcacaccaacctcaccggccataccctctgcttttccccactgtccgcagccctgatgtcgtcgtcgtgattagacatgaaagattctagagtttggtgggaaaggaaagctctatcacgacgaccaccaggtacgttcattgatcacgtattgtggaggacaacaacaactggaataatctcaaagtgggattgatgaatgaacccaaagctgaatgatctgatcgtactggaatgggaggtgctcgccaagcgagtatcatctaacaacactgacttagtgtttatcccaggcaagccccggtgcatttgccacccccttgttgttataaaactttttatcacttatatgttgcattaggtgataggagttgtgtgaataaacaattgatgcattaccattccttagaattttattactattccttgattcctctttataaaagagaactaaagatgcttagtcctgcttagataattaaaaagttgttctttttaataaagatgatgtgttacacgggatatgggaaatttttgtgaaaaagaaattgggatggtgaatccatatggccatgatggattcaacgtccagaaaaagtacctctgtcaggtaccaaggattgggaaacggtttaactaaaatgagaccagacgttgagcaggaaaggtcgcccgtctgtgtcgattaaggaccgttccgattgttggcctgctgatctaggaccctttaac

SEQ ID NO: 4453 - DNA, 683 bp, Zea Mays
atctgatttcttatccttctcaccgctcaactcctatcccttatccttccacgctgtgctcgtcggctgccctgcagttcccccatggacgcctcctttctaatctgtgtgcaggggtttccttcccatggtcgccctcaaccccatggtcgacctcgcctagcccttcccccatctcttccccaagctcggttcggcatggaggctggccacaggacgcagcacaccaacctcaccggccataccctctgcttttccccactgtccgcagccccgatgtcgtcgtcgtgattagacatggtacgttcattgatcacgtattgtggaggacaacaacaactggaataatctcaaagtgggattgatgaatgaacccaaagctgaatgatctgatcgtactggaatgggaggtgctcgccaagcgagtatcatctaacaacactgacttagtgtttatcccaggcaagccccggtgcatttgccacccccttgttgttataaaactttttatcacttatatgttgcattaggtgataggagttgtgtgaataaacaattgatgcattaccattccttagaattttattactattccttgattcctctttataaaagagaactaaagatgcttagtcctgcttagataattaaaaagttgttctttttaataaagatgatgtgtt

SEQ ID NO: 4454 - DNA, 884 bp, Zea Mays
atctgatttcttatccttctcaccgctcaactcctatcccttatccttccacgatgtgctgtcggcctcatctcccaagtccaagccattcttgttccttctctgctcgttctcatggccgagctccccacgtccgccgctcctccctggcgccctcacctccattggagctcgcccctgttgagctcacctgtgctcgtcggctgccctgcagttcccccatggacgcctcctttctaatctgtgtgcaggggtttccttcccatggtcgccctcaaccccatggtcgacctcgcctagcccttcccccatctcttccccaagctcggttcggcatggaggctggccacaggacgcagcacaccaacctcaccggccataccctctgcttttccccactgtccgcagccccgatgtcgtcgtcgtgattagacatgtgtggcgaaaagaaagattctagagtttggtgggaaaggaaagctctatcacgacgaccaccaggtacgttcattgatcacgtattgtggaggacaacaacaactggaataatctcaaagtgggattgatgaatgaacccaaagctgaatgatctgatcgtactggaatgggaggtgctcgccaagcgagtatcatctaacaacactgacttagtgtttatcccaggcaagccccggtgcatttgccacccccttgttgttataaaactttttatcacttatatgttgcattaggtgataggagttgtgtgaataaacaattgatgcattaccattccttagaattttattactattccttgattcctctttataaaagagaactaaagatgcttagtcctgcttagataattaaaaagttgttctttttaataaagatgatgtgtt

SEQ ID NO: 4455 - DNA, 595 bp, Zea Mays
tgagcgtcgtgcaccgcgagcatacatatgagtcgagaggagcgcagagaaagagcaagagggagagagaagtctgccacgcgggcatcatgccggtgtcttctcaccgcgttgggagtaaggtctgggcgagttgttgtggcacactgatgatgggcataccctcaccgggagagattggtggcgaggccgcgtgggaattgcttgtcaggatcgctgagtcactgtcatgccgcatctcgtcgtggtcaggcacctacatggctccaaatctttggtcaagaacaggtaccccaggatgagaaacatgaaggatggcgcgatgtgttcatgagaggtctataccgtcgtcacccaatcaactttggttgctggattgttgtctttgtatgatgtaattatttaaatattttatacagaactccgttatatattaatgttgtgacattcgtttatgtaccatgagtcatcatatgtgtaagacttattcctagcacacttggtgattatgttcacgcccgagtccctaaaaaccgggtgtgacacaaaaccacataaacaatagcatgtactacccaaaagttcagtggtaaac

SEQ ID NO: 4456 - DNA, 3852 bp, Zea Mays
aatatggccgcgccccatcacctctgtctcgagccgtccctctcaatcccccgcaccctctctccctgagcgctcgcgagcctgcggccaccaccgccgtctccacgccgcgcagatccgcccagccggttcggccccactcgagaatacgtgtacggacgcaggccccgcccacctcgccgaggactcgctcctgtgtcgtgcgcgccagcactaccggtggccgtgcgcggctgggccgtgccgattcgaccgaatccggtggaattcaccgtgccgtggtgtcaaatcggtgagctccgttgggttacgcgtgggtggaggctcgttcaggtctgggcggccgtaagtggcgccgggcatggttctagggtttggttttggtcttttggcgtgagggcatggcggatgggggccggatgaagggcgtacagagcgctggcggtggcgccggtgacgacgaagaggggaatgaggaggtgcgagaggagccggaactcgcgctgtcgctggggcggcgagtctggcacctcccgccgcggcaggaggccgctccccgctcacttaactggactccggttctgccggagtggaaccccgacgccgctgggagctcgcagggtgtggaaagggccttgggcggacaatccatctcttctcttgggttccatgacatgtttggtggtatcctagacgatccccaagcgggtggcagtatggaggttgggtggggcaagctgaacgaagaggatgaagacagagacctgcagaataaacggctcagagtacgacactttggcgaagaaaacccactgcattctggtgccagtgctactccctttggctctgaatcgtcatttttgcccatttctgatgaatgtgttcatttaaagctgtctcgtttcccagaacatgaattggaatttgggttgtcacttttcgcaaatgatggtagtgagagcccaagggatgccaataatgagcaagtcgatgatgcagaaaactccggtggaagaaattctgtggatgttggaataagaatggatctctccgatgatttcctgcacatgattttctctttcttggaccagaaggatttatgcagagcaggtgtgacctgtaaacagtggcgatctgctagtgtgcatgatgatttttggaagtgtttgaaatttgagaacactagcgtatcactggagaactttgttaatatttgccgtcattaccagagtgtcacagaactcaatttgcatggtgtcataaatgcagaaacactagttctggaagcaataatgtttttaaggcatctgaagacattaacaatgggcaagggacaactgggagaatcattttttcaagctttggctgagtgcccattattgactgctttaacagtaaacgatgcttctcttgggagtggcattcaagaagtaactgttaatcatgatggactgcgtgagcttcatattttgaagtgccgtgcacttagaatatctgtcagatgttcccaacttcaaatactgtctttgaggcgaacaggcatggctcatgtatcactgaactgtcctcagttgcttgagttggacttccaatcctgccataagctttctgacaatgcgattcgccaagctgctacagcttgcccattgttggcaaaactagacatgtcatcttgttcttgtgttactgatgagacattgcgtgacatagctagctcatgtccgagtctttctgttcttgatgcatcaaactgccccaacatttcatttgagtccgtgaggcttccaatgttaatagacttgagacttctaagttgtgaaggaatcacatctgcttcgatggctgcaatagcttatagccgtctgcttgaggcactacagcttgataattgcagcctgttgacatcagtgtctttggacttaccacatcttaagaatataagtctcgtgcacttacgcaaatttgctgatttgaatttgcgaagccctgtgctttcttacatcaaagtttccagatgttcggcactccatcgagttagcataacatcgactacacttcagaaattggttcttcaaaaacaagagagcttatccagtttgtcattgcaatgccacaacttgattgatgtggatcttactgagtgcgagtcattaacaaatgcggtttgtgaagtatttagtgatggaggtggttgccctatgctaagatcattgatccttgacaattgcgagaatttgagcattgtagaactgaacagcagttctttgtcctgcctctctcttgctggttgccgctcgatgacattgttaagactctcatgcccaaatctgcaacatgtcaatcttgatggctgtgatcaccttcaaagtgcagcattctgtccagtgggtctcgaatccctaaatctgggaatttgtccaaaactgagtgttcttcacattgaggctccaaatatgtctatattggagctgaagggttgtggtgtgctttccaaggcttccatcaattgccctcgcttgacttcgttggatgcctctttctgcaggcagcttgtggatgattctctgacttgtatgtcagaggcatgtcctatgattgaacatcttattctgtcatcatgcctatccattggcatcgatggattgtcctcattgcattgccttcataagctgaccttgcttgacctgtcttatacctttttggacaacttgaagcctgttttcaacagttgtctgcagttgaaggtgttaaaactttcagcttgcaagtacctcagtgactcatcattagatgccctctacagagagggtgctcttccattgcttgttgagctagatctgtcctactcgtccattggacagaatgcgatagaagatcttcttgcttgttgtactaatttggttaatgtgaacttgaatggatgtacaaactttcaagaattggtgtgtgggtcagatgatagcagttgtgtcgatatgccagttgacttttgtgcacctagttcagcaatcaagagtgaagagatcagtgagcgatctggtcgcctccttgaagttctcaattgtactgggtgccctaatatcaagaaagttgttattccttcaatagcgaactttctacatttgtccaaaattaatcttaatctttcgaccaacttgaaggaagtggatttgacatgtcccaatcttttaacgttaaacttgagcaactgtagctcactggaggtgctgaaagcttgattgccccaagattgtccaatctccagcttctgcggcaggaggccgctccccgctcacttaactggactccggttctgcaagagtggaaccccgacgccgctgggagctcgcagggtgtggaaagggccttgggcgggcaatccatctcttctcttgggttccatgacatgtttggtggtatcctagacgatccccaagcgggtggcagtatggaggttgggtggggcaagctgaacgaagaggatgaagacagagacctgcagaatacaaacatcaagtcaggacaagctctctccttagagctcttgtacatagtacccaagcattgccggtatattgcaaggcatggtatattaggagccaggggcaatgatatcttatttttccagtccattcatgttgctgaataagtatttttgtgaatctgttttgttgccggaggtaacaaaatatctgttcatgtttttttttctgtattccttggaagtgtaccgatggagctatatgctggtttatatgcatcaataatcttgtttggatatagaattttggaaccgctttgctaatgtcatctgaggtgtagctttatatagcatgtttaattgttcgaaga

SEQ ID NO: 4457 - DNA, 3595 bp, Zea Mays
ctcgagccgtccctctcaatcccccgcaccctctctccctgagcgctcgcgagcctgcggccaccaccgccgtctccacgccgcgcagatccgcccagccggttcggccccactcgagaatacgtgtacggacgcaggccccgcccacctcgccgaggactcgctcctgtgtcgtgcgcgccagcactaccggtggccgtgcgcggctgggccgtgccgattcgaccgaatccggtggaattcaccgtgccgtggtgtcaaatcggtgagctccgttgggttacgcgtgggtggaggctcgttcaggtctgggcggccgtaagtggcgccgggcatggttctagggtttggttttggtcttttggcgtgagggcatggcggatgggggccggatgaagggcgtacagagcgctggcggtggcgccggtgacgacgaagaggggaatgaggaggtgcgagaggagccggaactcgcgctgtcgctggggcggcgagtctggcacctcccgccgcggcaggaggccgctccccgctcacttaactggactccggttctgccggagtggaaccccgacgccgctgggagctcgcagggtgtggaaagggccttgggcggacaatccatctcttctcttgggttccatgacatgtttggtggtatcctagacgatccccaagcgggtggcagtatggaggttgggtggggcaagctgaacgaagaggatgaagacagagacctgcagaataaacggctcagagtacgacactttggcgaagaaaacccactgcattctgaacatgaattggaatttgggttgtcacttttcgcaaatgatggtagtgagagcccaagggatgccaataatgagcaagtcgatgatgcagaaaactccggtggaagaaattctgtggatgttggaataagaatggatctctccgatgatttcctgcacatgattttctctttcttggaccagaaggatttatgcagagcaggtgtgacctgtaaacagtggcgatctgctagtgtgcatgatgatttttggaagtgtttgaaatttgagaacactagcgtatcactggagaactttgttaatatttgccgtcattaccagagtgtcacagaactcaatttgcatggtgtcataaatgcagaaacactagttctggaagcaataatgtttttaaggcatctgaagacattaacaatgggcaagggacaactgggagaatcattttttcaagctttggctgagtgcccattattgactgctttaacagtaaacgatgcttctcttgggagtggcattcaagaagtaactgttaatcatgatggactgcgtgagcttcatattttgaagtgccgtgcacttagaatatctgtcagatgttcccaacttcaaatactgtctttgaggcgaacaggcatggctcatgtatcactgaactgtcctcagttgcttgagttggacttccaatcctgccataagctttctgacaatgcgattcgccaagctgctacagcttgcccattgttggcaaaactagacatgtcatcttgttcttgtgttactgatgagacattgcgtgacatagctagctcatgtccgagtctttctgttcttgatgcatcaaactgccccaacatttcatttgagtccgtgaggcttccaatgttaatagacttgagacttctaagttgtgaaggaatcacatctgcttcgatggctgcaatagcttatagccgtctgcttgaggcactacagcttgataattgcagcctgttgacatcagtgtctttggacttaccacatcttaagaatataagtctcgtgcacttacgcaaatttgctgatttgaatttgcgaagccctgtgctttcttacatcaaagtttccagatgttcggcactccatcgagttagcataacatcgactacacttcagaaattggttcttcaaaaacaagagagcttatccagtttgtcattgcaatgccacaacttgattgatgtggatcttactgagtgcgagtcattaacaaatgcggtttgtgaagtatttagtgatggaggtggttgccctatgctaagatcattgatccttgacaattgcgagaatttgagcattgtagaactgaacagcagttctttgtcctgcctctctcttgctggttgccgctcgatgacattgttaagactctcatgcccaaatctgcaacatgtcaatcttgatggctgtgatcaccttcaaagtgcagcattctgtccagtgggtctcgaatccctaaatctgggaatttgtccaaaactgagtgttcttcacattgaggctccaaatatgtctatattggagctgaagggttgtggtgtgctttccaaggcttccatcaattgccctcgcttgacttcgttggatgcctctttctgcaggcagcttgtggatgattctctgacttgtatgtcagaggcatgtcctatgattgaacatcttattctgtcatcatgcctatccattggcatcgatggattgtcctcattgcattgccttcataagctgaccttgcttgacctgtcttatacctttttggacaacttgaagcctgttttcaacagttgtctgcagttgaaggtgttaaaactttcagcttgcaagtacctcagtgactcatcattagatgccctctacagagagggtgctcttccattgcttgttgagctagatctgtcctactcgtccattggacagaatgcgatagaagatcttcttgcttgttgtactaatttggttaatgtgaacttgaatggatgtacaaactttcaagaattggtgtgtgggtcagatgatagcagttgtgtcgatatgccagttgacttttgtgcacctagttcagcaatcaagagtgaagagatcagaagtggatttgacatgtcccaatcttttaacgttaaacttgagctcactggaggtgctgaaagcttgattgccccaagattgtccaatctccagcttctgcggcaggaggccgctccccgctcacttaactggactccggttctgcaagagtggaaccccgacgccgctgggagctcgcagggtgtggaaagggccttgggcgggcaatccatctcttctcttgggttccatgacatgtttggtggtatcctagacgatccccaagcgggtggcagtatggaggttgggtggggcaagctgaacgaagaggatgaagacagagacctgcagaatacaaacatcaagtcaggacaagctctctccttagagctcttgtacatagtacccaagcattgccggtatattgcaaggcatggtatattaggagccaggggcaatgatatcttatttttccagtccattcatgttgctgaataagtatttttgtgaatctgttttgttgccggaggtaacaaaatatctgttcatgtttttttttctgtattccttggaagtgtaccgatggagctatatgctggtttatatgcatcaataatcttgtttggatatagaattttggaaccgctttgctaatgtcatctgaggtgtagctttatatagcatgtttaattgttcgaaga

SEQ ID NO: 4458 - DNA, 1755 bp, Zea Mays
ctctcaatcccccgcaccctctctccctgagcgctcgcgagcctgcggccaccaccgccgtctccacgccgcgcagatccgcccagccggttcggccccactcgagaatacgtgtacggacgcaggccccgcccacctcgccgaggactcgctcctgtgtcgtgcgcgccagcactaccggtggccgtgcgcggctgggccgtgccgattcgaccgaatccggtggaattcaccgtgccgtggtgtcaaatcggtgagctccgttgggttacgcgtgggtggaggctcgttcaggtctgggcggccgtaagtggcgccgggcatggttctagggtttggttttggtcttttggcgtgagggcatggcggatgggggccggatgaagggcgtacagagcgctggcggtggcgccggtgacgacgaagaggggaatgaggaggtgcgagaggagccggaactcgcgctgtcgctggggcggcgagtctggcacctcccgccgcggcaggaggccgctccccgctcacttaactggactccggttctgccggagtggaaccccgacgccgctgggagctcgcagggtgtggaaagggccttgggcggacaatccatctcttctcttgggttccatgacatgtttggtggtatcctagacgatccccaagcgggtggcagtatggaggttgggtggggcaagctgaacgaagaggatgaagacagagacctgcagaataaacggctcagagtacgacactttggcgaagaaaacccactgcattctggtgccagtgctactccctttggctctgaatcgtcatttttgcccatttctgatgaatgtgttcatttaaagctgtctcgtttcccagaacatgaattggaatttgggttgtcacttttcgcaaatgatggtagtgagagcccaagggatgccaataatgagcaagtcgatgatgcagaaaactccggtggaagaaattctgtggatgttggaataagaatggatctctccgatgatttcctgcacatgattttctctttcttggaccagaaggatttatgcagagcaggtgtgacctgtaaacagtggcgatctgctagtgtgcatgatgatttttggaagtgtttgaaatttgagaacactagcgtatcactggagaactttgttaatatttgccgtcattaccagagtgtcacagaactcaatttgcatggtgtcataaatgcagaaacactagttctggaagcaataatgtttttaaggcatctgaagacattaacaatgggcaagggacaactgggagaatcattttttcaagctttggctgagtgcccattattgactgctttaacagtaaacgatgcttctcttgggagtggcattcaagaagtaactgttaatcatgatggactgcgtgagcttcatattttgaagtgccgtgcacttagaatatctgtcagatgttcccaacttcaaatactgtctttgaggcgaacaggcatggctcatgtatcactgaactgtcctcagttgcttgagttggacttccaatcctgccataagctttctgacaatgcgattcgccaagctgctacagcttgcccattgttggcaaaactagacatgtcatcttgttcttgtgttactgatgagacattgcgtgacatagctagctcatgtccgagtctttctgttcttgatgcatcaaactgccccaacatttcatttgaggcccaatgccggaggctcccac

SEQ ID NO: 4459 - DNA, 3973 bp, Zea Mays
ctctcaatcccccgcaccctctctccctgagcgctcgcgagcctgcggccaccaccgccgtctccacgccgcgcagatccgcccagccggttcggccccactcgagaatacgtgtacggacgcaggccccgcccacctcgccgaggactcgctcctgtgtcgtgcgcgccagcactaccggtggccgtgcgcggctgggccgtgccgattcgaccgaatccggtggaattcaccgtgccgtggtgtcaaatcggtgagctccgttgggttacgcgtgggtggaggctcgttcaggtctgggcggccgtaagtggcgccgggcatggttctagggtttggttttggtcttttggcgtgagggcatggcggatgggggccggatgaagggcgtacagagcgctggcggtggcgccggtgacgacgaagaggggaatgaggaggtgcgagaggagccggaactcgcgctgtcgctggggcggcgagtctggcacctcccgccgcggcaggaggccgctccccgctcacttaactggactccggttctgccggagtggaaccccgacgccgctgggagctcgcagggtgtggaaagggccttgggcggacaatccatctcttctcttgggttccatgacatgtttggtggtatcctagacgatccccaagcgggtggcagtatggaggttgggtggggcaagctgaacgaagaggatgaagacagagacctgcagaataaacggctcagagtacgacactttggcgaaacatgaattggaatttgggttgtcacttttcgcaaatgatggtagtgagagcccaagggatgccaataatgagcaagtcgatgatgcagaaaactccggtggaagaaattctgtggatgttggaataagaatggatctctccgatgatttcctgcacatgattttctctttcttggaccagaaggatttatgcagagcaggtgtgacctgtaaacagtggcgatctgctagtgtgcatgatgatttttggaagtgtttgaaatttgagaacactagcgtatcactggagaactttgttaatatttgccgtcattaccagagtgtcacagaactcaatttgcatggtgtcataaatgcagaaacactagttctggaagcaataatgtttttaaggcatctgaagacattaacaatgggcaagggacaactgggagaatcattttttcaagctttggctgagtgcccattattgactgctttaacagtaaacgatgcttctcttgggagtggcattcaagaagtaactgttaatcatgatggactgcgtgagcttcatattttgaagtgccgtgcacttagaatatctgtcagatgttcccaacttcaaatactgtctttgaggcgaacaggcatggctcatgtatcactgaactgtcctcagttgcttgagttggacttccaatcctgccataagctttctgacaatgcgattcgccaagctgctacagcttgcccattgttggcaaaactagacatgtcatcttgttcttgtgttactgatgagacattgcgtgacatagctagctcatgtccgagtctttctgttcttgatgcatcaaactgccccaacatttcatttgagtccgtgaggcttccaatgttaatagacttgagacttctaagttgtgaaggaatcacatctgcttcgatggctgcaatagcttatagccgtctgcttgaggcactacagcttgataattgcagcctgttgacatcagtgtctttggacttaccacatcttaagaatataagtctcgtgcacttacgcaaatttgctgatttgaatttgcgaagccctgtgctttcttacatcaaagtttccagatgttcggcactccatcgagttagcataacatcgactacacttcagaaattggttcttcaaaaacaagagagcttatccagtttgtcattgcaatgccacaacttgattgatgtggatcttactgagtgcgagtcattaacaaatgcggtttgtgaagtatttagtgatggaggtggttgccctatgctaagatcattgatccttgacaattgcgagaatttgagcattgtagaactgaacagcagttctttgtcctgcctctctcttgctggttgccgctcgatgacattgttaagactctcatgcccaaatctgcaacatgtcaatcttgatggctgtgatcaccttcaaagtgcagcattctgtccagagaaggacaagctggtggcggacgtgatgcactacgtgctcttcaggacgcaccagaactttgactgccccatcaagcaagaggagctcaccgggatcgtcaccaagaattaccgccagcgtgtgctacccacacttgtcatcaaggaggccaaggacatgctcgccgccaccttcggctatgagatgagggagctacagaggagtcgtgcactctggtcggggttttggacgagctggtcagaggcggctgcgccaacaaaggaggtgggtctcgaatccctaaatctgggaatttgtccaaaactgagtgttcttcacattgaggctccaaatatgtctatattggagctgaagggttgtggtgtgctttccaaggcttccatcaattgccctcgcttgacttcgttggatgcctctttctgcaggcagcttgtggatgattctctgacttgtatgtcagaggcatgtcctatgattgaacatcttattctgtcatcatgcctatccattggcatcgatggattgtcctcattgcattgccttcataagctgaccttgcttgacctgtcttatacctttttggacaacttgaagcctgttttcaacagttgtctgcagttgaaggtgttaaaactttcagcttgcaagtacctcagtgactcatcattagatgccctctacagagagggtgctcttccattgcttgttgagctagatctgtcctactcgtccattggacagaatgcgatagaagatcttcttgcttgttgtactaatttggttaatgtgaacttgaatggatgtacaaactttcaagaattggtgtgtgggtcagatgatagcagttgtgtcgatatgccagttgacttttgtgcacctagttcagcaatcaagagtgaagagatcagtgagcgatctggtcgcctccttgaagttctcaattgtactgggtgccctaatatcaagaaagttgttattccttcaatagcgaactttctacatttgtccaaaattaatcttaatctttcgaccaacttgaaggaagtggatttgacatgtcccaatcttttaacgttaaacttgagcaactgtagctcactggaggtgctgaaagcttgattgccccaagattgtccaatctccagcttctgcggcaggaggccgctccccgctcacttaactggactccggttctgcaagagtggaaccccgacgccgctgggagctcgcagggtgtggaaagggccttgggcgggcaatccatctcttctcttgggttccatgacatgtttggtggtatcctagacgatccccaagcgggtggcagtatggaggttgggtggggcaagctgaacgaagaggatgaagacagagacctgcagaatacaaacatcaagtcaggacaagctctctccttagagctcttgtacatagtacccaagcattgccggtatattgcaaggcatggtatattaggagccaggggcaatgatatcttatttttccagtccattcatgttgctgaataagtatttttgtgaatctgttttgttgccggaggtaacaaaatatctgttcatgtttttttttctgtattccttggaagtgtaccgatggagctatatgctggtttatatgcatcaataatcttgtttggatatagaattttggaaccgctttgctaatgtcatctgaggtgtagctttatatagcatgtttaattgttcgaaga

SEQ ID NO: 4460 - DNA, 3809 bp, Zea Mays
ctctcaatcccccgcaccctctctccctgagcgctcgcgagcctgcggccaccaccgccgtctccacgccgcgcagatccgcccagccggttcggccccactcgagaatacgtgtacggacgcaggccccgcccacctcgccgaggactcgctcctgtgtcgtgcgcgccagcactaccggtggccgtgcgcggctgggccgtgccgattcgaccgaatccggtggaattcaccgtgccgtggtgtcaaatcggtgagctccgttgggttacgcgtgggtggaggctcgttcaggtctgggcggccgtaagtggcgccgggcatggttctagggtttggttttggtcttttggcgtgagggcatggcggatgggggccggatgaagggcgtacagagcgctggcggtggcgccggtgacgacgaagaggggaatgaggaggtgcgagaggagccggaactcgcgctgtcgctggggcggcgagtctggcacctcccgccgcggcaggaggccgctccccgctcacttaactggactccggttctgccggagtggaaccccgacgccgctgggagctcgcagggtgtggaaagggccttgggcggacaatccatctcttctcttgggttccatgacatgtttggtggtatcctagacgatccccaagcgggtggcagtatggaggttgggtggggcaagctgaacgaagaggatgaagacagagacctgcagaataaacggctcagagtacgacactttggcgaagaaaacccactgcattctggtgccagtgctactccctttggctctgaatcgtcatttttgcccatttctgatgaatgtgttcatttaaagctgtctcgtttcccagaacatgaattggaatttgggttgtcacttttcgcaaatgatggtagtgagagcccaagggatgccaataatgagcaagtcgatgatgcagaaaactccggtggaagaaattctgtggatgttggaataagaatggatctctccgatgatttcctgcacatgattttctctttcttggaccagaaggatttatgcagagcaggtgtgacctgtaaacagtggcgatctgctagtgtgcatgatgatttttggaagtgtttgaaatttgagaacactagcgtatcactggagaactttgttaatatttgccgtcattaccagagtgtcacagaactcaatttgcatggtgtcataaatgcagaaacactagttctggaagcaataatgtttttaaggcatctgaagacattaacaatgggcaagggacaactgggagaatcattttttcaagctttggctgagtgcccattattgactgctttaacagtaaacgatgcttctcttgggagtggcattcaagaagtaactgttaatcatgatggactgcgtgagcttcatattttgaagtgccgtgcacttagaatatctgtcagatgttcccaacttcaaatactgtctttgaggcgaacaggcatggctcatgtatcactgaactgtcctcagttgcttgagttggacttccaatcctgccataagctttctgacaatgcgattcgccaagctgctacagcttgcccattgttggcaaaactagacatgtcatcttgttcttgtgttactgatgagacattgcgtgacatagctagctcatgtccgagtctttctgttcttgatgcatcaaactgccccaacatttcatttgagtccgtgaggcttccaatgttaatagacttgagacttctaagttgtgaaggaatcacatctgcttcgatggctgcaatagcttatagccgtctgcttgaggcactacagcttgataattgcagcctgttgacatcagtgtctttggacttaccacatcttaagaatataagtctcgtgcacttacgcaaatttgctgatttgaatttgcgaagccctgtgctttcttacatcaaagtttccagatgttcggcactccatcgagttagcataacatcgactacacttcagaaattggttcttcaaaaacaagagagcttatccagtttgtcattgcaatgccacaacttgattgatgtggatcttactgagtgcgagtcattaacaaatgcggtttgtgaagtatttagtgatggaggtggttgccctatgctaagatcattgatccttgacaattgcgagaatttgagcattgtagaactgaacagcagttctttgtcctgcctctctcttgctggttgccgctcgatgacattgttaagactctcatgcccaaatctgcaacatgtcaatcttgatggctgtgatcaccttcaaagtgcagcattctgtccagtgggtctcgaatccctaaatctgggaatttgtccaaaactgagtgttcttcacattgaggctccaaatatgtctatattggagctgaagggttgtggtgtgctttccaaggcttccatcaattgccctcgcttgacttcgttggatgcctctttctgcagcttgtggatgattctctgacttgtatgtcagaggcatgtcctatgattgaacatcttattctgtcatcatgcctatccattggcatcgatggattgtcctcattgcattgccttcataagctgaccttgcttgacctgtcttatacctttttggacaacttgaagcctgttttcaacagttgtctgcagttgaaggtgttaaaactttcagcttgcaagtacctcagtgactcatcattagatgccctctacagagagggtgctcttccattgcttgttgagctagatctgtcctactcgtccattggacagaatgcgatagaagatcttcttgcttgttgtactaatttggttaatgtgaacttgaatggatgtacaaactttcaagaattggtgtgtgggtcagatgatagcagttgtgtcgatatgccagttgacttttgtgcacctagttcagcaatcaagagtgaagagatcagtgagcgatctggtcgcctccttgaagttctcaattgtactgggtgccctaatatcaagaaagttgttattccttcaatagcgaactttctacatttgtccaaaattaatcttaatctttcgaccaacttgaaggaagtggatttgacatgtcccaatcttttaacgttaaacttgagcaactgtagctcactggaggtgctgaaagcttgattgccccaagattgtccaatctccagcttctgcggcaggaggccgctccccgctcacttaactggactccggttctgcaagagtggaaccccgacgccgctgggagctcgcagggtgtggaaagggccttgggcgggcaatccatctcttctcttgggttccatgacatgtttggtggtatcctagacgatccccaagcgggtggcagtatggaggttgggtggggcaagctgaacgaagaggatgaagacagagacctgcagaatacaaacatcaagtcaggacaagctctctccttagagctcttgtacatagtacccaagcattgccggtatattgcaaggcatggtatattaggagccaggggcaatgatatcttatttttccagtccattcatgttgctgaataagtatttttgtgaatctgttttgttgccggaggtaacaaaatatctgttcatgtttttttttctgtattccttggaagtgtaccgatggagctatatgctggtttatatgcatcaataatcttgtttggatatagaattttggaaccgctttgctaatgtcatctgaggtgtagctttatatagcatgtttaattgttcgaaga

SEQ ID NO: 4461 - DNA, 3923 bp, Zea Mays
ctctcaatcccccgcaccctctctccctgagcgctcgcgagcctgcggccaccaccgccgtctccacgccgcgcagatccgcccagccggttcggccccactcgagaatacgtgtacggacgcaggccccgcccacctcgccgaggactcgctcctgtgtcgtgcgcgccagcactaccggtggccgtgcgcggctgggccgtgccgattcgaccgaatccggtggaattcaccgtgccgtggtgtcaaatcggtgagctccgttgggttacgcgtgggtggaggctcgttcaggtctgggcggccgtaagtggcgccgggcatggttctagggtttggttttggtcttttggcgtgagggcatggcggatgggggccggatgaagggcgtacagagcgctggcggtggcgccggtgacgacgaagaggggaatgaggaggtgcgagaggagccggaactcgcgctgtcgctggggcggcgagtctggcacctcccgccgcggcaggaggccgctccccgctcacttaactggactccggttctgccggagtggaaccccgacgccgctgggagctcgcagggtgtggaaagggccttgggcggacaatccatctcttctcttgggttccatgacatgtttggtggtatcctagacgatccccaagcgggtggcagtatggaggttgggtggggcaagctgaacgaagaggatgaagacagagacctgcagaataaacggctcagagtacgacactttggcgaagaaaacccactgcattctggtgccagtgctactccctttggctctgaatcgtcatttttgcccatttctgatgaatgtgttcatttaaagctgtctcgtttcccagaacatgaattggaatttgggttgtcacttttcgcaaatgatggtagtgagagcccaagggatgccaataatgagcaagtcgatgatgcagaaaactccggtggaagaaattctgtggatgttggaataagaatggatctctccgatgatttcctgcacatgattttctctttcttggaccagaaggatttatgcagagcaggtgtgacctgtaaacagtggcgatctgctagtgtgcatgatgatttttggaagtgtttgaaatttgagaacactagcgtatcactggagaactttgttaatatttgccgtcattaccagagtgtcacagaactcaatttgcatggtgtcataaatgcagaaacactagttctggaagcaataatgtttttaaggcatctgaagacattaacaatgggcaagggacaactgggagaatcattttttcaagctttggctgagtgcccattattgactgctttaacagtaaacgatgcttctcttgggagtggcattcaagaagtaactgttaatcatgatggactgcgtgagcttcatattttgaagtgccgtgcacttagaatatctgtcagatgttcccaacttcaaatactgtctttgaggcgaacaggcatggctcatgtatcactgaactgtcctcagttgcttgagttggacttccaatcctgccataagctttctgacaatgcgattcgccaagctgctacagcttgcccattgttggcaaaactagacatgtcatcttgttcttgtgttactgatgagacattgcgtgacatagctagctcatgtccgagtctttctgttcttgatgcatcaaactgccccaacatttcatttgagttttggttttgggttctgatatgtagtccgtgaggcttccaatgttaatagacttgagacttctaagttgtgaaggaatcacatctgcttcgatggctgcaatagcttatagccgtctgcttgaggcactacagcttgataattgcagcctgttgacatcagtgtctttggacttaccacatcttaagaatataagtctcgtgcacttacgcaaatttgctgatttgaatttgcgaagccctgtgctttcttacatcaaagtttccagatgttcggcactccatcgagttagcataacatcgactacacttcagaaattggttcttcaaaaacaagagagcttatccagtttgtcattgcaatgccacaacttgattgatgtggatcttactgagtgcgagtcattaacaaatgcggtttgtgaagtatttagtgatggaggtggttgccctatgctaagatcattgatccttgacaattgcgagaatttgagcattgtagaactgaacagcagttctttgtcctgcctctctcttgctggttgccgctcgatgacattgttaagactctcatgcccaaatctgcaacatgtcaatcttgatggctgtgatcaccttcaaagtgcagcattctgtccagtgggtctcgaatccctaaatctgggaatttgtccaaaactgagtgttcttcacattgaggctccaaatatgtctatattggagctgaagggttgtggtgtgctttccaaggcttccatcaattgccctcgcttgacttcgttggatgcctctttctgcaggttgtgccacttccagttttttatttatttttttatttatgccatcaattgctatctgtgttcattatatttttgcatgttcaggcagcttgtggatgattctctgacttgtatgtcagaggcatgtcctatgattgaacatcttattctgtcatcatgcctatccattggcatcgatggattgtcctcattgcattgccttcataagctgaccttgcttgacctgtcttatacctttttggacaacttgaagcctgttttcaacagttgtctgcagttgaaggtgttaaaactttcagcttgcaagtacctcagtgactcatcattagatgccctctacagagagggtgctcttccattgcttgttgagctagatctgtcctactcgtccattggacagaatgcgatagaagatcttcttgcttgttgtactaatttggttaatgtgaacttgaatggatgtacaaactttcaagaattggtgtgtgggtcagatgatagcagttgtgtcgatatgccagttgacttttgtgcacctagttcagcaatcaagagtgaagagatcagtgagcgatctggtcgcctccttgaagttctcaattgtactgggtgccctaatatcaagaaagttgttattccttcaatagcgaactttctacatttgtccaaaattaatcttaatctttcgaccaacttgaaggaagtggatttgacatgtcccaatcttttaacgttaaacttgagcaactgtagctcactggaggtgctgaaagcttgattgccccaagattgtccaatctccagcttctgcggcaggaggccgctccccgctcacttaactggactccggttctgcaagagtggaaccccgacgccgctgggagctcgcagggtgtggaaagggccttgggcgggcaatccatctcttctcttgggttccatgacatgtttggtggtatcctagacgatccccaagcgggtggcagtatggaggttgggtggggcaagctgaacgaagaggatgaagacagagacctgcagaatacaaacatcaagtcaggacaagctctctccttagagctcttgtacatagtacccaagcattgccggtatattgcaaggcatggtatattaggagccaggggcaatgatatcttatttttccagtccattcatgttgctgaataagtatttttgtgaatctgttttgttgccggaggtaacaaaatatctgttcatgtttttttttctgtattccttggaagtgtaccgatggagctatatgctggtttatatgcatcaataatcttgtttggatatagaattttggaaccgctttgctaatgtcatctgaggtgtagctttatatagcatgtttaattgttcgaaga

SEQ ID NO: 4462 - DNA, 4033 bp, Zea Mays
ctctcaatcccccgcaccctctctccctgagcgctcgcgagcctgcggccaccaccgccgtctccacgccgcgcagatccgcccagccggttcggccccactcgagaatacgtgtacggacgcaggccccgcccacctcgccgaggactcgctcctgtgtcgtgcgcgccagcactaccggtggccgtgcgcggctgggccgtgccgattcgaccgaatccggtggaattcaccgtgccgtggtgtcaaatcggtgagctccgttgggttacgcgtgggtggaggctcgttcaggtctgggcggccgtaagtggcgccgggcatggttctagggtttggttttggtcttttggcgtgagggcatggcggatgggggccggatgaagggcgtacagagcgctggcggtggcgccggtgacgacgaagaggggaatgaggaggtgcgagaggagccggaactcgcgctgtcgctggggcggcgagtctggcacctcccgccgcggcaggaggccgctccccgctcacttaactggactccggttctgccggagtggaaccccgacgccgctgggagctcgcagggtgtggaaagggccttgggcggacaatccatctcttctcttgggttccatgacatgtttggtggtatcctagacgatccccaagcgggtggcagtatggaggttgggtggggcaagctgaacgaagaggatgaagacagagacctgcagaataaacggctcagagtacgacactttggcgaagaaaacccactgcattctggtgccagtgctactccctttggctctgaatcgtcatttttgcccatttctgatgaatgtgttcatttaaagctgtctcgtttcccagaacatgaattggaatttgggttgtcacttttcgcaaatgatggtagtgagagcccaagggatgccaataatgagcaagtcgatgatgcagaaaactccggtggaagaaattctgtggatgttggaataagaatggatctctccgatgatttcctgcacatgattttctctttcttggaccagaaggatttatgcagagcaggtgtgacctgtaaacagtggcgatctgctagtgtgcatgatgatttttggaagtgtttgaaatttgagaacactagcgtatcactggagaactttgttaatatttgccgtcattaccagagtgtcacagaactcaatttgcatggtgtcataaatgcagaaacactagttctggaagcaataatgtttttaaggcatctgaagacattaacaatgggcaagggacaactgggagaatcattttttcaagctttggctgagtgcccattattgactgctttaacagtaaacgatgcttctcttgggagtggcattcaagaagtaactgttaatcatgatggactgcgtgagcttcatattttgaagtgccgtgcacttagaatatctgtcagatgttcccaacttcaaatactgtctttgaggcgaacaggcatggctcatgtatcactgaactgtcctcagttgcttgagttggacttccaatcctgccataagctttctgacaatgcgattcgccaagctgctacagcttgcccattgttggcaaaactagacatgtcatcttgttcttgtgttactgatgagacattgcgtgacatagctagctcatgtccgagtctttctgttcttgatgcatcaaactgccccaacatttcatttgagtccgtgaggcttccaatgttaatagacttgagacttctaagttgtgaaggaatcacatctgcttcgatggctgcaatagcttatagccgtctgcttgaggcactacagcttgataattgcagcctgttgacatcagtgtctttggacttaccacatcttaagaatataagtctcgtgcacttacgcaatttccagatgttcggcactccatcgagttagcataacatcgactacacttcagaaattggttcttcaaaaacaagagagcttatccagtttgtcattgcaatgccacaacttgattgatgtggatcttactgagtgcgagtcattaacaaatgcggtttgtgaagtatttagtgatggaggtggttgccctatgctaagatcattgatccttgacaattgcgagaatttgagcattgtagaactgaacagcagttctttgtcctgcctctctcttgctggttgccgctcgatgacattgttaagactctcatgcccaaatctgcaacatgtcaatcttgatggctgtgatcaccttcaaagtgcagcattctgtccagagaaggacaagctggtggcggacgtgatgcactacgtgctcttcaggacgcaccagaactttgactgccccatcaagcaagaggagctcaccgggatcgtcaccaagaattaccgccagcgtgtgctacccacacttgtcatcaaggaggccaaggacatgctcgccgccaccttcggctatgagatgagggagctacagaggagtcgtgcactctggtcggggttttggacgagctggtcagaggcggctgcgccaacaaaggaggtgggtctcgaatccctaaatctgggaatttgtccaaaactgagtgttcttcacattgaggctccaaatatgtctatattggagctgaagggttgtggtgtgctttccaaggcttccatcaattgccctcgcttgacttcgttggatgcctctttctgcaggcagcttgtggatgattctctgacttgtatgtcagaggcatgtcctatgattgaacatcttattctgtcatcatgcctatccattggcatcgatggattgtcctcattgcattgccttcataagctgaccttgcttgacctgtcttatacctttttggacaacttgaagcctgttttcaacagttgtctgcagttgaaggtgttaaaactttcagcttgcaagtacctcagtgactcatcattagatgccctctacagagagggtgctcttccattgcttgttgagctagatctgtcctactcgtccattggacagaatgcgatagaagatcttcttgcttgttgtactaatttggttaatgtgaacttgaatggatgtacaaactttcaagaattggtgtgtgggtcagatgatagcagttgtgtcgatatgccagttgacttttgtgcacctagttcagcaatcaagagtgaagagatcagtgagcgatctggtcgcctccttgaagttctcaattgtactgggtgccctaatatcaagaaagttgttattccttcaatagcgaactttctacatttgtccaaaattaatcttaatctttcgaccaacttgaaggaagtggatttgacatgtcccaatcttttaacgttaaacttgagcaactgtagctcactggaggtgctgaaagcttgattgccccaagattgtccaatctccagcttctgcggcaggaggccgctccccgctcacttaactggactccggttctgcaagagtggaaccccgacgccgctgggagctcgcagggtgtggaaagggccttgggcgggcaatccatctcttctcttgggttccatgacatgtttggtggtatcctagacgatccccaagcgggtggcagtatggaggttgggtggggcaagctgaacgaagaggatgaagacagagacctgcagaatacaaacatcaagtcaggacaagctctctccttagagctcttgtacatagtacccaagcattgccggtatattgcaaggcatggtatattaggagccaggggcaatgatatcttatttttccagtccattcatgttgctgaataagtatttttgtgaatctgttttgttgccggaggtaacaaaatatctgttcatgtttttttttctgtattccttggaagtgtaccgatggagctatatgctggtttatatgcatcaataatcttgtttggatatagaattttggaaccgctttgctaatgtcatctgaggtgtagctttatatagcatgtttaattgttcgaaga

SEQ ID NO: 4463 - DNA, 2799 bp, Zea Mays
atggttttcaatggcagattttctctttcttggaccagaaggatttatgcagagcaggtgtgacctgtaaacagtggcgatctgctagtgtgcatgatgatttttggaagtgtttgaaatttgagaacactagcgtatcactggagaactttgttaatatttgccgtcattaccagagtgtcacagaactcaatttgcatggtgtcataaatgcagaaacactagttctggaagcaataatgtttttaaggcatctgaagacattaacaatgggcaagggacaactgggagaatcattttttcaagctttggctgagtgcccattattgactgctttaacagtaaacgatgcttctcttgggagtggcattcaagaagtaactgttaatcatgatggactgcgtgagcttcatattttgaagtgccgtgcacttagaatatctgtcagatgttcccaacttcaaatactgtctttgaggcgaacaggcatggctcatgtatcactgaactgtcctcagttgcttgagttggacttccaatcctgccataagctttctgacaatgcgattcgccaagctgctacagcttgcccattgttggcaaaactagacatgtcatcttgttcttgtgttactgatgagacattgcgtgacatagctagctcatgtccgagtctttctgttcttgatgcatcaaactgccccaacatttcatttgagtccgtgaggcttccaatgttaatagacttgagacttctaagttgtgaaggaatcacatctgcttcgatggctgcaatagcttatagccgtctgcttgaggcactacagcttgataattgcagcctgttgacatcagtgtctttggacttaccacatcttaagaatataagtctcgtgcacttacgcaaatttgctgatttgaatttgcgaagccctgtgctttcttacatcaaagtttccagatgttcggcactccatcgagttagcataacatcgactacacttcagaaattggttcttcaaaaacaagagagcttatccagtttgtcattgcaatgccacaacttgattgatgtggatcttactgagtgcgagtcattaacaaatgcggtttgtgaagtatttagtgatggaggtggttgccctatgctaagatcattgatccttgacaattgcgagaatttgagcattgtagaactgaacagcagttctttgtcctgcctctctcttgctggttgccgctcgatgacattgttaagactctcatgcccaaatctgcaacatgtcaatcttgatggctgtgatcaccttcaaagtgcagcattctgtccagtgggtctcgaatccctaaatctgggaatttgtccaaaactgagtgttcttcacattgaggctccaaatatgtctatattggagctgaagggttgtggtgtgctttccaaggcttccatcaattgccctcgcttgacttcgttggatgcctctttctgcaggcagcttgtggatgattctctgacttgtatgtcagaggcatgtcctatgattgaacatcttattctgtcatcatgcctatccattggcatcgatggattgtcctcattgcattgccttcataagctgaccttgcttgacctgtcttatacctttttggacaacttgaagcctgttttcaacagttgtctgcagttgaaggtgttaaaactttcagcttgcaagtacctcagtgactcatcattagatgccctctacagagagggtgctcttccattgcttgttgagctagatctgtcctactcgtccattggacagaatgcgatagaagatcttcttgcttgttgtactaatttggttaatgtgaacttgaatggatgtacaaactttcaagaattggtgtgtgggtcagatgatagcagttgtgtcgatatgccagttgacttttgtgcacctagttcagcaatcaagagtgaagagatcagtgagcgatctggtcgcctccttgaagttctcaattgtactgggtgccctaatatcaagaaagttgttattccttcaatagcgaactttctacatttgtccaaaattaatcttaatctttcgaccaacttgaaggaagtggatttgacatgtcccaatcttttaacgttaaacttgagcaactgtagctcactggaggtgctgaaagcttgattgccccaagattgtccaatctccagcttctgcggcaggaggccgctccccgctcacttaactggactccggttctgcaagagtggaaccccgacgccgctgggagctcgcagggtgtggaaagggccttgggcgggcaatccatctcttctcttgggttccatgacatgtttggtggtatcctagacgatccccaagcgggtggcagtatggaggttgggtggggcaagctgaacgaagaggatgaagacagagacctgcagaatacaaacatcaagtcaggacaagctctctccttagagctcttgtacatagtacccaagcattgccggtatattgcaaggcatggtatattaggagccaggggcaatgatatcttatttttccagtccattcatgttgctgaataagtatttttgtgaatctgttttgttgccggaggtaacaaaatatctgttcatgtttttttttctgtattccttggaagtgtaccgatggagctatatgctggtttatatgcatcaataatcttgtttggatatagaattttggaaccgctttgctaatgtcatctgaggtgtagctttatatagcatgtttaattgttcgaaga

SEQ ID NO: 4464 - DNA, 1925 bp, Zea Mays
cgactggctcacaggtcacctcgcccgccgcaccaagaacttgcgcagttaacttcacagccgctcaattttacagcgcagagcaggaagcatcagctgcacgcctctcgccttgcttgccgccttcgctcctctcttccctagctcgtgctagcccttcttggcaagaaacggtttgctatggccgttcttgcgctcaggcttggtttcgtggctccgcctcatcctaggaccagcagcggcaggttcgccttctcccccccgtcctcccgcgccgtcgccaacgcgggggtagctgcaggaccctcgcgcccgatcaccgtcgacggggacccgcccaccgtcgtctccgcgcccggccgccgcattgtcgccattggcgatgcccacggtgacctctcccagacgagagccgcgctggtgctcgccggcgtcctgagcacggaatcagagggccacgtgtggacaggcggacgcacgatacttgttcaagttggtgacatccttgatcgtggtgaagatgaaattgccatactctcactgttgagctcactcaacatgcaagccaaatctcaaggcggtgctgtattccaggttaacggaaaccacgaaactatgaatgtggaaggtgatttccggtactgtgatccgggaggctttgatgagtgcatgcgcttccttgactacttggatgaatgtgatggcaactgggataacgcatttctcaactgggtaaatgtctgtgaaagacggaagaaagagtatgtagctttgcctaatggtgactggggtccttggaatttcgtcaagaagcagaaaggctttgctgcaagatcatctcttctcaagcgaggtggtccgctagctcatgaattggctcggcatcctgttgtcctcaagatcaatgactggattttttgtcatggtggccttcttcctcaccatgttgaatatgggattgagcgtatgaacagggaggtatcaatgtggatgaaatgttcaggcgaagacagtggtgacgagacagacatccccttcatagctactagaggttatgacagcgtcgtgtggagtcgaatgtactcgcaagaccctgccgaaagaacacgacgcgctttgatgctatcttctattgctgctgaacaaacgctagaagctgtaggagccaaagggatggttgtagggcacacaccacagacgcatggggtgacctgtaaatgtgatggcaaagtctggtgcgtggatgtgggcatgtcctgtggtgttctttgctcaaggccagaggtcctagaaatagtcaatgacagaccaagggttttgaaggagcggagagaattatatgatgagatggaagtgttggactatttgtaaaaccttgagaaacttatgtacataatagaaaacattaattgtcctgagaatcatcgtttcagacaatttgagtgggaatactgtacgcaacatgctacagagagagagatataatcagaaggaaggttttttcactatggttaccgtttgtctgaaaccagatgcaaacatagatcaaaagcccaaaggcgctttatttgccatggtagaccaaagttttagtggtgcttatttgtatcagcattcaaacattgactctagccttattaagagctgtgggcatcaggaaccgtgcaagttgtagaatgagatggagaacaaatgaatatgctgagctctcatgtaaattaggtatcttcctttcacgtgttaccgacaacaaattcgaaaagaatgatttgtatatgatttgaagcggtactgtaacaacattacaacaaacgacagatgaacatatcatggagctcatctttattttgatcgttaacaagtttttcgatacattttctggcgattttgactctatctagtattgttcaaactcaacccgtggg

SEQ ID NO: 4465 - DNA, 1818 bp, Zea Mays
ctggctcacaggtcacctcgcccgccgcaccaagaacttgcgcagttaacttcacagccgctcaattttacagcgcagagcaggaagcatcagctgcacgcctctcgccttgcttgccgccttcgctcctctcttccctagctcgtgctagcccttcttggcaagaaacggtttgctatggccgttcttgcgctcaggcttggtttcgtggctccgcctcatcctaggaccagcagcggcaggttcgccttctcccccccgtcctcccgcgccgtcgccaacgcgggggtagctgcaggaccctcgcgcccgatcaccgtcgacggggacccgcccaccgtcgtctccgcgcccggccgccgcattgtcgccattggcgatgcccacggtgacctctcccagacgagagccgcgctggtgctcgccggcgtcctgagcacggaatcagagggccacgtgtggacaggcggacgcacgatacttgttcaagttggtgacatccttgatcgtggtgaagatgaaattgccatactctcactgttgagctcactcaacatgcaagccaaatctcaaggcggtgctgtattccaggttaacggaaaccacgaaactatgaatgtggaaggtgatttccggtactgtgatccgggaggctttgatgagtgcatgcgcttccttgactacttggatgaatgtgatggcaactgggataacgcatttctcaactgggtaaatgtctgtgaaagacggaagaaagagtatgtagctttgcctaatggtgactggggtccttggaatttcgtcaagaagcagaaaggctttgctgcaagatcatctcttctcaagcgaggtggtccgctagctcatgaattggctcggcatcctgttgtcctcaagatcaatgactggattttttgtcatggtggccttcttcctcaccatgttgaatatgggattgagcgtatgaacagggaggtatcaatgtggatgaaatgttcaggcgaagacagtggtgacgagacagacatccccttcatagctactagaggttatgacagcgtcgtgtggagtcgaatgtactcgcaagaccctgccgaaagaacacgacgcgctttgatgctatcttctattgctgctgaacaaacgctagaagctgtaggagccaaagggatggttgtagggcacacaccacagacgcatggggtgacctgtaaatgtgatggcaaagtctggtgcgtggatgtgggcatgtcctgtggtgttctttgctcaaggccagaggtacataatagaaaacattaattgtcctgagaatcatcgtttcagacaatttgagtgggaatactgtacgcaacatgctacagagagagagatataatcagaaggaaggttttttcactatggttaccgtttgtctgaaaccagatgcaaacatagatcaaaagcccaaaggcgctttatttgccatggtagaccaaagttttagtggtgcttatttgtatcagcattcaaacattgactctagccttattaagagctgtgggcatcaggaaccgtgcaagttgtagaatgagatggagaacaaatgaatatgctgagctctcatgtaaattaggtatcttcctttcacgtgttaccgacaacaaattcgaaaagaatgatttgtatatgatttgaagcggtactgtaacaacattacaacaaacgacagatgaacatatcatggagctcatctttattttgatcgttaacaagtttttcgatacattttctggcgattttgactctatctagtattgttcaaactcaacccgtggg

SEQ ID NO: 4466 - DNA, 1877 bp, Zea Mays
ctggctcacaggtcacctcgcccgccgcaccaagaacttgcgcagttaacttcacagccgctcaattttacagcgcagagcaggaagcatcagctgcacgcctctcgccttgcttgccgccttcgctcctctcttccctagctcgtgctagcccttcttggcaagaaacggtttgctatggccgttcttgcgctcaggcttggtttcgtggctccgcctcatcctaggaccagcagcggcaggttcgccttctcccccccgtcctcccgcgccgtcgccaacgcgggggtagctgcaggaccctcgcgcccgatcaccgtcgacggggacccgcccaccgtcgtctccgcgcccggccgccgcattgtcgccattggcgatgcccacggtgacctctcccagacgagagccgcgctggtgctcgccggcgtcctgagcacggaatcagagggccacgtgtggacaggcggacgcacgatacttgttcaagttggtgacatccttgatcgtggtgaagatgaaattgccatactctcactgttgagctcactcaacatgcaagccaaatctcaaggcggtgctgtattccaggttaacggaaaccacgaaactatgaatgtggaaggtgatttccggtactgtgatccgggaggctttgatgagtgcatgcgcttccttgactacttggatgaatgtgatggcaactgggataacgcatttctcaactgggtaaatgtctgtgaaagacggaagaaagagtatgtagctttgcctaatggtgactggggtccttggaatttcgtcaagaagcagaaaggctttgctgcaagatcatctcttctcaagcgaggtggtccgctagctcatgaattggctcggcatcctgttgtcctcaagatcaatgactggattttttgtcatggtggccttcttcctcaccatgttgaatatgggattgagcgtatgaacagggaggtatcaatgtggatgaaatgttcaggcgaagacagtggtgacgagacagacatccccttcatagctactagaggttatgacagcgtcgtgtggagtcgaatgtactcgcaagaccctgccgaaagaacacgacgcgctttgatgctatcttctattgctgctgaacaaacgctagaagctgtaggagccaaagggatggttgtagggcacacaccacagacgcatggggtgacctgtaaatgtgatggcaaagtctggtgcgtggatgtgggcatgtcctgtggtgttctttgctcaaggccagaggtcctagaaatagtcaatgacagaccaagggttttgaaggagcggagagaattatatgatgagatggaagtgttggactatttgtaaaaccttgagaaacttatacaatttgagtgggaatactgtacgcaacatgctacagagagagagatataatcagaaggaaggttttttcactatggttaccgtttgtctgaaaccagatgcaaacatagatcaaaagcccaaaggcgctttatttgccatggtagaccaaagttttagtggtgcttatttgtatcagcattcaaacattgactctagccttattaagagctgtgggcatcaggaaccgtgcaagttgtagaatgagatggagaacaaatgaatatgctgagctctcatgtaaattaggtatcttcctttcacgtgttaccgacaacaaattcgaaaagaatgatttgtatatgatttgaagcggtactgtaacaacattacaacaaacgacagatgaacatatcatggagctcatctttattttgatcgttaacaagtttttcgatacattttctggcgattttgactctatctagtattgttcaaactcaacccgtggg

SEQ ID NO: 4467 - DNA, 1912 bp, Zea Mays
ctcacaggtcacctcgcccgccgcaccaagaacttgcgcagttaacttcacagccgctcaattttacagcgcagagcaggaagcatcagctgcacgcctctcgccttgcttgccgccttcgctcctctcttccctagctcgtgctagcccttcttggcaagaaacggtttgctatggccgttcttgcgctcaggcttggtttcgtggctccgcctcatcctaggaccagcagcggcaggttcgccttctcccccccgtcctcccgcgccgtcgccaacgcgggggtagctgcaggaccctcgcgcccgatcaccgtcgacggggacccgcccaccgtcgtctccgcgcccggccgccgcattgtcgccattggcgatgcccacggtgacctctcccagacgagagccgcgctggtgctcgccggcgtcctgagcacggaatcagagggccacgtgtggacaggcggacgcacgatacttgttcaagttggtgacatccttgatcgtggtgaagatgaaattgccatactctcactgttgagctcactcaacatgcaagccaaatctcaaggcggtgctgtattccaggttaacggaaaccacgaaactatgaatgtggaaggtgatttccggtactgtgatccgggaggctttgatgagtgcatgcgcttccttgactacttggatgaatgtgatggcaactgggataacgcatttctcaactgggtaaatgtctgtgaaagacggaagaaagagtatgtagctttgcctaatggtgactggggtccttggaatttcgtcaagaaaggctttgctgcaagatcatctcttctcaagcgaggtggtccgctagctcatgaattggctcggcatcctgttgtcctcaagatcaatgactggattttttgtcatggtggccttcttcctcaccatgttgaatatgggattgagcgtatgaacagggaggtatcaatgtggatgaaatgttcaggcgaagacagtggtgacgagacagacatccccttcatagctactagaggttatgacagcgtcgtgtggagtcgaatgtactcgcaagaccctgccgaaagaacacgacgcgctttgatgctatcttctattgctgctgaacaaacgctagaagctgtaggagccaaagggatggttgtagggcacacaccacagacgcatggggtgacctgtaaatgtgatggcaaagtctggtgcgtggatgtgggcatgtcctgtggtgttctttgctcaaggccagaggtcctagaaatagtcaatgacagaccaagggttttgaaggagcggagagaattatatgatgagatggaagtgttggactatttgtaaaaccttgagaaacttatgtacataatagaaaacattaattgtcctgagaatcatcgtttcagacaatttgagtgggaatactgtacgcaacatgctacagagagagagatataatcagaaggaaggttttttcactatggttaccgtttgtctgaaaccagatgcaaacatagatcaaaagcccaaaggcgctttatttgccatggtagaccaaagttttagtggtgcttatttgtatcagcattcaaacattgactctagccttattaagagctgtgggcatcaggaaccgtgcaagttgtagaatgagatggagaacaaatgaatatgctgagctctcatgtaaattaggtatcttcctttcacgtgttaccgacaacaaattcgaaaagaatgatttgtatatgatttgaagcggtactgtaacaacattacaacaaacgacagatgaacatatcatggagctcatctttattttgatcgttaacaagtttttcgatacattttctggcgattttgactctatctagtattgttcaaactcaacccgtggg

SEQ ID NO: 4468 - DNA, 1566 bp, Zea Mays
ctcacaggtcacctcgcccgccgcaccaagaacttgcgcagttaacttcacagccgctcaattttacagcgcagagcaggaagcatcagctgcacgcctctcgccttgcttgccgccttcgctcctctcttccctagctcgtgctagcccttcttggcaagaaacggtttgctatggccgttcttgcgctcaggcttggtttcgtggctccgcctcatcctaggaccagcagcggcaggttcgccttctcccccccgtcctcccgcgccgtcgccaacgcgggggtagctgcaggaccctcgcgcccgatcaccgtcgacggggacccgcccaccgtcgtctccgcgcccggccgccgcattgtcgccattggcgatgcccacggtgacctctcccagacgagagccgcgctggtgctcgccggcgtcctgagcacggaatcagagggccacgtgtggacaggcggacgcacgatacttgttcaagttggtgacatccttgatcgtggtgaagatgaaattgccatactctcactgttgagctcactcaacatgcaagccaaatctcaaggcggtgctgtattccagttgaatatgggattgagcgtatgaacagggaggtatcaatgtggatgaaatgttcaggcgaagacagtggtgacgagacagacatccccttcatagctactagaggttatgacagcgtcgtgtggagtcgaatgtactcgcaagaccctgccgaaagaacacgacgcgctttgatgctatcttctattgctgctgaacaaacgctagaagctgtaggagccaaagggatggttgtagggcacacaccacagacgcatggggtgacctgtaaatgtgatggcaaagtctggtgcgtggatgtgggcatgtcctgtggtgttctttgctcaaggccagaggtcctagaaatagtcaatgacagaccaagggttttgaaggagcggagagaattatatgatgagatggaagtgttggactatttgtaaaaccttgagaaacttatgtacataatagaaaacattaattgtcctgagaatcatcgtttcagacaatttgagtgggaatactgtacgcaacatgctacagagagagagatataatcagaaggaaggttttttcactatggttaccgtttgtctgaaaccagatgcaaacatagatcaaaagcccaaaggcgctttatttgccatggtagaccaaagttttagtggtgcttatttgtatcagcattcaaacattgactctagccttattaagagctgtgggcatcaggaaccgtgcaagttgtagaatgagatggagaacaaatgaatatgctgagctctcatgtaaattaggtatcttcctttcacgtgttaccgacaacaaattcgaaaagaatgatttgtatatgatttgaagcggtactgtaacaacattacaacaaacgacagatgaacatatcatggagctcatctttattttgatcgttaacaagtttttcgatacattttctggcgattttgactctatctagtattgttcaaactcaacccgtggg

SEQ ID NO: 4469 - DNA, 2021 bp, Zea Mays
ggtcacctcgcccgccgcaccaagaacttgcgcagttaacttcacagccgctcaattttacagcgcagagcaggaagcatcagctgcacgcctctcgccttgcttgccgccttcgctcctctcttccctagctcgtgctagcccttcttggcaagaaacggtttgctatggccgttcttgcgctcaggcttggtttcgtggctccgcctcatcctaggaccagcagcggcaggttcgccttctcccccccgtcctcccgcgccgtcgccaacgcgggggtagctgcaggaccctcgcgcccgatcaccgtcgacggggacccgcccaccgtcgtctccgcgcccggccgccgcattgtcgccattggcgatgcccacggtgacctctcccagacgagagccgcgctggtgctcgccggcgtcctgagcacggaatcagagggccacgtgtggacaggcggacgcacgatacttgttcaagttggtgacatccttgatcgtggtgaagatgaaattgccatactctcactgttgagctcactcaacatgcaagccaaatctcaaggcggtgctgtattccagagttgtgggagtgattctaccgttattcctacaaactcggacgccacgaactatattcgccacggtctccatggcacacaactggtcaccatgcactccgtggactcaggttaacggaaaccacgaaactatgaatgtggaaggtgatttccggtactgtgatccgggaggctttgatgagtgcatgcgcttccttgactacttggatgaatgtgatggcaactgggataacgcatttctcaactgggtaaatgtctgtgaaagacggaagaaagagtatgtagctttgcctaatggtgactggggtccttggaatttcgtcaagaagcagaaaggctttgctgcaagatcatctcttctcaagcgaggtggtccgctagctcatgaattggctcggcatcctgttgtcctcaagatcaatgactggattttttgtcatggtggccttcttcctcaccatgttgaatatgggattgagcgtatgaacagggaggtatcaatgtggatgaaatgttcaggcgaagacagtggtgacgagacagacatccccttcatagctactagaggttatgacagcgtcgtgtggagtcgaatgtactcgcaagaccctgccgaaagaacacgacgcgctttgatgctatcttctattgctgctgaacaaacgctagaagctgtaggagccaaagggatggttgtagggcacacaccacagacgcatggggtgacctgtaaatgtgatggcaaagtctggtgcgtggatgtgggcatgtcctgtggtgttctttgctcaaggccagaggtcctagaaatagtcaatgacagaccaagggttttgaaggagcggagagaattatatgatgagatggaagtgttggactatttgtaaaaccttgagaaacttatgtacataatagaaaacattaattgtcctgagaatcatcgtttcagacaatttgagtgggaatactgtacgcaacatgctacagagagagagatataatcagaaggaaggttttttcactatggttaccgtttgtctgaaaccagatgcaaacatagatcaaaagcccaaaggcgctttatttgccatggtagaccaaagttttagtggtgcttatttgtatcagcattcaaacattgactctagccttattaagagctgtgggcatcaggaaccgtgcaagttgtagaatgagatggagaacaaatgaatatgctgagctctcatgtaaattaggtatcttcctttcacgtgttaccgacaacaaattcgaaaagaatgatttgtatatgatttgaagcggtactgtaacaacattacaacaaacgacagatgaacatatcatggagctcatctttattttgatcgttaacaagtttttcgatacattttctggcgattttgactctatctagtattgttcaaactcaacccgtggg

SEQ ID NO: 4470 - DNA, 2049 bp, Zea Mays
caagaacttgcgcagttaacttcacagccgctcaattttacagcgcagagcaggaagcatcagctgcacgcctctcgccttgcttgccgccttcgctcctctcttccctagctcgtgctagcccttcttggcaagaaacggtttgctatggccgttcttgcgctcaggcttggtttcgtggctccgcctcatcctaggaccagcagcggcaggttcgccttctcccccccgtcctcccgcgccgtcgccaacgcgggggtagctgcaggaccctcgcgcccgatcaccgtcgacggggacccgcccaccgtcgtctccgcgcccggccgccgcattgtcgccattggcgatgcccacggtgacctctcccagacgagagccgcgctggtgctcgccggcgtcctgagcacggaatcagagggccacgtgtggacaggcggacgcacgatacttgttcaagttggtgacatccttgatcgtggtgaagatgaaattgccatactctcactgttgagctcactcaacatgcaagccaaatctcaaggcggtgctgtattccagcatgcacatgcagagttgtgggagtgattctaccgttattcctacaaactcggacgccacgaactatattcgccacggtctccatggcacacaactggtcaccatgcactccgtggactcaggcatgcacctgaccaactcaaaacgtgacagtaaagttaacggaaaccacgaaactatgaatgtggaaggtgatttccggtactgtgatccgggaggctttgatgagtgcatgcgcttccttgactacttggatgaatgtgatggcaactgggataacgcatttctcaactgggtaaatgtctgtgaaagacggaagaaagagtatgtagctttgcctaatggtgactggggtccttggaatttcgtcaagaagcagaaaggctttgctgcaagatcatctcttctcaagcgaggtggtccgctagctcatgaattggctcggcatcctgttgtcctcaagatcaatgactggattttttgtcatggtggccttcttcctcaccatgttgaatatgggattgagcgtatgaacagggaggtatcaatgtggatgaaatgttcaggcgaagacagtggtgacgagacagacatccccttcatagctactagaggttatgacagcgtcgtgtggagtcgaatgtactcgcaagaccctgccgaaagaacacgacgcgctttgatgctatcttctattgctgctgaacaaacgctagaagctgtaggagccaaagggatggttgtagggcacacaccacagacgcatggggtgacctgtaaatgtgatggcaaagtctggtgcgtggatgtgggcatgtcctgtggtgttctttgctcaaggccagaggtcctagaaatagtcaatgacagaccaagggttttgaaggagcggagagaattatatgatgagatggaagtgttggactatttgtaaaaccttgagaaacttatgtacataatagaaaacattaattgtcctgagaatcatcgtttcagacaatttgagtgggaatactgtacgcaacatgctacagagagagagatataatcagaaggaaggttttttcactatggttaccgtttgtctgaaaccagatgcaaacatagatcaaaagcccaaaggcgctttatttgccatggtagaccaaagttttagtggtgcttatttgtatcagcattcaaacattgactctagccttattaagagctgtgggcatcaggaaccgtgcaagttgtagaatgagatggagaacaaatgaatatgctgagctctcatgtaaattaggtatcttcctttcacgtgttaccgacaacaaattcgaaaagaatgatttgtatatgatttgaagcggtactgtaacaacattacaacaaacgacagatgaacatatcatggagctcatctttattttgatcgttaacaagtttttcgatacattttctggcgattttgactctatctagtattgttcaaactcaacccgtggg

SEQ ID NO: 4471 - DNA, 2006 bp, Zea Mays
ctcaattttacagcgcagagcaggaagcatcagctgcacgcctctcgccttgcttgccgccttcgctcctctcttccctagctcgtgctagcccttcttggcaagaaacggtttgctatggccgttcttgcgctcaggcttggtttcgtggctccgcctcatcctaggaccagcagcggcaggttcgccttctcccccccgtcctcccgcgccgtcgccaacgcgggggtagctgcaggaccctcgcgcccgatcaccgtcgacggggacccgcccaccgtcgtctccgcgcccggccgccgcattgtcgccattggcgatgcccacggtgacctctcccagacgagagccgcgctggtgctcgccggcgtcctgagcacggaatcagagggccacgtgtggacaggcggacgcacgatacttgttcaagttggtgacatccttgatcgtggtgaagatgaaattgccatactctcactgttgagctcactcaacatgcaagccaaatctcaaggcggtgctgtattccagagttgtgggagtgattctaccgttattcctacaaactcggacgccacgaactatattcgccacggtctccatggcacacaactggtcaccatgcactccgtggactcaggcatgcacctgaccaactcaaaacgtgacagtaaagttaacggaaaccacgaaactatgaatgtggaaggtgatttccggtactgtgatccgggaggctttgatgagtgcatgcgcttccttgactacttggatgaatgtgatggcaactgggataacgcatttctcaactgggtaaatgtctgtgaaagacggaagaaagagtatgtagctttgcctaatggtgactggggtccttggaatttcgtcaagaagcagaaaggctttgctgcaagatcatctcttctcaagcgaggtggtccgctagctcatgaattggctcggcatcctgttgtcctcaagatcaatgactggattttttgtcatggtggccttcttcctcaccatgttgaatatgggattgagcgtatgaacagggaggtatcaatgtggatgaaatgttcaggcgaagacagtggtgacgagacagacatccccttcatagctactagaggttatgacagcgtcgtgtggagtcgaatgtactcgcaagaccctgccgaaagaacacgacgcgctttgatgctatcttctattgctgctgaacaaacgctagaagctgtaggagccaaagggatggttgtagggcacacaccacagacgcatggggtgacctgtaaatgtgatggcaaagtctggtgcgtggatgtgggcatgtcctgtggtgttctttgctcaaggccagaggtcctagaaatagtcaatgacagaccaagggttttgaaggagcggagagaattatatgatgagatggaagtgttggactatttgtaaaaccttgagaaacttatgtacataatagaaaacattaattgtcctgagaatcatcgtttcagacaatttgagtgggaatactgtacgcaacatgctacagagagagagatataatcagaaggaaggttttttcactatggttaccgtttgtctgaaaccagatgcaaacatagatcaaaagcccaaaggcgctttatttgccatggtagaccaaagttttagtggtgcttatttgtatcagcattcaaacattgactctagccttattaagagctgtgggcatcaggaaccgtgcaagttgtagaatgagatggagaacaaatgaatatgctgagctctcatgtaaattaggtatcttcctttcacgtgttaccgacaacaaattcgaaaagaatgatttgtatatgatttgaagcggtactgtaacaacattacaacaaacgacagatgaacatatcatggagctcatctttattttgatcgttaacaagtttttcgatacattttctggcgattttgactctatctagtattgttcaaactcaacccgtggg

SEQ ID NO: 4472 - DNA, 885 bp, Zea Mays
caggaagcatcagctgcacgcctctcgccttgcttgccgccttcgctcctctcttccctagctcgtgctagcccttcttggcaagaaacggtttgctatggccgttcttgcgctcaggcttggtttcgtggctccgcctcatcctaggaccagcagcggcaggttcgccttctcccccccgtcctcccgcgccgtcgccaacgcgggggtagctgcaggaccctcgcgcccgatcaccgtcgacggggacccgcccaccgtcgtctccgcgcccggccgccgcattgtcgccattggcgatgcccacggtgacctctcccagacgagagccgcgctggtgctcgccggcgtcctgagcacggaatcagagggccacgtgtggacaggcggacgcacgatacttgttcaagttggtgacatccttgatcgtggtgaagatgaaattgccatactctcactgttgagctcactcaacatgcaagccaaatctcaaggcggtgctgtattccaggttaacggaaaccacgaaactatgaatgtggaaggtgatttccggtactgtgatccgggaggctttgatgagtgcatgcgcttccttgactacttggatgaatgtgatggcaactgggataacgcatttctcaactgggtaaatgtctgtgaaagacggaagaaagagtatgtagctttgcctaatggtgactggggtccttggaatttcgtcaagaagcagaaaggctttgctgcaagatcatctcttctcaagcgaggtggtccgctagctcatgaattggctcggcatcctgttgtcctcaagatcaatgactggattttttgtcatggtggccttcttcctcaccatggtcagaacctgcccgacaggag

SEQ ID NO: 4473 - DNA, 1152 bp, Zea Mays
caggaagcatcagctgcacgcctctcgccttgcttgccgccttcgctcctctcttccctagctcgtgctagcccttcttggcaagaaacggtttgctatggccgttcttgcgctcaggcttggtttcgtggctccgcctcatcctaggaccagcagcggcaggttcgccttctcccccccgtcctcccgcgccgtcgccaacgcgggggtagctgcaggaccctcgcgcccgatcaccgtcgacggggacccgcccaccgtcgtctccgcgcccggccgccgcattgtcgccattggcgatgcccacggtgacctctcccagacgagagccgcgctggtgctcgccggcgtcctgagcacggaatcagagggccacgtgtggacaggcggacgcacgatacttgttcaagttggtgacatccttgatcgtggtgaagatgaaattgccatactctcactgttgagctcactcaacatgcaagccaaatctcaaggcggtgctgtattccaggtcctagaaatagtcaatgacagaccaagggttttgaaggagcggagagaattatatgatgagatggaagtgttggactatttgtaaaaccttgagaaacttatgtacataatagaaaacattaattgtcctgagaatcatcgtttcagacaatttgagtgggaatactgtacgcaacatgctacagagagagagatataatcagaaggaaggttttttcactatggttaccgtttgtctgaaaccagatgcaaacatagatcaaaagcccaaaggcgctttatttgccatggtagaccaaagttttagtggtgcttatttgtatcagcattcaaacattgactctagccttattaagagctgtgggcatcaggaaccgtgcaagttgtagaatgagatggagaacaaatgaatatgctgagctctcatgtaaattaggtatcttcctttcacgtgttaccgacaacaaattcgaaaagaatgatttgtatatgatttgaagcggtactgtaacaacattacaacaaacgacagatgaacatatcatggagctcatctttattttgatcgttaacaagtttttcgatacattttctggcgattttgactctatctagtattgttcaaactcaacccgtggg

SEQ ID NO: 4474 - DNA, 434 bp, Zea Mays
agtactatacaaacaaacagtcctacaagtgaagggaagcggtcaacatgccttgtcagacgcagcacgagatgccaaaagccattggacggcagacgataaagcacggcgcgccaccacggataagaatccagaagcttgcgctccgctgtcccgtctccgctccggcctccacccatggctcatccactcctctcgtccgcgcttgtttgttcgcgtcttctccctgtagggaactccgttacccggccccggctgtgcgtggcgtcagcacgccccgcgggcaggagggtgaggctgctgagcgtgaggtgcgagcagggagccaagggcggtggcgggctggacgtgtggctgagccgcggggcgatgctgggcttcgtcggagcggtggccgtggagctgaccaccgggaaaggcgtgcttcagatgtg

SEQ ID NO: 4475 - DNA, 926 bp, Zea Mays
agtactatacaaacaaacagtcctacaagtgaagggaagcggtcaacatgccttgtcagacgcagcacgagatgccaaaagccattggacggcagacgataaagcacggcgcgccaccacggataagaatccagaagcttgcgctccgctgtcccgtctccgctccggcctccacccatggctcatccactcctctcgtccgcgcttgtttgttcgcgtcttctccctgtagggaactccgttacccggccccggctgtgcgtggcgtcagcacgccccgcgggcaggagggtgaggctgctgagcgtgaggtgcgagcagggagccaagggcggtggcgggctggacgtgtggctgagccgcggggcgatgctgggcttcgtcggagcggtggccgtggagctgaccaccgggaaaggcgtgcttcagaatgtgggattgaccgcgccggtgccgacgctggcgctggcgctcaccggcgcggtcggcgtcctcacggccttcctcatcttccagtccgggacgcgggactgatgggtgaattgtcaaagctcccaaaaggacatgcataaagtctgtcagagtcttgtgctgtgtatgtctatgctgttgtagttgccttgccttcacaggaagctgaggagtaacacagtgcgaaaaggataattattattttttacaaaatgtgtttacagtactcttccttgaaggactaaactgcatttatgttgaagttgtcaataatcctattctcactacaccaaattccattccaattcgaagaggttcttggcaaccaaggtctgttcattttaatccaagcgtgagaagttccgataattcctttcaaaggtcatcaatcttcgagaggctttcacgttgctcattcgacaacgagtgagttagaacgagaaggtgttctatag

SEQ ID NO: 4476 - DNA, 922 bp, Zea Mays
agtactatacaaacaaacagtcctacaagtgaagggaagcggtcaacatgccttgtcagacgcagcacgagatgccaaaagccattggacggcagacgataaagcacggcgcgccaccacggataagaatccagaagcttgcgctccgctgtcccgtctccgctccggcctccacccatggctcatccactcctctcgtccgcgcttgtttgttcgcgtcttctccctgtagggaactccgttacccggccccggctgtgcgtggcgtcagcacgccccgcgggcaggagggtgaggctgctgagcgtgaggtgcgagcagggagccaagggcggtggcgggctggacgtgtggctgagccgcggggcgatgctgggcttcgtcggagcggtggccgtggagctgaccaccgggaaaggcgtgcttcagaatgtgggattgaccgcgccggtgccgacgctggcgctggcgctcaccggcgcggtcggcgtcctcacggccttcctcatcttccagtccgggacgcgggactgatgggtgaattgtcaaagctcccaaaaggacatgcataaagtctgtcagagtcttgtgctgtgtatgtctatgctgttgtagttgccttgccttcacaggaagctgaggagtaacacagtgcgaaaaggataattattattttttacaaaatgtgtttacagtactcttccttgaaggactaaactgcatttatgttgaagttgtcaataatcctattctcactacaccaaattccattccaattcgaagaggttcttggcaaccaaggtctgttcattttaatccaagcgtgagaagttccgataattcctttcaaaggtcatcaatcttcgagaggctttcacgttgctcattcgacaacggtagagctgagatggccgaagataag

SEQ ID NO: 4477 - DNA, 1506 bp, Zea Mays
ccacgcatcgaggacctaattctaaattcgtaaaatcatcacgcgccgtcttcagtcctctgcctcctcgtcggaaagccctaatcccactcaatcctctcgctgccgatccgacctcaattccgaatccctcccccatctcccggcgtccccaacgccctccgccatgccggacgtgcagccgctcgtcagcgacttcgtcctcaagcttaagcgccggaaggtggaggggtcgcacgcggtggcccggcagacggcggaactgctacggtcggttgtgtcgcagcatcggatgggtagcagcgccaaccaggcagccgcgcttgccgatgctgtacgcgctgtgggggagcagctcatctccgccaatcccattgtgtcagaattctatcagggtgacctgaaaactgtgttggtatccaactgtgaggtaatcctaactctaggtcgttcgagaactgtcaaggagtttctgtatgctgcgaaagagaagaagcgatctttccgtgtatttgttgctgaaggtgctccaagatatcagggccatgttcttgcaaaagagttggttgagaaaggtgtacaaactacagttataacagattcagcagtttttgcaatgatctctcgagttaacatggtcataattggagcgcatgctatcatggcaaatggtggagtcattgcaccagtagggatgaacatggttgcacttgctgctcaaaggcatgctgtgccttttgttgtggttgctggtagtcacaaggtgtcatgcttaactagacgcttgatatacagagtagcatagctgtgtcctctgtatccacacaacccacaagtgttgctgaatgaactcaaatcgccatctgatttgctcgattttggcgagttctcagattgcatgaatttcagtactcaggatggcagccccttgctaaatgttgccaacccaacatttgactatgtgccaccgaagcttgtgagcctattcatcactgacaccggggggcacagtccgtcttatatgtatcggcttattgctgagtattactcagctgatgatctggtagtgagacggaaggcaacatcttgaaagaagacgaaagcactgcaaagtctccttggtggtctgatgtgcagtcatggaattgttggtgggtccagtcactgtcaaacagcaggagatcgatggaagcattctcgcgtttgggcgtaaactgtcgagggaatgggatgtgacgtcatggaattgttgtcgtactacaggagaggttcatatacatgaatatatgattgactggttgtgtagagggtcgctgtttctgatctgggccttggctggcccaaattttgtcttataaattccagcaagctgttcggtgtcacgtattcgctgagccccttttctatttctatatactgtatatggtattacgcctgtcatgcttcttttttggcgattcaactgcgtagatgctggaaaagtaaaaaaagaagaattcgacagaa

SEQ ID NO: 4478 - DNA, 1852 bp, Zea Mays
ccacgcatcgaggacctaattctaaattcgtaaaatcatcacgcgccgtcttcagtcctctgcctcctcgtcggaaagccctaatcccactcaatcctctcgctgccgatccgacctcaattccgaatccctcccccatctcccggcgtccccaacgccctccgccatgccggacgtgcagccgctcgtcagcgacttcgtcctcaagcttaagcgccggaaggtggaggggtcgcacgcggtggcccggcagacggcggaactgctacggtcggttgtgtcgcagcatcggatgggtagcagcgccaaccaggcagccgcgcttgccgatgctgtacgcgctgtgggggagcagctcatctccgccaatcccattgtgtcagaattctatcagggtgacctgaaaactgtgttggtatccaactgtgaggtaatcctaactctaggtcgttcgagaactgtcaaggagtttctgtatgctgcgaaagagaagaagcgatctttccgtgtatttgttgctgaaggtgctccaagatatcagggccatgttcttgcaaaagagttggttgagaaaggtgtacaaactacagttataacagattcagcagtttttgcaatgatctctcgagttaacatggtcataattggagcgcatgctatcatggcaaatggtggagtcattgcaccagtagggatgaacatggttgcacttgctgctcaaaggcatgctgtgccttttgttgtggttgctggtagtcacaaggttgatttctacacatcccccagttcttttgcaacctaagtagccaaataagaatcagggtctacatctacattttactgttatttctaatgtatgtgtccataatttaatgttcaatacttcaatagtgcattgtcccgagttagcccacttgttacatcgtcctaatttaatgaagaaaaagtggacttgcagcacttatgaggatgctgtcaaatttcatattgtgatgattcccatcatagtattttaacttaatgttttcttatttctggctttctgcgatgtactgttatctacagatatttcactcatctcgcgaaatctctttgttgcttccattttccacaggtgtcatgcttaactagacgcttgatatacagagtagcatagctgtgtcctctgtatccacacaacccacaagtgttgctgaatgaactcaaatcgccatctgatttgctcgattttggcgagttctcagattgcatgaatttcagtactcaggatggcagccccttgctaaatgttgccaacccaacatttgactatgtgccaccgaagcttgtgagcctattcatcactgacaccggggggcacagtccgtcttatatgtatcggcttattgctgagtattactcagctgatgatctggtagtgagacggaaggcaacatcttgaaagaagacgaaagcactgcaaagtctccttggtggtctgatgtcatggaattgttggtgggtccagtcactgtcaaacagcaggagatcgatggaagcattctcgcgtttgggcgtaaactgtcgagggaatgggatgtgacgtcatggaattgttgtcgtactacaggagaggttcatatacatgaatatatgattgactggttgtgtagagggtcgctgtttctgatctgggccttggctggcccaaattttgtcttataaattccagcaagctgttcggtgtcacgtattcgctgagccccttttctatttctatatactgtatatggtattacgcctgtcatgcttcttttttggcgattcaactgcgtagatgctggaaaagtaaaaaaagaagaattcgacagaa

SEQ ID NO: 4479 - DNA, 829 bp, Zea Mays
gttgatttctacacatcccccagttcttttgcaacctaagtagccaaataagaatcagggtctacatctacattttactgttatttctaatgtgtcatgcttaactagacgcttgatatacagagtagcatagctgtgtcctctgtatccacacaacccacaagtgttgctgaatgaactcaaatcgccatctgatttgctcgattttggcgagttctcagattgcatgaatttcagtactcaggatggcagccccttgctaaatgttgccaacccaacatttgactatgtgccaccgaagcttgtgagcctattcatcactgacaccggggggcacagtccgtcttatatgtatcggcttattgctgagtattactcagctgatgatctggtagtgagacggaaggcaacatcttgaaagaagacgaaagcactgcaaagtctccttggtggtctgatgtcatggaattgttggtgggtccagtcactgtcaaacagcaggagatcgatggaagcattctcgcgtttgggcgtaaactgtcgagggaatgggatgtgacgtcatggaattgttgtcgtactacaggagaggttcatatacatgaatatatgattgactggttgtgtagagggtcgctgtttctgatctgggccttggctggcccaaattttgtcttataaattccagcaagctgttcggtgtcacgtattcgctgagccccttttctatttctatatactgtatatggtattacgcctgtcatgcttcttttttggcgattcaactgcgtagatgctggaaaagtaaaaaaagaagaattcgacagaa

SEQ ID NO: 4480 - DNA, 7169 bp, Zea Mays
ggggaggggtggcgatgccgggcctaggccagatgatgcaggcgaccatagctggctcacatcccctctccatcgaccatgctcaagttcgtagacaggtgcctttcacccatcgccaccgtccctagcactcgggagcctatcatcggtaccctccccactcacgacgaccacaagtccaagggggtgagacaacaacatgccaccaaggaccttggtatcaaggtgatgcacgagcggatgcccttgtttagacacttctagccgcacgacgagagattgtagtgatctacaaggttcaagtctggtgtctggcccttgctaaacttgaagacgaaggcgaggatgacgaacttgtagttcctggatacacacatatttaacaggcaccaatggagccaatcttaggcacatgcctagatagggcaagccctgcctccacctatgtgtgtttgaacttgttgtcttggttgttcgctggtacacaaacattatcaccattggctcccactgcagccaaggatgaaagtgggtggtgatgatcatatttagaacctccagatggaaaccggaggtggaaatcaattgaaaagtggaaaataaagccatctccaacaactataatcgtcacctatgccttatatcggttgtgcctacgtcactagtaactaaagctaaaatcgacactaggagaggaatgggtggacctccacctgatccaccacacatgatgttgcatgtccgtccaatgcacttctgctagattccatcatgcaaggcggtcatcatgcataggggtcatcgtgtcaggcattctattgggccaatgtcatagggaggaagagagacgccatgatagggagagttcgtccttcatatgagagagaaatgtggggaacacagaggatagagagaaggtggtatgaccaaggatctacatgcttcacacacatacattttcaatgtgacacgcaagcgcttgcacatgtttcaccccctattagccacctaaagagaacacagacattgaggggagatacatacacatgcttctttgagcacatcttttcattgtaaactcttttcatgaactagattttgatgactgattgtattccaaacaagtgatcatatattattaaaatgtttttataaaacaacggtgaaaatgctattaaagaaatactatttatgtagtagtgtttgtagaagttagaagaaaataagcattggtgtacatatctttgcaagaggtatgaggcagaagttagaaaatgatgggcttgcaagagaaccacacatgtcgaacttctttatcgagtgcttcttatggaagtaaatgttatcctttgttgttatgtatatatgtcttgccttataaaacacgtgagcatttaaccatcttaatttatgcttggccttgtcgtggggatgtgtcaacaagatacacatcacgacattctcatgggcctagtttgtgagggtgcatgaagcccacttttatcattggacacttaccacaacatgagaccaacaaaattatgatatacttaacaaggctcccatcatgggataagaaaccataaaatattatggccactttgtatatatttagtgatctcgattaatttactatgttgaccaaacatagacttatgcacaaaacctaactattaacccagccgctagatagttaagtagaaaacatttgcgaaatagggagaaataatattagtaaatgaaattagatttaaaatgacgcggaactggatttggtggagtatgaattgttgtactcaaaattaggacggaaggaggggtggaataggaataatctcatgaattttagattactaatgcttcctatatataaaaaaatggaaaagagatcatgtctataaacttatggtcaaaggtgatatcaatcaagaatttgaaatagttgcattaatagatctaatttacattttgttgaatttcaatctatcacttattactttagatgagctcctgccatcgattctgaaagaaaattttattttcgtccatataaagtgtgtggaatcaaattttgaccaataagctagaatcattgaagcctactttgatgcatcgttcgatggcgattcagaaaactttgctccatgtacatgtctgcttgtagtatcaagatgaactatttgttttttctcttgccattttaaatgttaatacttttatttcactttacatcacatgttcttggcattaacaatttaatggaaggtgttaacatatcaacctacttcagatgtagcttgcctataccattctttgagaagatacccataatatccattgataatttagcagtttatttacttaatagggctatgttttctttattctaatgggttctaccttctagacaacaaagaagatcctccaaatacaatgagggaatgacaatacataattttaaaaatggaacatttttgtgttttattaatgacatatttttgattactttgaaagcacattattaattgtgcaacataatcataacacactccttgttgctcttgcttttatcaagttcaaggaagcattagtaaataatatgttacaccaaggcaccctaatgaggacaatattcgctcataagtttgtggaaagaggtggggattatgttgatatagttcctccaatccactataagtatacaaattggggtatttcattcatcaagaataacccaaaaataagttattaaatactcttgatagcacatgagcacgatgtccattaatcgtcaacgcaataagaattcgagtgacaatgttgcttatgtggactcgagtataacctatttacactaagttaactatttactgatttagtacttttaattctggtctacgccaagcctcgatacataatatgatatacttagacaactgtgtaagatgttgtacaagcatatgtacaattccagtagtagtgttatgtgtaagggaggctctaggacacacatattgagtatgttttactcctaggtgtgtgtgtgtgtgtggaagttgtagaaaaagagatctcttatattagacgacaccaacaaaccaatattgtatgtggtatgtgatgacacaagcattatatctacaaaatagggtgtttttctttccttgactagcaaaagaatgctaataataagccaccaaacaaatatattgctttgttcataatgaaaataaaggataccataaatttgccaacattgtattccttctagtaagcaatattgttcataattaaccttgaatgtaaatttggaaattcctttcaacatttagagtgtagctactcctttgtctatatctcaaattttaggttgcatgtaaccagatgaaatgtatacataaggactatgtgacaatactagatcattgatggtgcatgtatatatactactatgacaacactataacaataaactaaaacaatatagtctccattattttttcacatagtaagattaatttggagtatcacaaaatgactatataaacatgctcaatgtgataaatgagtacacaatatgcatccatacacaatatgtcactctccaagggcatgcacaaacactaaccataacataattagtttcctattttgaaacatatagatcacaaacctgcatattacaattattatagatcttcatcggtatcaatttcacccctctttagtgaaagtgggcatgtaatgaggtgagatattatcactagttcaaattgtagtgaaaaatagtcatcactattgaacccttttacgacggttgtgaccatcagaaaaataagaaaaagcattgaccgagcccactaacttaacttatctgccactgttatagagggtgtatccttgagtcattgccaaaggggccacaccgctctcgctactattaggatgagggttaggtgggaggaggcagaggggaagcgagagagtaaatatagagagagatataaagaagaaaggtgcatgcaaaacttatgataataaaggaatgtgaccaagatgaggttgaaagggaaggctagagtttcctattatatattctactagagatggtggtcctacccgcttgtatttttttctaacaagtgagtgcatgggttcaaaatttcaccacatgaatgcggatttgtcacaccacccattagcgcaaaaatacatatatttctatctattagagtgatattgtaactcataggcgcgagtaccgacgagtattataacgacctgatgtgcatacgatcccgacaagggcatctatgagcataacatcttacccctcgcaggtagtgaatggaagtgcatgtataaatttttacagaatagataatttgttgtgggtgtgtatttagtccactcgcaccttacttaacatatcgccatcactatacttaggctatccttgagccaagaatgaaaaatggaatagacgaccagagagggggtgaatggaagctaataaaaaaatatttacacttaagcaatcttagcttatttccgtaaagttcagaccaaacctctaagacaccaaaactgcacaaaggtccgagataaaaaaacaattcaaccaagtgatggttggatgccttgaataagttttccagcaagaatatcaatctaccgaaacaagcaccggaaagactgagaagaggcaaatcaaagactttctctaaatagcccagtagtgtcgctctcctcgctgtcattgccatggcctgacagtgttgctcgttatctgactagtagtgtcgctcacgctgtgtggtagtgtcactcgaccaaaacttcctaaaattagaggaacctttgtagacaacaacaacgagaggattgaagacaattccaaaatttgaacttcaaaagatcaacccttagatagatcaggaattacgaacttgagtttgggttttcacaaaaagctcaaaattatcggggacttaatgcttaagttgatttgccaataccagaggtggtaatggttttagaaaagatttctcaaggccttaatcagcccaaatgccctaaccttatattgtagctcattggtgcgagtacgatcccccacgagtacatctttagtgctagtttggaaactcaaatccccttggggattgaaggggattggagaggaaattagtttatttccaccttaaccccctccaatcccgaaggggatatgaggttcccaaagtagccctcaagtataacattctcgtgggtgtaagtgcgagtattaaattttacataagaggaaatttgttgcgggtgtgtatttagtctacccatgcacaccttgcccaacttattgtcatccatatacttccaggcttgcctttgagacagataacaacagtgtaaatattatcaccaatatttgttataccaaactgttggtgcaaattgttctcaccgttagggtggtaatggatcacgatccaaatgcttcttcacaaatgttaggaatctaaataaattttagttaaaaaatgaatagaaataaaacctgattctaatctgatttggtccttaaataaatttaaagcctattgtcacccctaaggacttgtttaggatcggagcaagagtaatgtaggggattgagagagttagtgattgcccccacatgaaagccgatcatctcagtcgtcaactcttggccctaaaaatgacacaacacattagattaaccggtacaaaattagaggatagagaggtgagggaagtaaatgcatgcaaaataacccacggagcaaaagaagggactacagaaatagagcagtgtgtacgttgttgcacaccagtggctgtggctctagccagggtcctcccacgctctcgtcggccctccactagcatggcctcgcatttcacgtgctccctcgcgcgccccgaggcgacgcacaaacaaacgaaggctacccgggcctcgcggctataatagcaggcgcccgcccacgcgagagcgagagagagagagaccgaagcaccagcaccaccagtgccatacataccaaacgaggacggtgaggagaggagatggccgcctccgggaacaacagattctcccttacgtgcgctcgcttgcgcaagttcatgatggagcagaacaggaaggtgcggatggatgacctcgtcggctcctcctcgttccagcggccgctccaactgacaccggtccctgtagccacggggccggcggcggcggcggcctgggagaccggcacgagcaggacgaccttgccgctgttccccgtccgcactgctggcaccgccgagatcaccaggccagaggagggcaaggccaccctgaccatcttctaccaggggcaggtgtccacgttccaccacttcccagcagacagagccaaggtcctgatgcaaatggcaagttctgtgaccgggaacacgccggagaaaggggtggcggtggcgaccgccgtgccaaagaaggcgcagaccagcgatgaccagccatcgcctgcaggggcaggcatgccgcccatcgcaaggaagctgacgctgcagaactttctcaggaaaaggaagaacaggatcgcaggcaccgacgacgctgaccgcaacgaggatgcttcgccgtggaagaagagagactccgccgccggcgccggcggcacccccgcgggagacgtgcccgacgatgcctcgtggctcgcgctcaggctctgaaacagtgaaacccttcaccgcttattacatgagaataataatatggaagagaaggatacatcctccgagatgatacaataataataatgccgtgtctgtcccaggattcttaggacctccgaagaattcttaggcactgtgtctgtcgtcgagagccgtagcttatcaaaaaggggaagcatatctttagaaagctctctttcgaaaaacttgagaagctgttctaagtgagcttacctacttgtagtacaaaatgtagtttttatttgtcaatttgaactttgaagaagcagagaccctacctgctggggcggagcttttggcctttcaatagctttttggagaagcagaagcttccccaaatagagcttaattacattactgttggcaggactaataataatgcggcgtcaagcagttataaacta

SEQ ID NO: 4481 - DNA, 2838 bp, Zea Mays
atttacgtgatgctagcaagtgacaattcttaatcatctatgcttcatagtgttcctatcgttttcttggtcttgcaactggtccctcttgttatttcatcctgcacaaattagctttctattttttagcccatggacatttttttagctgtgtgtgttttttgttgtgattgatgctttgtaccggccatcctcctgatagtttgtctttggttactgcacccctgggcacttcaggtcctgctgcgaatcttgagaatggagatgtgtttcccttccacctggaagacgccttgaatatctgtgttgttgtaacgcatttcctcactgtagtctctagcgaacgagacagagccagcccccgcgtggtcctccgctcgggcgacacgggaggcccctcccccagccctagcgccgccactctctcctcctctatttccccctcgtcgtcgccggaggagactgccgaaggccggcgcgaccggcggcggagcgtttctccggcatttcttcttcgtttgctctcccggtgttcagatttgagcgggttctatgtcgggcggctcaagttccagccgcggggttactggggcgggtgcagtcccccgcgccgtcgtcttccttgtctccggcgtcgtcgggggctgtgctcggcggttcaacatctggtcctacaggtgcagccaggcgatggattggcggcatctgctggtggtggcggggctgcaccgtttcggcggtagacgcacggcgtggtgggtctagagctggccggcggacgtgctcctcgtggtgttgggtttgtggcgtgtgggccggatctgccctgaacagctggcgctggcggccggtggcggctgcgtcgatggtggtttggggctcgagcaggcgctgtggtgcggcgctctcttctttgccaccctcccctcccctcacggccttgtctactgctgtgggcggggcgtcagccgtgcgacggtgaggagcggaggatctgactcctcagtggtggtgtgtggcgtcgacatatgggcagcaacggctccggcagcatttgcggtggtgtacatgccagcggatctggcgcgtcgcaacggctgctgccagggttggtcgacgggaggtgcggcgcgtggtgctgccgctgctcggccgggaccgtgggctcagccggaggtggtggcggtccgcgctgctttgcgactgttgtggcaaccgacgcgtcattggccctctggatgggtctgtgtgggttggtttgggcggcggcggcggctgtggaggtgtgctttgtcccggggtcctgggccggatgttgtgctgggggttttcttgggcgaaagccttagcgacggcgacgctcctgggcgccgcttcccctgttgagggcgtcgtgttccctagctttgtcttccatgggcgaaagcccggtccacctcggattggcgacgatggcatccccgacgtcactcccttcctgaaggtgtcgctactgaagttcgtctcggccacgtcgtcgccttcggtggttgctttcgtcttttgggtcccggtttgcgtgtggaggtggagacttgcaccgtgaaatcgaagttgctacgtcaggggatgtggcttggcaacgatgacgtggagcgacccccttcttcgtgggcttgtttgcttcgaagatgaggcatttggcagaggcggggcggtggatcaaggttttggaagtctcgctggtgaagaatcggagctgtctcgagtatggtatctcgtggcttggccacagtcttccttccttctcttctgtcggtgtttgtagtcatcgtcgtgtttccttcggccttgtggtgcctgtcttggggagtcgagctgctcgtcacttgtattgaactcggcaacgatgactcacgatggacattgtgtgtgtggggttgttgttgtctggtttgtttgtagtataggttttaggtccggttttttttaaaattaggttaattcctttcttcttaattgagagacagagcttctgctattacgttcaaaaaaaaatctgtgttgtgcaaggcatgcgtcttgtaagagcacgcctgttgtccatggaaatacatacttcatctgagactaagctcaagcagagaagaaagcccagaagcgcgcgccttgccacccgtaggtttctcgacggttatccttttgttggtttgacgttgtctgtccgctagttatatatctgctaatatttactcagtggtgttttatctgctaataattacttggtgatttgcacgggtaagtacttgagctgctcttggcaccgtcgtcgatcggctttagttcctgtttttgacctgccaccctgtgctcctgcatgcagagtgcttcctccagatgaagtcgcccacctcatgctgtcgtgcagaaggcgctaagcgttagcagcatcgcttctgtggacacaataatctagagttattgattgcacctatacttccctttttttagttttttcaagtaatttcatatgcaatctattgacttcactaccggaatccgggcctttgccgagtgccggaggctttgccgagcgccgcactcggcaaagtcctgcgctcggtaaagagcttatttaccgagtgcaggacactcggcaaagtctgctttgccgagagtcaaacactcggcaaagatggctctccgcaaagggccgttagcggccgtctacagctgacggccgtcagtctttgccgagggccgaaagccggcactcggcaaagtcttctctttgccgagtgtcaaatatctggcactcggcaaagagagtctttgccgagtgtcttctgtggagtgttg

SEQ ID NO: 4482 - DNA, 2712 bp, Zea Mays
cagataccaaagcatagctccgaacactgcctctgttcatctgcctggtagaggtagcacgccagatcaccagcgatccgcacgtcgcagcagagcaaagatatcgcggggagcaagagtagtcaacgcacgaatggtgggcacggtgtcgctagcggcgggctacggctccgatggcgtgtaccgctcgccgcgcctggtggctgccatcgcctccgacccgggcctctccgtcacggacctcgtccttcgccgcgccgcggcgtgcccctccgcacccgcgctcgtggacgccgcgacgggccgcgccctcaccttcggggccctccgatccgcggtgctcgtcgcggccgccgcgctctcctcccgcgcgggcgtccgccgcggcgacgccgtgctgctcctcgcgcccaactgcgtgctctacccggtctgctttctcgccgtcaccgcgctcggcgccgtcgcgaccacggctaacccgctctacaccccgcgggagatcgccaagcaggccgccgacgcccgcgccaggctcgtcgtcaccgtctccgatctcctgcccaagatctccggtctccgcctccctatcgtcctcctcgacggcgacggcgcccccgtgccttcgggctgccccagcagtaacgtcactctctactcggacctcgtcgccggggtgcaggaggcggagtaccgccacacgccgatcgggcagggcgacacagcggcgctgttctactcgtcgggcacgactggggagagcaagggcgtcgtgctcacgcaccgcaacttcatcgcggcagcgacgatggtgacgtcggaccaggacgagctgggggaaggccacaacgtgttcctctgcttcctgcccatgttccacatcttcggcatgtccgtgatcaccctcggccagctgcagcgcggcaacgccgtcgtcgtgatggcccggttcgacgtcgacgccgtgctggccgccatcgagcggcaccgcgtcacgtacctcttctgcgccccgccggcgatgatcgcgctcgccaagcacagcaggggcggcaggtacgacctcagctcgctcagatgcatcggctctggcgccgcgccgctcggcaaggacgtcatggtggctatggctgacaggttccccggtgtcgacattatccagggttatggtatgactgaaacctgcgggataatatccctggagtacgtacagaagggttgtgcccgtcagtttggttcgactggagcacttgtcacaggagttgaagcaaagatcgttaatgcaaagacaatgaagcatcttcctccgagccaactaggagaaatctgtgttcgaggaccgaacataatggaaggctatttcaacaatgtgcaagcgactgagtctacaatcaagaatggatggttgcataccggtgatcttggatacttcgatgaaagaggccagcttcatgttgtcgatagacttaaagaactgattaagtacaaaggcttccagattgctcctgctgagcttgaaggactgcttttgtctcatccagaaatccttgatgccgctgttatcccgtatcctgatgctgaagcgggggaagttcctatcgcctacgttgtactatcaccgaagagttcactggccgaagctgatgtccagaaatttatcgagaaacaggtcgcgcactacaagaggctgaggaaggtaacgttcgtgggcagcgtaccgaaatctgctgcggggaagattttgaggagagagctcatcgcccaagtcagactgtccaagctgtagcagatttaatctcgatttcactgcagcccttgtcgtctgggttctgctggacacagaagtgcagaatctctgctgagcactgtacaagatttgtctatcaagtcactgtcaggaaccacacatttcagtctagacatgccagacactgatttcttttttttgttaaggaataaagcattctggcctctagtatccacggatgaatgatgtatcctatattgcttggattcttcaagaaagttaaagtaatatataatactacatccgtctcaaaacataattcgttttaactaaacaaacatttattaattaaactataaatatagtttatatatatgtttttatttattatcatttatttgaacgtggacagagaaaaaaaagaaagcaagaaaaaactgtattttgataaggagggagtgatttatattttgatgtatcttcctagacacggcaaaacactccttactggaacatcatctattcatcttcagtccattacaacaccgtcgtatgtcactttgctacaaacatccatagtggtacaacacaacaagagcagcaaacgcgccagatcaaaccagtctccagtatacacgcaggcaagcagcacgacgcattaacttttactaggtgttagattatcaagtagcacgcattatatacacagtacatcgcaggcccaagctatactgctaagcatcaaggagacatcaggatcttcctcgactcacggtcacggctgccctcctggatgcaccctgaaccagcaagagagtttatccacacgtcatcggttctcaccggctcttcgtcgtcgtttctgtgccaggtccagtgggcatgggtggagttcacgatctttagctcgccgtgcccaaagctcgcttccctgaagaccgaccacgctggcttcgggttacggt

SEQ ID NO: 4483 - DNA, 718 bp, Zea Mays
cggaggaccagtatttgattccgagatctgcaactgagttgctgcttcagagggcatacatcgctggttgcagagaataaggagcttatggagccaagaaaatggtagaggaatagatagtatatatgtgatgctaatgtcttggcaagaagggaaagaatagttatgttgtgttaactcaaatgtcgaaacagaagagatagattggtgatggaaaataagaggacaatccaaactgcatgaaaaccttatattttgaaggaaaagaaaattggcaaaaacagaaactatatagattatattttagaacaacttgagtatgatgtaagaaaacaaataaatgcaaaacttgacatgtacgcatatgtaacttttgtttctggttgcctaatacgcattgacagtaataatatatccataagtcctgcaatcatccgtgcttctttagtaattaaaaggcatctgaatcaatatgatggtagatacaaagtccatatctactgcaagcctgcgccaactaccatgcttccccttttgccctttcagtatgatttcaaatcaacaagaaaagatttaaaactgtaagcagtgcaatcaagtcatcatcatcatatgctaaaagtttaggtcaatactcaaactctgttacatgcagtaatgagataaatcacagataaaccttattgaaagattttttttctcttgaaagaaagtctgg

SEQ ID NO: 4484 - DNA, 1107 bp, Zea Mays
ctttaatctgtatcaatttctcctccaccaagttcctcctcccttcgacttcctctcccccgtctggccgtgcagccccggaggcgtcactgggcaaggaggctggggtggggacctcaaacgccatggatgtgcagccctaggcaccaggatggatggagtcacacaagctgttgaaaatcttaagaaagaatggggccaagcagtttcacagcttgacgagaacattactgcaatcaaatcatgtggaaaaacagggaaagggacagaggaagcaaattctcttccaaggttgaatggttctgcacaggatgctctgcagttgctgaagtcactgcagttccagcttgatcttctagcacagcagcttcccacttttgatgaggtgcagtctggtcaagcaaccttgaagtcatgggatgaacaatacaagaagcttcgtattagcttgaggaatgctaacttagaagcaaaagacaacattagacaagctgctgaagaggagagggcacttcttctaggcggtggtgaagagtctaccatccgtaggcgtaatctccagacaaaggctggaatgacatctgctgctgaaagtatcactgagagcctccgacggtctcgccagatgatggttcaggaagtggaaagaagtgctagtaccttggcaacatttgacgaatcaacaagtgttctccagaaggctgaaggtgaatatcaaggacatcgctctttgctgatgcgtacccgtggtttgctctccacaatgcaacgacaagatgtttttgataggatcatcctgactattggtttcaccattttctccttggcggttctttacgttgtctcgagacgtattggtctgttggctctgcaaaggaaactggccgatgccatcagatcaggttctttatcagctgaggacattgtcgcgaaagcccaacatggacctgccccggcaaatgttcctgctcctgctcctcgcgtttacaatgaattatgaatcgcttttattttccgttttatgaaatgtttgaccaggagagattgttaagaagtcgtgaagggacgtaggctatggccatggaatggactcaccgtctcgactct

SEQ ID NO: 4485 - DNA, 844 bp, Zea Mays
ctttaatctgtatcaatttctcctccaccaagttcctcctcccttcgacttcctctcccccgtctggccgtgcagccccggaggcgtcactgggcaaggaggctggggtggggacctcaaacgccatggatgtgcagccctaggcaccaggatggatggagtcacacaagctgttgaaaatcttaagaaagaatggggccaagcagtttcacagcttgacgagaacattactgcaatcaaatcatgtggaaaaacagggaaagggacagaggaagcaaattctcttccaaggttgaatggttctgcacaggatgctctgcagttgctgaagtcactgcagttccagcttgatcttctagcacagcagcttcccacttttgatgaggtgcagtctggtcaagcaaccttgaagtcatgggatgaacaatacaagaagcttcgtattagcttgaggaatgctaacttagaagcaaaagacaacattagacaagctgctgaagaggagagggcacttcttctaggcggtggtgaagagtctaccatccgtaggcgtaatctccagacaaaggctggaatgacatctgctgctgaaagtatcactgagagcctccgacggtctcgccagatgatggttcaggaagtggaaagaagtgctagtaccttggcaacatttgacgaatcaacaagtgttctccagaaggctgaaggtgaatatcaaggacatcgctctttgctgatgcgtacccgtggtttgctctccacaatgcaacgacaagatgtttttgatagaagtcgtgaagggacgtaggctatggccatggaatggactcaccgtctcgactct

SEQ ID NO: 4486 - DNA, 546 bp, Zea Mays
atcaatttctcctccaccaagttcctcctcccttcgacttcctctcccccgtctggccgtgcagccccggaggcgtcactgggcaaggaggctggggtggggacctcaaacgccatggatgtgcagccctaggcaccaggatggatggagtcacacaagctgttgaaaatcttaagaaagaatggggccaagcagtttcacagcttgacgagaacattactgcaatcaaatcatgtggaaaaacagggaaagggacagaggaagcaaattctcttccaaggttgaatggttctgcacaggatgctctgcagttgctgaagtcactgcagttccagcttgatcttctagcacagcagcttcccacttttgatgaggtgcagtctggtcaagcaaccttgaagtcatgggatgaacaatacaagaagcttcgtattagcttgaggaatgctaacttagaagcaaaagacaacattagacaagctgctgaagaggagagcatcgcaggtgccattataacttggctatcggtttctaattgacttttct

SEQ ID NO: 4487 - DNA, 1117 bp, Zea Mays
atcaatttctcctccaccaagttcctcctcccttcgacttcctctcccccgtctggccgtgcagccccggaggcgtcactgggcaaggaggctggggtggggacctcaaacgccatggatgtgcagccctaggcaccaggatggatggagtcacacaagctgttgaaaatcttaagaaagaatggggccaagcagtttcacagcttgacgagaacattactgcaatcaaatcatgtggaaaaacagggaaagggacagaggaagcaaattctcttccaaggttgaatggttctgcacaggatgctctgcagttgctgaagtcactgcagttccagcttgatcttctagcacagcagcttcccacttttgatgaggtgcagtctggtcaagcaaccttgaagtcatgggatgaacaatacaagaagcttcgtattagcttgaggaatgctaacttagaagcaaaagacaacattagacaagctgctgaagaggagagggcacttcttctaggcggtggtgaagagtctaccatccgtaggcgtaatctccagacaaaggctggaatgacatctgctgctgaaagtatcactgagagcctccgacggtctcgccagatgatggttcagacgaatcaacaagtgttctccagaaggctgaaggtgaatatcaaggacatcgctctttgctgatgcgtacccgtggtttgctctccacaatgcaacgacaagatgtttttgataggatcatcctgactattggtttcaccattttctccttggcggttctttacgttgtctcgagacgtattggtctgttggctctgcaaaggaaactggccgatgccatcagatcaggttctttatcagctgaggacattgtcgcgaaagcccaacatggacctgccccggcaaatgttcctgctcctgctcctcgcgtttacaatgaattatgaatcgcttttattttccgttttatgaaatgtttgaccaggagagattgttaaggtaatactttccacaagtaagctattaagatttcttatctgtagtctcaaatgatgatgcaccaacctgtcaacgtttgaaattcccaacaagttttggttacagttggaaga

SEQ ID NO: 4488 - DNA, 2762 bp, Zea Mays
atgaagatagagcatgctgagcatatatatgctgcaatatatttttgttttagttgcttaccgtctccaccgcatctcatctcgccggcgagccagcctaaccaatcgccaatgctcacctcgttgcttccaccgcccacagtcccgatctccaaaccctccgcgtcggcgtcgcccaagaccgccaagcccaggtccgccgtgctctccgcctccgccctcgccctcgcccccgcctcgacatccgattccgacgatgcgcccggcgggggcgagggcggcagcgtccgcctctcctcgctcatccgctccctctgcgccgcggggcgcacagcagaggccgcgcgggcgctgtccgcggcgggcggcggcgcgggcgtcgtcgcctacaacgccatggtggccggctactgccgcgcgggccagctcgaatccgcgcgccgccttgccgctgcggtccccgtcccgcccaacgcctacacctacttccccgtcgtccgcgccctctgcgcgcggggccggatcgctgacgcgctcgcggtgctcgacgagatgccccgccgcggctgcgcccccatcccgcccatgtaccacgtcatcctcgaggccgcctgcaggggtggcggcttccggagcgccgtcagggtgctcgaggatctacacgccaggggctgcgccctcgacgtcggcaactgcaacctcgtcctcaacgccatctgcgaccaagggtcggtggacgaggccctccacctgctgcgggacctgccgtccttcggctgcgagccagacgtggtgagctacaacgcggtgctcaagggcctgtgcatggccaagcgctggggctgtgtccaggaactcatggaggagatggtcaggatggcttgcccgcccaacatcgttaccttcaacaccctcatcagttacttgtgtcggaacggcttgttcgagcgggtgcatgaggtcctcgcgcagatggtggagcatgggtgcacgccggacatcaggatgtatgccactatcatcgatggtatctgcaaggaagggcatctcgaagtcgcgcatgagattttgaataggatgccttcctacgggctcaagcccaatgtggtttgctacaatactctgctgaagggcttgtgcagcgctgagaggtgggaggaaaccgaggagttgctggctgagatgtttgacaaggattgcccacttgatgatgtcacattcaacatacttgttgatttcttctgccaaaatgggctggtggaccgggtgatcgaactactcgagcagatgctggagcatggatgcatgcccgatgtcatcacatacactacagtgatcaatggcttctgcaaagaagggcttattgatgaagctgtcatgttgttgaaaagtatgactgcttgtggctgcaagccaaataccataagctatactattgtgctcaagggtttgtgcagcgcagaacgatgggtggatgctgaggacctgatgtctcagatgattcagcaaggctgtcctctgaatcctatcacattcaacacactcatcaatttcttgtgtaaaaagggattggttgagcaggccattgaacttcttaagcagatgctagtgaatggatgcagtcccgacctgattagctacagcacagtgatcgatggacttggcaaggctggcaagacggacgaagcactggagctgttaaatgtgatggtcaacaaagggatgagcccaaacacaatcatttattcgtcgatagcttctgctctctccagagaaggcagaattaacaaagtaattcaaatgtttgataacatccaagataccacaataaggtccgatgcagtgctctacaatgcagttatttcttcgctttgcaaaagaggggaaactgaacgtgctattgagtttttggcatatatggtgtccagtggatgcgtgcccaatgaatcgacctacactatacttattcgaggtttagcaagtgagggatttgtaaaggaggcacaagagatgttgactgagttgtgctccaaaggtgctctaagaaagcacttgatgaagcattttggtattgtatgaagtataaactgatagttactgtttgcaagtgctggtgttatcaggattagtgtctaattagcctgaaggtgtcgtccacattattttgctcctctatccaacccaaggtggtcagttgagcagtcctgaaggaaggttggagatgttgatatctttggcaatcctggtggtttcggctactgtgattcaattgccgagcgcagcccagcacaatcaggtttaatctgtttggcatagaagcatgcttggaaatagaatttgctcaagtgtgcaccataagggtaactttggttgttagctttctattcattttttttcaaatccaaaatagtagttagttaagtgagaattaggttgatccacagacctaaagaaagtaaaacctgcgcctccgctgatttatgcataccatgctgcaagctttacagttgtactgaaataatgtcgtacactttggacttcagggcaatttttgtagatacacttcattttatctgtaatgccggtctttaaaaaggaacatccgtagtgcctacatgggaatagacatgatgctcctaccatagtaccatgtcttgggaatagccatgatactgacacatgaattttgaaaaatgcagctttgtttgctgttgtagtgaaaaacatgctcgttctatcagttaaacaaaatttcatttgtc

SEQ ID NO: 4489 - DNA, 2571 bp, Zea Mays
atgaagatagagcatgctgagcatatatatgctgcaatatatttttgttttagttgcttaccgtctccaccgcatctcatctcgccggcgagccagcctaaccaatcgccaatgctcacctcgttgcttccaccgcccacagtcccgatctccaaaccctccgcgtcggcgtcgcccaagaccgccaagcccaggtccgccgtgctctccgcctccgccctcgccctcgcccccgcctcgacatccgattccgacgatgcgcccggcgggggcgagggcggcagcgtccgcctctcctcgctcatccgctccctctgcgccgcggggcgcacagcagaggccgcgcgggcgctgtccgcggcgggcggcggcgcgggcgtcgtcgcctacaacgccatggtggccggctactgccgcgcgggccagctcgaatccgcgcgccgccttgccgctgcggtccccgtcccgcccaacgcctacacctacttccccgtcgtccgcgccctctgcgcgcggggccggatcgctgacgcgctcgcggtgctcgacgagatgccccgccgcggctgcgcccccatcccgcccatgtaccacgtcatcctcgaggccgcctgcaggggtggcggcttccggagcgccgtcagggtgctcgaggatctacacgccaggggctgcgccctcgacgtcggcaactgcaacctcgtcctcaacgccatctgcgaccaagggtcggtggacgaggccctccacctgctgcgggacctgccgtccttcggctgcgagccagacgtggtgagctacaacgcggtgctcaagggcctgtgcatggccaagcgctggggctgtgtccaggaactcatggaggagatggtcaggatggcttgcccgcccaacatcgttaccttcaacaccctcatcagttacttgtgtcggaacggcttgttcgagcgggtgcatgaggtcctcgcgcagatggtggagcatgggtgcacgccggacatcaggatgtatgccactatcatcgatggtatctgcaaggaagggcatctcgaagtcgcgcatgagattttgaataggatgccttcctacgggctcaagcccaatgtggtttgctacaatactctgctgaagggcttgtgcagcgctgagaggtgggaggaaaccgaggagttgctggctgagatgtttgacaaggattgcccacttgatgatgtcacattcaacatacttgttgatttcttctgccaaaatgggctggtggaccgggtgatcgaactactcgagcagatgctggagcatggatgcatgcccgatgtcatcacatacactacagtgatcaatggcttctgcaaagaagggcttattgatgaagctgtcatgttgttgaaaagtatgactgcttgtggctgcaagccaaataccataagctatactattgtgctcaagggtttgtgcagcgcagaacgatgggtggatgctgaggacctgatgtctcagatgattcagcaaggctgtcctctgaatcctatcacattcaacacactcatcaatttcttgtgtaaaaagggattggttgagcaggccattgaacttcttaagcagatgctagtgaatggatgcagtcccgacctgattagctacagcacagtgatcgatggacttggcaaggctggcaagacggacgaagcactggagctgttaaatgtgatggtcaacaaagggatgagcccaaacacaatcatttattcgtcgatagcttctgctctctccagagaaggcagaattaacaaagtaattcaaatgtttgataacatccaagataccacaataaggtccgatgcagtgctctacaatgcagttatttcttcgctttgcaaaagaggggaaactgaacgtgctattgagtttttggcatatatggtgtccagtggatgcgtgcccaatgaatcgacctacactatacttattcgaggtttagcaagtgagggatttgtaaaggaggcacaagagatgttgactgagttgtgctccaaaggtgctctaagaaagcacttgatgaagcattttggtattgtatgaagtataaactgatagttactgtttgcaagtgctggtgttatcaggattagtgtctaattagcctgaaggtgtcgtccacattattttgctcctctatccaacccaaggtggtcagtcctgaaggaaggttggagatgttgatatctttggcaatcctggtggtttcggctactgtgattcaattgccgagcgcagcccagcacaatcaggtttaatctgtttggcatagaagcatgcttggaaatagaatttgctcaagtgtgcaccataaggggcaatttttgtagatacacttcattttatctgtaatgccggtctttaaaaaggaacatccgtagtgcctacatgggaatagacatgatgctcctaccatagtaccatgtcttgggaatagccatgatactgacacatgaattttgaaaaatgcagctttgtttgctgttgtagtgaaaaacatgctcgttctatcagttaaacaaaatttcatttgtc

SEQ ID NO: 4490 - DNA, 63 bp, Zea Mays
ccggcaatgagcaccaggacctggtagtaccaggtctcgaggcagagcatgacggcggaggcg

SEQ ID NO: 4491 - DNA, 541 bp, Zea Mays
agtgtctacagtgatgtggttttatatatgagacatgtattaattttctgtgcactcagtgctgaaagctcccacacaagtttgttctagcaagcctctctatgtggggggctcttttttatggtggtttcaagttttttggtggaaagaaggaagacaagattgaggcggcatcaggacagacataggtggctgggatgggagttcttgcctatttctgtggccaggcaacaatgttaaataaaaggaatgtgttatattgtgctttcaagttgataaattgtggcaaccaggttttgattatgtaggcaatattttgacaagctactcttatccagcatgaatgacttcacgtttgtgaatgctgcaaatgttgtacttctttcatgcgattgagtagatgttttacttctgttgccatcaccagttcaacgctgtacttttaattgattcgatcacgtgctttctagtttgcgttgttacagatgaatttgacttaagttttattgataattctatttgtgttgcttgcaattagaaa

SEQ ID NO: 4492 - DNA, 1855 bp, Zea Mays
agcgccagcggtaggcgagcgagcgagcgcggtgtccacagggccagcaacagtaggccccagtgcccccacccgctccagatccacagccgtcggccgtcgcggcgtggtggataaaaaaccctgcgcgcgcgcatgtggacatgtggtcggggagacggggactcggggtagcgactagcgagccgaggagcgcgcgcgcgcgatggcggccgctgccgtggcgaccgtggcctccccatcccccgctgcctccaggcgtatgctcccctccgccgcaccgtctttcctccggctcccgaggccgaccagccggctccggcgcgccacgcaggtcgccgcggcggggggagaggcggacgtgctgcctggtccgggggccgagggtgaggcggcggttccggggaggctggaggagcagcgggacgagccgctggcgggaagccagctcgacatcggagggctcgccttccagggcgacgtcggcgggggcttcaccggcggcggagcgggctccggggcctccggcggtggcggcgacggcaacaagatgctggaccggggcatcaatacggccatcgttctcgcggccagcacctacgcgctcaccaagctgctcaccgtcgaccaggactactggggtggacgatcttcgagatcctgcgctatatgccggagcacaactggtccgcgtacgaggaggccctcaaagctaacccggttctagccaagatgatgatcagtggtgtcgtctactcccttggtgactggattgcacagtgctacgaaggcaagccaatctttgatttcgaccgtgctcggatgttccggtctggtcttgttgggttcactcttcatgggtcactttcacattactactaccatatctgtgaggcactattcccattcaaggattggtgggttgtccctgcaaaggttgcattcgatcagaccgtttggtctgcaatctggaacagtatctacttcgtggtcttaggtttccttcggttggaatcacctaccactatctacagtgaactcaagtctacattctggcccatgcttaccgctggatggaagttgtggccttttgcacacttaattacatatggtgtggtccctgttgagcaaagacttctatgggtcgactgtgtggagcttgtctgggtcacaatattgtcgacgtactcaaacgaaaagtcagaggcaaggaattctgatagcacctccacaccagatgcttcaaaggacaactccagatagcagccctagagaccttggagagctgattcgcccttccatcgcttcaggggttatgtaaattgtacaattagccgcagcaactctgcaggtgtaaccctttttttggtagatatgtatatattcatgaaacatcaattgtgtagtatgtgccatagaatattacgaagaaagtagcgaacttcattcgtccgttctaaaataagtatatttctagcattcaaaatttatcttgtgttagagtcatttcgaggccatagcccatagctcacttctaacattcaaaatttatctcataatagacatttctaggccatagaccactcgggactaataccttttgctgttttttttttcgtttctagtgtcatgctgctctatttttatatgatatataaataattttataatgctattgatttttggaattgctctattgcgacggagtgaatacaactacagtagctgctggaattagagctagtttagaaatttaaatctcctctaagattgtagagtattaagggacttttagggccagtttgaaagctcgaattctcttcagaattggagagaattcagagaaataaataaa

SEQ ID NO: 4493 - DNA, 2898 bp, Zea Mays
agcgccagcggtaggcgagcgagcgagcgcggtgtccacagggccagcaacagtaggccccagtgcccccacccgctccagatccacagccgtcggccgtcgcggcgtggtggataaaaaaccctgcgcgcgcgcatgtggacatgtggtcggggagacggggactcggggtagcgactagcgagccgaggagcgcgcgcgcgcgatggcggccgctgccgtggcgaccgtggcctccccatcccccgctgcctccaggcgtatgctcccctccgccgcaccgtctttcctccggctcccgaggccgaccagccggctccggcgcgccacgcaggtcgccgcggcggggggagaggcggacgtgctgcctggtccgggggccgagggtgaggcggcggttccggggaggctggaggagcagcgggacgagccgctggcgggaagccagctcgacatcggagggctcgccttccagggcgacgtcggcgggggcttcaccggcggcggagcgggctccggggcctccggcggtggcggcgacggcaacaagatgctggaccggggcatcaatacggccatcgttctcgcggccagcacctacgcgctcaccaagctgctcaccgtcgaccaggactactggcacgggtggacgatcttcgagatcctgcgctatatgccggagcacaactggtccgcgtacgaggaggccctcaaagctaacccggttctagccaagatgatgatcagtggtgtcgtctactcccttggtgactggattgcacagtgctacgaaggcaagccaatctttgatttcgaccgtgctcggatgttccggtctggtcttgttgggttcactcttcatgggtcactttcacattactactaccatatctgtgaggcactattcccattcaaggattggtgggttgtccctgcaaaggttgcattcgatcagaccgtttggtctgcaatctggaacagtatctacttcgtggtcttaggtttccttcggttggaatcacctaccactatctacagtgaactcaagtctacattctggcccatgcttaccgctggatggaagttgtggccttttgcacacttaattacatatggtgtggtccctgttgagcaaagacttctatgggtcgactgtgtggagcttgtctgggtcacaatattgtcgacgtactcaaacgaaaagtcagaggcaaggaattctgatagcacctccacaccagatgcttcaaaggacaactccagatagcagccctagagaccttggagagctgattcgcccttccatcgcttcaggggttatgtaaattgtacaattagccgcagcaactctgcagggagcagagcggctgcggtatacaaaaagattgcagattgtcatttgcagggggataacaagcacgatgctgcctctgcttatgttgaggcagcaaactgctacaagaagttctccctgcaaggaaatcagtagactgaacatggctgcaagatacagcaaggatatcggtgaaatctatctgcaagaacaagatttagagaatgccgcagtctacctgaatcgcgctgctgatctttttgatagtgagggacaatcctctcaggcaaacagcatgacacagaaaatcgctgaaatatatgctcagctggaaaagtaccagaaagcaaccgagctctttgaagaaattgctcgtaaatcaataaacaataaccttctcaagtacggtgtcagaggcactcttcttaatgcgggcatttgccaactttgtagaggtgatgttgttgctataaataattcattggagcgctatcaggacattgacccaaccttctcagggacacgcgaatacaagcttttggcagtaccatacaatactcacattccttttgttcactgtgttcatcatgatacgtagcccttgattatacattgctagtttttttttgaagaaaaatggcaggagctctgccttgcattatagtagattgaaaagaacataaagttcatctccaaagggcaatgagaaataccacgcacaccagaactaacacagattacaaacgcccatcgccgaaggactaaactgctcccagtacaagtttttaaaagataaacatcgcttgcttgaattccataatttttttaacagtgtagcacagttcaattattgaacatgaactatctaaaataaaacccaaaaaaggctctgtcagtcctagatgttcacgtgttcgagaaaaagaagtcctagatgttttgtttccttagctgacttggctgaactgaaatttgcatggcaggaccttgcagcctctacggatgaaggagacgttggcaagtttactgatgcagtaaaggagtttgacagcatgacacgcctggatccttggaaaacaactctccttctgaaggcaaagaacgagttgaagaaaaaggaggaggatgaggatgatctaacctaggctctgttccacaaaaggtttcatgatttcgttgaggatgccgtgaaatcattacacaagattgtttgatataagtatggatatacaaaacctcctggataccgcatttggaatccagtagctgccatttatatatatggcatcctatatgttgcatttgtggattattgttcatggttatatatgctacccatattactccagtctttctagtataaagaggtttaatattccctccattcctttttagttgtcgcgttttagtcgaaaaataatctaacggacgacaaatatttgagaacggaggtagtatataacagggagcagtatgaattttgtttttatgtgtttgagagtatatatgtaatcgagagaaagaaatgattgaattgcgatttctttcattgattgatcttttat

SEQ ID NO: 4494 - DNA, 2500 bp, Zea Mays
agcgccagcggtaggcgagcgagcgagcgcggtgtccacagggccagcaacagtaggccccagtgcccccacccgctccagatccacagccgtcggccgtcgcggcgtggtggataaaaaaccctgcgcgcgcgcatgtggacatgtggtcggggagacggggactcggggtagcgactagcgagccgaggagcgcgcgcgcgcgatggcggccgctgccgtggcgaccgtggcctccccatcccccgctgcctccaggcgtatgctcccctccgccgcaccgtctttcctccggctcccgaggccgaccagccggctccggcgcgccacgcaggtcgccgcggcggggggagaggcggacgtgctgcctggtccgggggccgagggtgaggcggcggttccggggaggctggaggagcagcgggacgagccgctggcgggaagccagctcgacatcggagggctcgccttccagggcgacgtcggcgggggcttcaccggcggcggagcgggctccggggcctccggcggtggcggcgacggcaacaagatgctggaccggggcatcaatacggccatcgttctcgcggccagcacctacgcgctcaccaagctgctcaccgtcgaccaggactactggcacgggtggacgatcttcgagatcctgcgctatatgccggagcacaactggtccgcgtacgaggaggccctcaaagctaacccggttctagccaagatgatgatcagtggtgtcgtctactcccttggtgactggattgcacagtgctacgaaggcaagccaatctttgatttcgaccgtgctcggatgttccggtctggtcttgttgggttcactcttcatgggtcactttcacattactactaccatatctgtgaggcactattcccattcaaggattggtgggttgtccctgcaaaggttgcattcgatcagaccgtttggtctgcaatctggaacagtatctacttcgtggtcttaggtttccttcggttggaatcacctaccactatctacagtgaactcaagtctacattctggcccatgcttaccgctggatggaagttgtggccttttgcacacttaattacatatggtgtggtccctgttgagcaaagacttctatgggtcgactgtgtggagcttgtctgggtcacaatattgtcgacgtactcaaacgaaaagtcagaggcaaggaattctgatagcacctccacaccagatgcttcaaaggacaactccagatagcagccctagagaccttggagagctgattcgcccttccatcgcttcaggggttatgtaaattgtacaattagccgcagcaactctgcagggagcagagcggctgcggtatacaaaaagattgcagattgtcatttgcagggggataacaagcacgatgctgcctctgcttatgttgaggcagcaaactgctacaagaagttctccctgcaagatgctgcacaagcacttaacagtgccgttaatcttttccaggaaatcagtagactgaacatggctgcaagatacagcaaggatatcggtgaaatctatctgcaagaacaagatttagagaatgccgcagtctacctgaatcgcgctgctgatctttttgatagtgagggacaatcctctcaggcaaacagcatgacacagaaaatcgctgaaatatatgctcagctggaaaagtaccagaaagcaaccgagctctttgaagaaattgctcgtaaatcaataaacaataaccttctcaagtacggtgtcagaggcactcttcttaatgcgggcatttgccaactttgtagaggtgatgttgttgctataaataattcattggagcgctatcaggacattgacccaaccttctcagggacacgcgaatacaagcttttggcagaccttgcagcctctacggatgaaggagacgttggcaagtttactgatgcagtaaaggagtttgacagcatgacacgcctggatccttggaaaacaactctccttctgaaggcaaagaacgagttgaagaaaaaggaggaggatgaggatgatctaacctaggctctgttccacaaaaggtttcatgatttcgttgaggatgccgtgaaatcattacacaagattgtttgatataagtatggatatacaaaacctcctggataccgcatttggaatccagtagctgccatttatatatatggcatcctatatgttgcatttgtggattattgttcatggttatatatgctacccatattactccagtctttctagtataaagaggtttaatattccctccattcctttttagttgtcgcgttttagtcgaaaaataatctaacggacgacaaatatttgagaacggaggtagtatataacagggagcagtatgaattttgtttttatgtgtttgagagtatatatgtaatcgagagaaagaaatgattgaattgcgatttctttcattgattgatcttttat

SEQ ID NO: 4495 - DNA, 2939 bp, Zea Mays
agcgccagcggtaggcgagcgagcgagcgcggtgtccacagggccagcaacagtaggccccagtgcccccacccgctccagatccacagccgtcggccgtcgcggcgtggtggataaaaaaccctgcgcgcgcgcatgtggacatgtggtcggggagacggggactcggggtagcgactagcgagccgaggagcgcgcgcgcgcgatggcggccgctgccgtggcgaccgtggcctccccatcccccgctgcctccaggcgtatgctcccctccgccgcaccgtctttcctccggctcccgaggccgaccagccggctccggcgcgccacgcaggtcgccgcggcggggggagaggcggacgtgctgcctggtccgggggccgagggtgaggcggcggttccggggaggctggaggagcagcgggacgagccgctggcgggaagccagctcgacatcggagggctcgccttccagggcgacgtcggcgggggcttcaccggcggcggagcgggctccggggcctccggcggtggcggcgacggcaacaagatgctggaccggggcatcaatacggccatcgttctcgcggccagcacctacgcgctcaccaagctgctcaccgtcgaccaggactactggcacgggtggacgatcttcgagatcctgcgctatatgccggagcacaactggtccgcgtacgaggaggccctcaaagctaacccggttctagccaagatgatgatcagtggtgtcgtctactcccttggtgactggattgcacagtgctacgaaggcaagccaatctttgatttcgaccgtgctcggatgttccggtctggtcttgttgggttcactcttcatgggtcactttcacattactactaccatatctgtgaggcactattcccattcaaggattggtgggttgtccctgcaaaggttgcattcgatcagaccgtttggtctgcaatctggaacagtatctacttcgtggtcttaggtttccttcggttggaatcacctaccactatctacagtgaactcaagtctacattctggcccatgcttaccgctggatggaagttgtggccttttgcacacttaattacatatggtgtggtccctgttgagcaaagacttctatgggtcgactgtgtggagcttgtctgggtcacaatattgtcgacgtactcaaacgaaaagtcagaggcaaggaattctgatagcacctccacaccagatgcttcaaaggacaactccagatagcagccctagagaccttggagagctgattcgcccttccatcgcttcaggggttatgtaaattgtacaattagccgcagcaactctgcagggagcagagcggctgcggtatacaaaaagattgcagattgtcatttgcagggggataacaagcacgatgctgcctctgcttatgttgaggcagcaaactgctacaagaagttctccctgcaagatgctgcacaagcacttaacagtgccgttaatcttttccaggaaatcagtagactgaacatggctgcaagatacagcaaggatatcggtgaaatctatctgcaagaacaagatttagagaatgccgcagtctacctgaatcgcgctgctgatctttttgatagtgagggacaatcctctcaggcaaacagcatgacacagaaaatcgctgaaatatatgctcagctggaaaagtaccagaaagcaaccgagctctttgaagaaattgctcgtaaatcaataaacaataaccttctcaagtacggtgtcagaggcactcttcttaatgcgggcatttgccaactttgtagaggtgatgttgttgctataaataattcattggagcgctatcaggacattgacccaaccttctcagggacacgcgaatacaagcttttggcagtaccatacaatactcacattccttttgttcactgtgttcatcatgatacgtagcccttgattatacattgctagtttttttttgaagaaaaatggcaggagctctgccttgcattatagtagattgaaaagaacataaagttcatctccaaagggcaatgagaaataccacgcacaccagaactaacacagattacaaacgcccatcgccgaaggactaaactgctcccagtacaagtttttaaaagataaacatcgcttgcttgaattccataatttttttaacagtgtagcacagttcaattattgaacatgaactatctaaaataaaacccaaaaaaggctctgtcagtcctagatgttcacgtgttcgagaaaaagaagtcctagatgttttgtttccttagctgacttggctgaactgaaatttgcatggcaggaccttgcagcctctacggatgaaggagacgttggcaagtttactgatgcagtaaaggagtttgacagcatgacacgcctggatccttggaaaacaactctccttctgaaggcaaagaacgagttgaagaaaaaggaggaggatgaggatgatctaacctaggctctgttccacaaaaggtttcatgatttcgttgaggatgccgtgaaatcattacacaagattgtttgatataagtatggatatacaaaacctcctggataccgcatttggaatccagtagctgccatttatatatatggcatcctatatgttgcatttgtggattattgttcatggttatatatgctacccatattactccagtctttctagtataaagaggtttaatattccctccattcctttttagttgtcgcgttttagtcgaaaaataatctaacggacgacaaatatttgagaacggaggtagtatataacagggagcagtatgaattttgtttttatgtgtttgagagtatatatgtaatcgagagaaagaaatgattgaattgcgatttctttcattgattgatcttttat

SEQ ID NO: 4496 - DNA, 1344 bp, Zea Mays
gcaggccgcaaacccaggaaggcgccaggtgccctgtcgcagcagttcgcactccgcagggcaccaccgtccacctccaccgccaccgatcggtagcaacgcgcaccaccgcgtcgtcgtacggcagcacacggaaagagagagagagagagagagagagagagaggaatgggcgaccacgagggtcacggggtcgatttcgagaagaaggccgatcagaagctctccggctggggcctcttcggcaataagtacgaggaagccgccgacctcctcgacagggctggcagcttcttcaaactcgcgaagaactggagcagagcggctgcggtatacaaaaagattgcagattgtcatttgcaggaaatcagtagactgaacatggctgcaagatacagcaaggatatcggtgaaatctatctgcaagaacaagatttagagaatgccgcagtctacctgaatcgcgctgctgatctttttgatagtgagggacaatcctctcaggcaaacagcatgacacagaaaatcgctgaaatatatgctcagctggaaaagtaccagaaagcaaccgagctctttgaagaaattgctcgtaaatcaataaacaataaccttctcaagtacggtgtcagaggcactcttcttaatgcgggcatttgccaactttgtagaggtgatgttgttgctataaataattcattggagcgctatcaggacattgacccaaccttctcagggacacgcgaatacaagcttttggcagaccttgcagcctctacggatgaaggagacgttggcaagtttactgatgcagtaaaggagtttgacagcatgacacgcctggatccttggaaaacaactctccttctgaaggcaaagaacgagttgaagaaaaaggaggaggatgaggatgatctaacctaggctctgttccacaaaaggtttcatgatttcgttgaggatgccgtgaaatcattacacaagattgtttgatataagtatggatatacaaaacctcctggataccgcatttggaatccagtagctgccatttatatatatggcatcctatatgttgcatttgtggattattgttcatggttatatatgctacccatattactccagtctttctagtataaagaggtttaatattccctccattcctttttagttgtcgcgttttagtcgaaaaataatctaacggacgacaaatatttgagaacggaggtagtatataacagggagcagtatgaattttgtttttatgtgtttgagagtatatatgtaatcgagagaaagaaatgattgaattgcgatttctttcattgattgatcttttat

SEQ ID NO: 4497 - DNA, 1856 bp, Zea Mays
gcaggccgcaaacccaggaaggcgccaggtgccctgtcgcagcagttcgcactccgcagggcaccaccgtccacctccaccgccaccgatcggtagcaacgcgcaccaccgcgtcgtcgtacggcagcacacggaaagagagagagagagagagagagagagagaggaatgggcgaccacgagggtcacggggtcgatttcgagaagaaggccgatcagaagctctccggctggggcctcttcggcaataagtacgaggaagccgccgacctcctcgacagggctggcagcttcttcaaactcgcgaagaactggagcagagcggctgcggtatacaaaaagattgcagattgtcatttgcagggggataacaagcacgatgctgcctctgcttatgttgaggcagcaaactgctacaagaagttctccctgcaaggaaatcagtagactgaacatggctgcaagatacagcaaggatatcggtgaaatctatctgcaagaacaagatttagagaatgccgcagtctacctgaatcgcgctgctgatctttttgatagtgagggacaatcctctcaggcaaacagcatgacacagaaaatcgctgaaatatatgctcagctggaaaagtaccagaaagcaaccgagctctttgaagaaattgctcgtaaatcaataaacaataaccttctcaagtacggtgtcagaggcactcttcttaatgcgggcatttgccaactttgtagaggtgatgttgttgctataaataattcattggagcgctatcaggacattgacccaaccttctcagggacacgcgaatacaagcttttggcagtaccatacaatactcacattccttttgttcactgtgttcatcatgatacgtagcccttgattatacattgctagtttttttttgaagaaaaatggcaggagctctgccttgcattatagtagattgaaaagaacataaagttcatctccaaagggcaatgagaaataccacgcacaccagaactaacacagattacaaacgcccatcgccgaaggactaaactgctcccagtacaagtttttaaaagataaacatcgcttgcttgaattccataatttttttaacagtgtagcacagttcaattattgaacatgaactatctaaaataaaacccaaaaaaggctctgtcagtcctagatgttcacgtgttcgagaaaaagaagtcctagatgttttgtttccttagctgacttggctgaactgaaatttgcatggcaggaccttgcagcctctacggatgaaggagacgttggcaagtttactgatgcagtaaaggagtttgacagcatgacacgcctggatccttggaaaacaactctccttctgaaggcaaagaacgagttgaagaaaaaggaggaggatgaggatgatctaacctaggctctgttccacaaaaggtttcatgatttcgttgaggatgccgtgaaatcattacacaagattgtttgatataagtatggatatacaaaacctcctggataccgcatttggaatccagtagctgccatttatatatatggcatcctatatgttgcatttgtggattattgttcatggttatatatgctacccatattactccagtctttctagtataaagaggtttaatattccctccattcctttttagttgtcgcgttttagtcgaaaaataatctaacggacgacaaatatttgagaacggaggtagtatataacagggagcagtatgaattttgtttttatgtgtttgagagtatatatgtaatcgagagaaagaaatgattgaattgcgatttctttcattgattgatcttttat

SEQ ID NO: 4498 - DNA, 1875 bp, Zea Mays
gcaggccgcaaacccaggaaggcgccaggtgccctgtcgcagcagttcgcactccgcagggcaccaccgtccacctccaccgccaccgatcggtagcaacgcgcaccaccgcgtcgtcgtacggcagcacacggaaagagagagagagagagagagagagagagaggaatgggcgaccacgagggtcacggggtcgatttcgagaagaaggccgatcagaagctctccggctggggcctcttcggcaataagtacgaggaagccgccgacctcctcgacagggctggcagcttcttcaaactcgcgaagaactggagcagagcggctgcggtatacaaaaagattgcagattgtcatttgcagggggataacaagcacgatgctgcctctgcttatgttgaggcagcaaactgctacaagaagttctccctgcaagatgctgcacaagcacttaacagtgccgttaatcttttccaggaaatcagtagactgaacatggctgcaagatacagcaaggatatcggtgaaatctatctgcaagaacaagatttagagaatgccgcagtctacctgaatcgcgctgctgatctttttgatagtgagggacaatcctctcaggcaaacagcatgacacagaaaatcgctgaaatatatgctcagctggaaaagtaccagaaagcaaccgagctctttgaagaaattgctcgtaaatcaataaacaataaccttctcaagtacggtgtcagaggcactcttcttaatgcgggcatttgccaactttgtagaggtgatgttgttgctataaataattcattggagcgctatcagggacacgcgaatacaagcttttggcagtaccatacaatactcacattccttttgttcactgtgttcatcatgatacgtagcccttgattatacattgctagtttttttttgaagaaaaatggcaggagctctgccttgcattatagtagattgaaaagaacataaagttcatctccaaagggcaatgagaaataccacgcacaccagaactaacacagattacaaacgcccatcgccgaaggactaaactgctcccagtacaagtttttaaaagataaacatcgcttgcttgaattccataatttttttaacagtgtagcacagttcaattattgaacatgaactatctaaaataaaacccaaaaaaggctctgtcagtcctagatgttcacgtgttcgagaaaaagaagtcctagatgttttgtttccttagctgacttggctgaactgaaatttgcatggcaggaccttgcagcctctacggatgaaggagacgttggcaagtttactgatgcagtaaaggagtttgacagcatgacacgcctggatccttggaaaacaactctccttctgaaggcaaagaacgagttgaagaaaaaggaggaggatgaggatgatctaacctaggctctgttccacaaaaggtttcatgatttcgttgaggatgccgtgaaatcattacacaagattgtttgatataagtatggatatacaaaacctcctggataccgcatttggaatccagtagctgccatttatatatatggcatcctatatgttgcatttgtggattattgttcatggttatatatgctacccatattactccagtctttctagtataaagaggtttaatattccctccattcctttttagttgtcgcgttttagtcgaaaaataatctaacggacgacaaatatttgagaacggaggtagtatataacagggagcagtatgaattttgtttttatgtgtttgagagtatatatgtaatcgagagaaagaaatgattgaattgcgatttctttcattgattgatcttttat

SEQ ID NO: 4499 - DNA, 1890 bp, Zea Mays
gcaggccgcaaacccaggaaggcgccaggtgccctgtcgcagcagttcgcactccgcagggcaccaccgtccacctccaccgccaccgatcggtagcaacgcgcaccaccgcgtcgtcgtacggcagcacacggaaagagagagagagagagagagagagagagaggaatgggcgaccacgagggtcacggggtcgatttcgagaagaaggccgatcagaagctctccggctggggcctcttcggcaataagtacgaggaagccgccgacctcctcgacagggctggcagcttcttcaaactcgcgaagaactagcggctgcggtatacaaaaagattgcagattgtcatttgcagggggataacaagcacgatgctgcctctgcttatgttgaggcagcaaactgctacaagaagttctccctgcaagatgctgcacaagcacttaacagtgccgttaatcttttccaggaaatcagtagactgaacatggctgcaagatacagcaaggatatcggtgaaatctatctgcaagaacaagatttagagaatgccgcagtctacctgaatcgcgctgctgatctttttgatagtgagggacaatcctctcaggcaaacagcatgacacagaaaatcgctgaaatatatgctcagctggaaaagtaccagaaagcaaccgagctctttgaagaaattgctcgtaaatcaataaacaataaccttctcaagtacggtgtcagaggcactcttcttaatgcgggcatttgccaactttgtagaggtgatgttgttgctataaataattcattggagcgctatcaggacattgacccaaccttctcagggacacgcgaatacaagcttttggcagtaccatacaatactcacattccttttgttcactgtgttcatcatgatacgtagcccttgattatacattgctagtttttttttgaagaaaaatggcaggagctctgccttgcattatagtagattgaaaagaacataaagttcatctccaaagggcaatgagaaataccacgcacaccagaactaacacagattacaaacgcccatcgccgaaggactaaactgctcccagtacaagtttttaaaagataaacatcgcttgcttgaattccataatttttttaacagtgtagcacagttcaattattgaacatgaactatctaaaataaaacccaaaaaaggctctgtcagtcctagatgttcacgtgttcgagaaaaagaagtcctagatgttttgtttccttagctgacttggctgaactgaaatttgcatggcaggaccttgcagcctctacggatgaaggagacgttggcaagtttactgatgcagtaaaggagtttgacagcatgacacgcctggatccttggaaaacaactctccttctgaaggcaaagaacgagttgaagaaaaaggaggaggatgaggatgatctaacctaggctctgttccacaaaaggtttcatgatttcgttgaggatgccgtgaaatcattacacaagattgtttgatataagtatggatatacaaaacctcctggataccgcatttggaatccagtagctgccatttatatatatggcatcctatatgttgcatttgtggattattgttcatggttatatatgctacccatattactccagtctttctagtataaagaggtttaatattccctccattcctttttagttgtcgcgttttagtcgaaaaataatctaacggacgacaaatatttgagaacggaggtagtatataacagggagcagtatgaattttgtttttatgtgtttgagagtatatatgtaatcgagagaaagaaatgattgaattgcgatttctttcattgattgatcttttat

SEQ ID NO: 4500 - DNA, 1212 bp, Zea Mays
acgccatgcttgccatatagacacgcgcgacgcacactatcagcatgtccccaacacacataccaaacaaggtgaactagctaagtggtcgagaattcccctctttctctcacggccatggagaacaccaagccatgcagtgacttcgggatgatcatggctgatctggagtccgagaacccggttactaatgtggctgccatgaatcgtgcctcggagttgattgctgaaggtcaccgccggtgtgcgccgctgctgtctggatcatctccgtcttctctgaatcaccggtagaggtcgacgacgccatcgctgcactctcgtgcctcttcaaggacctgctggaccggcgaaaaatcgagaaacagatacttgggagtgaaatggaggacgaatacgtactccctactgaatattatggcgtcactactgcacgaggtgcgcagggagagcgccagcagcggccatggctggtggagatggacgaactgctgtttgtgcgcatagggctcacacggcaggcagatgggagctacgacattgcctcgagttccaagcagagcagtagtagtgctcgtcacgcagataggccgccgtcgttggagcttacagacaatctagcattccttgtgcattctggagattccctcttggcggatttcgtgcaggacatgctgtccgagcttgtagtgaaggcccagagttgcagtgagtccgtttgaactgatggtgatttgaaggtctcaagcacaatggctgtactgattcgttggctacttttcttccttacagctagtagtgcttaaaattaggaatggatcggagtagtagttctacatccatacctcaatatgcatgcagaatcatgtttcttttttgagagagagagaggcaaggaaaaaaatgtttgttctatgttctacttctattactattaatagtactttttatttaacttttttgccatctatttgtctgatttgtgttggtttcatctatagtctgacggtctgacccaacatacatgggatcaaaaggccactttgtgttggtcatagtgtttagtgttttgggggaacatccaaatatttttgtactcttaacggcttgtgttagaaaaatatgaaatgtttaatggaacaaggatcttttatgcgtagtaggttcatattcatcaagttataattcatttaagtaaggctgagttcattt

SEQ ID NO: 4501 - DNA, 1973 bp, Zea Mays
aaacaaggtgaactagctaagtggtcgagaattcccctctttctctcacggccatggagaacaccaagccatgcagtgacttcgggatgatcatggctgatctggagtccgagaacccggttactaatgtggctgccatgaatcgtgcctcggagttgattgctgaagggaggccatcaccagcaaccgcgtgaacatagagtccccagctcgcggtgaggctctccatgccatctggtgctgttttatggacgaaggccttcgctgtcttcgtcagcacgaaagtatggtgaggatgtggacagtccaggatcaactggctgccgtcaaaacgctatgtgccaccttccgtcgctcgccggtaaacatcaagaacataaggtgtgtcacaacctttgccgcactgatgctgtcaccctacaccaccgtggcgcgcgcttgtgaagacgccttgctctctttgccctctattccaggatttgcatttgccattgcaagagcctactgccatattatcatagctatgccaccggagtcatcgcctgagataagtagcgcggctgcggttctgggcaggctgaaccagattagcatggccacggtggagggcgaccaccgagggttcggtgatctggccatggatgtgctaggggatgctttagcaaatcgcaatcttcctgttcggaagaaggctctgaacctggtggcgagcctcctcaccccaaggaacgtctgcgatgttctagggctcctcaacagtgagctggtcgtggcagcctccgccaacctccagatcgagtaccgacagatgctggagaaggcgattagagagtgccattctgctcatccggggagtatcctagaattcacgctagatcccaagtatgccgtgttcacggattgtatccgctacaccatggatatcatgaacagcaaccccttgctgcgagtccagcttctgaaaggtcttctaaggatgctccgccatgtcaggtcaccgccggtgtgcgccgctgctgtctggatcatctccgtcttctctgaatcaccggtagaggtcgacgacgccatcgctgcactctcgtgcctcttcaaggacctgctggaccggcgaaaaatcgagaaacagatacttgggagtgaaatggaggacgaatacgtactccctactgaatattatggcgtcactactgcacgaggtgcgcagggagagcgccagcagcggccatggctggtggagatggacgaactgctgtttgtgcgcatagggctcacacggcaggcagatgggagctacgacattgcctcgagttccaagcagagcagtagtagtgctcgtcacgcagataggccgccgtcgttggagcttacagacaatctagcattccttgtgcattctggagattccctcttggcggatttcgtgcaggacatgctgtccgagcttgtagtgaaggcccagagttgcagtgagtccgtttgaactgatggtgatttgaaggtctcaagcacaatggctgtactgattcgttggctacttttcttccttacagctagtagtgcttaaaattaggaatggatcggagtagtagttctacatccatacctcaatatgcatgcagaatcatgtttcttttttgagagagagagaggcaaggaaaaaaatgtttgttctatgttctacttctattactattaatagtactttttatttaacttttttgccatctatttgtctgatttgtgttggtttcatctatagtctgacggtctgacccaacatacatgggatcaaaaggccactttgtgttggtcatagtgtttagtgttttgggggaacatccaaatatttttgtactcttaacggcttgtgttagaaaaatatgaaatgtttaatggaacaaggatcttttatgcgtagtaggttcatattcatcaagttataattcatttaagtaaggctgagttcattt

SEQ ID NO: 4502 - DNA, 1481 bp, Zea Mays
aacaaggtgaactagctaagtggtcgagaattcccctctttctctcacggccatggagaacaccaagccatgcagtgacttcgggatgatcatggctgatctggagtccgagaacccggttactaatgtggctgccatgaatcgtgcctcggagttgattgctgaaggtaaactcccggaaccccagcttctgcgccgcctaatctcttgtcttgcttccaatctggagaagcctgaccatgaatctgccgtcaagaggaaggttcacttaactctagaggcaatcagggaggccatcaccagcaaccgcgtgaacatagagtccccagctcgcggtgaggctctccatgccatctggtgctgttttatggacgaaggccttcgctgtcttcgtcagcacgaaagtatggtgaggatgtggacagtccaggatcaactggctgccgtcaaaacgctatgtgccaccttccgtcgctcgccggtaaacatcaagaacataaggtcaccgccggtgtgcgccgctgctgtctggatcatctccgtcttctctgaatcaccggtagaggtcgacgacgccatcgctgcactctcgtgcctcttcaaggacctgctggaccggcgaaaaatcgagaaacagatacttgggagtgaaatggaggacgaatacgtactccctactgaatattatggcgtcactactgcacgaggtgcgcagggagagcgccagcagcggccatggctggtggagatggacgaactgctgtttgtgcgcatagggctcacacggcaggcagatgggagctacgacattgcctcgagttccaagcagagcagtagtagtgctcgtcacgcagataggccgccgtcgttggagcttacagacaatctagcattccttgtgcattctggagattccctcttggcggatttcgtgcaggacatgctgtccgagcttgtagtgaaggcccagagttgcagtgagtccgtttgaactgatggtgatttgaaggtctcaagcacaatggctgtactgattcgttggctacttttcttccttacagctagtagtgcttaaaattaggaatggatcggagtagtagttctacatccatacctcaatatgcatgcagaatcatgtttcttttttgagagagagagaggcaaggaaaaaaatgtttgttctatgttctacttctattactattaatagtactttttatttaacttttttgccatctatttgtctgatttgtgttggtttcatctatagtctgacggtctgacccaacatacatgggatcaaaaggccactttgtgttggtcatagtgtttagtgttttgggggaacatccaaatatttttgtactcttaacggcttgtgttagaaaaatatgaaatgtttaatggaacaaggatcttttatgcgtagtaggttcatattcatcaagttataattcatttaagtaaggctgagttcattt

SEQ ID NO: 4503 - DNA, 906 bp, Zea Mays
ccaactcaacgcattgcgagaacaggcccgccgccacgccgcccaggtaggttttgtttgggatctcaccatttcttccttgtctctgtctcaacacggcgccgccgcttctgccgccgggagccgagcccaagcctaagcgaaagccatggcgattggttctctgatcgcctctactttcgccagatctagccatgccctccccgctgccgccgcttcggccatctctcaggctcccagatcccagcacaccgcatctcctctactctccggccttggagcagcggctcgtgctttcagctcaagggctctatggaagggagcattcgttgacgctttcctgtctagaattaagaagaacagagaaaatatgaatggcaagaagatttggtctcgtagatcctctattttgccggaatttgttggttcctctgtgctcatttacaatgggaaaactcatgtccggtgcaagatcactgaagggaaggttggccataaatttggagagtttgcttttacacggagacgaaggccccatcgaacaatgacaggaaagggaaatcaaggaaaggcaagaaagtaaaaggagaaatgtgcatgaaaggtggttttaaggatagcatgatgaggcagtagttgacgaacaagaacatgaataaccagaaattatgatctggactgctttactgctttttcttagaccaataattgcaggagaatgttagttcatcttacttaaagattcgtccgtgtactttgttcctatctacttcctgcttacttttgctgttcacctcgtggccactcaaatagcagaagttcccgacaaactgaagacaatcaataatactaatttatgcaaacagctatgatagacgccgtatgtttgaaggaattgataagttc

SEQ ID NO: 4504 - DNA, 2338 bp, Zea Mays
tgggctcagtccaccacggctctgttaatgattttctggagtctggacggaagccgtagccgatagggaagtattcgtgttcgtgtccgactccagtggacaaggcatggcggggagaggcggcggcggcaaaggcgccgcagggaggatgatgtcgctgcaggaattcgtgtcctgcatgcagccgctcatcgatctcgagaaggcggcggagatatcggcggagtccgagacgagcgctaagagcctggagaggagggggtgcgtcattgccaacctcaagtgcactgatgcccagaatagacgggactgatggggaagacgctcctggagttccaacccaacaaaggcgacgttctcccgtctcacaagtttggaacacatgatgtggttgccctgaagccaaataaggcagatgctggatctgcttcacttggtcaaggtgtagtttatcgcttaaaggattcttccattactgttgcttttgatgatattcctgaagatggcttaaacagccctctgcgtcttgagaagcttgcaaatgaggtcacttatcgcaggatgaaggatgcactaattgaacttagcaaggctgtccaaacaggaccttgtgcaaaccttgttcctgttttatttggagagaaggcacccatgcgctccaaggatgctatgaaattcagtccattcaacaagaacttggatgattcacagaaagaggctatttcgaaggctcttggatcaagggatgttttcttgcttcacggacctcctggaactgggaaaacaacaactattattgagataatattgcaggaggtcaagcgtggatcaaagattcttgcctgtgctgcttccaatattgctgtggataatattgttgagcgacttgcacgatacagaacaaaattggtgaggttagggcaccctgctcgtttactgcctcaagtgctcgacagcgctcttgatgcacaggttttacgagctgataatagtagcttggcaggagacattcgcaaggaaatgaaggtgctcaatagcaaattgctgaaggctaaagataggaacactaaacgggacatcaggaaagagctcaaaacgcttgcaaaagaggagagaaaacgacagcagcttgcagtcactgatgtactgaaaaatgcagatgttgtgctgaccactctgactggtgcatcttcgaaaaagttaaacggaattacatttgatttggttgttattgatgaagctgcccaggcacttgaggtggcatgctggatagccttgttgaaagggccgagatgtattcttgctggagaccatcttcaacttcctccaacaattcaaagtgttgaggctgaaaagaaggggatgggaaagacactctttgaacgccttactgaagcttatggagaggaaatcacatccatgctcactgtgcagtacagaatgcacgagcacattatgagctggtcatctaaagaactttacaataataagatcaaagcacattctagtgttgctgggcatatgctctatgatctagaagaagtcactagatcttcttcaacagaaccaactattgtactcattgacactacagggtgtgatatggaagaagtaaaagatgaagaggagagcaccatgaatgagggcgaggcagcagtatccattgctcatgccaagttgcttgttgagagtggcgttaatgcttctgatattggaataattacgccttacgctgcacaggtaacctgcttgaagatgatgagaaacaaagatgccaagttgaaagatttagagatatctacagttgatgggtttcaaggccgggagaaagaagccatcatcatttctatggtccggtctaactcaaagaaagaggtggggttcttgagcgatcacaggcggatgaacgtggcggtgacgcgagccaggaggcagtgctgcctggtgtgcgacgtggagaccgtgagcagcgacaggttcctgaaacgcttggtcgaatacttcgaggagaacggggagtacttgagtgcttcagaataccagagcagctgactggcgtcgatcagatccattcagctcttcttctagtggctcgtggtggcatctggctggcatgtccgtggagcaagtggataggatccgcatggagtcttggagaacacaatatcaagctttggttcctagatatctcagcttttcttttcttttctcttggtgaacgcataaatgatgtattgttgtgacgttgccaatgccatgggaatgagatctttaacaaaacaaaaaacaaaaaaacaagagggcagtggagaatgtgctgtggcatagtgtgtgtgct

SEQ ID NO: 4505 - DNA, 2651 bp, Zea Mays
tgggctcagtccaccacggctctgttaatgattttctggagtctggacggaagccgtagccgatagggaagtattcgtgttcgtgtccgactccagtggacaaggcatggcggggagaggcggcggcggcaaaggcgccgcagggaggatgatgtcgctgcaggaattcgtgtcctgcatgcagccgctcatcgatctcgagaaggcggcggagatatcggcggagtccgagacgagcgctaagagcctggagaggagggggtgcgtcattgccaacctcaagtgcactgatgcccagacgggactgatggggaagacgctcctggagttccaacccaacaaaggcgacgttctcccgtctcacaagtttggaacacatgatgtggttgccctgaagccaaataaggcagatgctggatctgcttcacttggtcaaggtgtagtttatcgcttaaaggattcttccattactgttgcttttgatgatattcctgaagatggcttaaacagccctctgcgtcttgagaagcttgcaaatgaggtcacttatcgcaggatgaaggatgcactaattgaacttagcaaggctgtccaaacaggaccttgtgcaaaccttgttcctgttttatttggagagaaggcacccatgcgctccaaggatgctatgaaattcagtccattcaacaagaacttggatgattcacagaaagaggctatttcgaaggctcttggatcaagggatgttttcttgcttcacggacctcctggaactgggaaaacaacaactattattgagataatattgcaggaggtcaagcgtggatcaaagattcttgcctgtgctgcttccaatattgctgtggataatattgttgagcgacttgcacgatacagaacaaaattggtgaggttagggcaccctgctcgtttactgcctcaagtgctcgacagcgctcttgatgcacaggttttacgagctgataatagtagcttggcaggagacattcgcaaggaaatgaaggtgctcaatagcaaattgctgaaggctaaagataggaacactaaacgggacatcaggaaagagctcaaaacgcttgcaaaagaggagagaaaacgacagcagcttgcagtcactgatgtactgaaaaatgcagatgttgtgctgaccactctgactggtgcatcttcgaaaaagttaaacggaattacatttgatttggttgttattgatgaagctgcccaggcacttgaggtggcatgctggatagccttgttgaaagggccgagatgtattcttgctggagaccatcttcaacttcctccaacaattcaaagtgttgaggctgaaaagaaggggatgggaaagacactctttgaacgccttactgaagcttatggagaggaaatcacatccatgctcactgtgcagtacagaatgcacgagcacattatgagctggtcatctaaagaactttacaataataagatcaaagcacattctagtgttgctgggcatatgctctatgatctagaagaagtcactagatcttcttcaacagaaccaactattgtactcattgacactacagggtgtgatatggaagaagtaaaagatgaagaggagagcaccatgaatgagggcgaggcagcagtatccattgctcatgccaagttgcttgttgagagtggcgttaatgcttctgatattggaataattacgccttacgctgcacaggtttttggtcccttagactccctatgcatattcaagataatagctaattttaccagtcatgcactcatgcctgcagcacatgatcttctggtgaataatcatgctttatacttcctgtattgtcgtcatgactccctatgcatatgtctacattcatttgaatgtagacggaagaaaatagggctagaaaatatgtctacattttcttgcaattgagcttttaattcatctggttgttttgcatttatttatggttggcttcttgagggcttcacctagttctgaaggcctgaattattgaatggctcaataccataggtaacctgcttgaagatgatgagaaacaaagatgccaagttgaaagatttagagatatctacagttgatgggtttcaaggccgggagaaagaagccatcatcatttctatggtccggtctaactcaaagaaagaggtggggttcttgagcgatcacaggcggatgaacgtggcggtgacgcgagccaggaggcagtgctgcctggtgtgcgacgtggagaccgtgagcagcgacaggttcctgaaacgcttggtcgaatacttcgaggagaacggggagtacttgagtgcttcagaataccagagcagctgactggcgtcgatcagatccattcagctcttcttctagtggctcgtggtggcatctggctggcatgtccgtggagcaagtggataggatccgcatggagtcttggagaacacaatatcaagctttggttcctagatatctcagcttttcttttcttttctcttggtgaacgcataaatgatgtattgttgtgacgttgccaatgccatgggaatgagatctttaacaaaacaaaaaacaaaaaaacaagagggcagtggagaatgtgctgtggcatagtgtgtgtgct

SEQ ID NO: 4506 - DNA, 2275 bp, Zea Mays
tgggctcagtccaccacggctctgttaatgattttctggagtctggacggaagccgtagccgatagggaagtattcgtgttcgtgtccgactccagtggacaaggcatggcggggagaggcggcggcggcaaaggcgccgcagggaggatgatgtcgctgcaggaattcgtgtcctgcatgcagccgctcatcgatctcgagaaggcggcggagatatcggcggagtccgagacgagcgctaagagcctggagaggagggggtgcgtcattgccaacctcaagtgcactgatgcccagacgggactgatggggaagacgctcctggagttccaacccaacaaaggcgacgttctcccgtctcacaagtttggaacacatgatgtggttgccctgaagccaaataaggcagatgctggatctgcttcacttggtcaaggtgtagtttatcgcttaaaggattcttccattactgttgcttttgatgatattcctgaagatggcttaaacagccctctgcgtcttgagaagcttgcaaatgaggaccttgtgcaaaccttgttcctgttttatttggagagaaggcacccatgcgctccaaggatgctatgaaattcagtccattcaacaagaacttggatgattcacagaaagaggctatttcgaaggctcttggatcaagggatgttttcttgcttcacggacctcctggaactgggaaaacaacaactattattgagataatattgcaggaggtcaagcgtggatcaaagattcttgcctgtgctgcttccaatattgctgtggataatattgttgagcgacttgcacgatacagaacaaaattggtgaggttagggcaccctgctcgtttactgcctcaagtgctcgacagcgctcttgatgcacaggttttacgagctgataatagtagcttggcaggagacattcgcaaggaaatgaaggtgctcaatagcaaattgctgaaggctaaagataggaacactaaacgggacatcaggaaagagctcaaaacgcttgcaaaagaggagagaaaacgacagcagcttgcagtcactgatgtactgaaaaatgcagatgttgtgctgaccactctgactggtgcatcttcgaaaaagttaaacggaattacatttgatttggttgttattgatgaagctgcccaggcacttgaggtggcatgctggatagccttgttgaaagggccgagatgtattcttgctggagaccatcttcaacttcctccaacaattcaaagtgttgaggctgaaaagaaggggatgggaaagacactctttgaacgccttactgaagcttatggagaggaaatcacatccatgctcactgtgcagtacagaatgcacgagcacattatgagctggtcatctaaagaactttacaataataagatcaaagcacattctagtgttgctgggcatatgctctatgatctagaagaagtcactagatcttcttcaacagaaccaactattgtactcattgacactacagggtgtgatatggaagaagtaaaagatgaagaggagagcaccatgaatgagggcgaggcagcagtatccattgctcatgccaagttgcttgttgagagtggcgttaatgcttctgatattggaataattacgccttacgctgcacaggtaacctgcttgaagatgatgagaaacaaagatgccaagttgaaagatttagagatatctacagttgatgggtttcaaggccgggagaaagaagccatcatcatttctatggtccggtctaactcaaagaaagaggtggggttcttgagcgatcacaggcggatgaacgtggcggtgacgcgagccaggaggcagtgctgcctggtgtgcgacgtggagaccgtgagcagcgacaggttcctgaaacgcttggtcgaatacttcgaggagaacggggagtacttgagtgcttcagaataccagagcagctgactggcgtcgatcagatccattcagctcttcttctagtggctcgtggtggcatctggctggcatgtccgtggagcaagtggataggatccgcatggagtcttggagaacacaatatcaagctttggttcctagatatctcagcttttcttttcttttctcttggtgaacgcataaatgatgtattgttgtgacgttgccaatgccatgggaatgagatctttaacaaaacaaaaaacaaaaaaacaagagggcagtggagaatgtgctgtggcatagtgtgtgtgct

SEQ ID NO: 4507 - DNA, 2229 bp, Zea Mays
tgggctcagtccaccacggctctgttaatgattttctggagtctggacggaagccgtagccgatagggaagtattcgtgttcgtgtccgactccagtggacaaggcatggcggggagaggcggcggcggcaaaggcgccgcagggaggatgatgtcgctgcaggaattcgtgtcctgcatgcagccgctcatcgatctcgagaaggcggcggagatatcggcggagtccgagacgagcgctaagagcctggagaggagggggtgcgtcattgccaacctcaagtgcactgatgcccagacgggactgatggggaagacgctcctggagttccaacccaacaaaggcgacgttctcccgtctcacaagtttggaacacatgatgtggttgccctgaagccaaataaggcagatgctggatctgcttcacttggtcaaggtgtagtttatcgcttaaaggattcttccattactgttgcttttgatgatattcctgaagatggcttaaacagccctctgcgtcttgagaagcttgcaaatgaggtcacttatcgcaggatgaaggatgcactaattgaacttagcaaggctgtccaaacaggaccttgtgcaaaccttgttcctgttttatttggagagaaggcacccatgcgctccaaggatgctatgaaattcagtccattcaacaagaacttggatgattcacagaaagaggctatttcgaaggctcttggatcaagggatgttttcttgcttcacggacctcctggaactgggaaaacaacaactattattgagataatattgcaggaggtcaagcgtggatcaaagattcttgcctgtgctgcttccaatattgctgtggataatattgttgagcgacttgcacgatacagaacaaaattggtgaggttagggcaccctgctcgtttactgcctcaagtgctcgacagcgctcttgatgcacaggttttacgagctgataatagtagcttggcaggagacattcgcaaggaaatgaaggtgctcaatagcaaattgctgaaggctaaagataggaacactaaacgggacatcaggaaagagctcaaaacgcttgcaaaagaggagagaaaacgacagcagcttgcagtcactgatgtactgaaaaatgcagatgttgtgctgaccactctgactggtgcatcttcgaaaaagttaaacggaattacatttgatttggttgttattgatgaagctgcccaggcacttgaggtggcatgctggatagccttgttgaaagggccgagatgtattcttgctggagaccatcttcaacttcctccaacaattcaaagtgttgaggctgaaaagaaggggatgggaaagacactctttgaacgccttactgaagcttatggagaggaaatcacatccatgctcactgtgcagtacagaatgcacgagcacattatgagctggtcatctaaagaactttacaataataaggtgtgatatggaagaagtaaaagatgaagaggagagcaccatgaatgagggcgaggcagcagtatccattgctcatgccaagttgcttgttgagagtggcgttaatgcttctgatattggaataattacgccttacgctgcacaggtaacctgcttgaagatgatgagaaacaaagatgccaagttgaaagatttagagatatctacagttgatgggtttcaaggccgggagaaagaagccatcatcatttctatggtccggtctaactcaaagaaagaggtggggttcttgagcgatcacaggcggatgaacgtggcggtgacgcgagccaggaggcagtgctgcctggtgtgcgacgtggagaccgtgagcagcgacaggttcctgaaacgcttggtcgaatacttcgaggagaacggggagtacttgagtgcttcagaataccagagcagctgactggcgtcgatcagatccattcagctcttcttctagtggctcgtggtggcatctggctggcatgtccgtggagcaagtggataggatccgcatggagtcttggagaacacaatatcaagctttggttcctagatatctcagcttttcttttcttttctcttggtgaacgcataaatgatgtattgttgtgacgttgccaatgccatgggaatgagatctttaacaaaacaaaaaacaaaaaaacaagagggcagtggagaatgtgctgtggcatagtgtgtgtgct

SEQ ID NO: 4508 - DNA, 2324 bp, Zea Mays
tgggctcagtccaccacggctctgttaatgattttctggagtctggacggaagccgtagccgatagggaagtattcgtgttcgtgtccgactccagtggacaaggcatggcggggagaggcggcggcggcaaaggcgccgcagggaggatgatgtcgctgcaggaattcgtgtcctgcatgcagccgctcatcgatctcgagaaggcggcggagatatcggcggagtccgagacgagcgctaagagcctggagaggagggggtgcgtcattgccaacctcaagtgcactgatgcccagaatagacgggactgatggggaagacgctcctggagttccaacccaacaaaggcgacgttctcccgtctcacaagtttggaacacatgatgtggttgccctgaagccaaataaggcagatgctggatctgcttcacttggtcaaggtgtagtttatcgcttaaaggattcttccattactgttgcttttgatgatattcctgaagatggcttaaacagccctctgcgtcttgagaagcttgcaaatgaggatgaaggatgcactaattgaacttagcaaggctgtccaaacaggaccttgtgcaaaccttgttcctgttttatttggagagaaggcacccatgcgctccaaggatgctatgaaattcagtccattcaacaagaacttggatgattcacagaaagaggctatttcgaaggctcttggatcaagggatgttttcttgcttcacggacctcctggaactgggaaaacaacaactattattgagataatattgcaggaggtcaagcgtggatcaaagattcttgcctgtgctgcttccaatattgctgtggataatattgttgagcgacttgcacgatacagaacaaaattggtgaggttagggcaccctgctcgtttactgcctcaagtgctcgacagcgctcttgatgcacaggttttacgagctgataatagtagcttggcaggagacattcgcaaggaaatgaaggtgctcaatagcaaattgctgaaggctaaagataggaacactaaacgggacatcaggaaagagctcaaaacgcttgcaaaagaggagagaaaacgacagcagcttgcagtcactgatgtactgaaaaatgcagatgttgtgctgaccactctgactggtgcatcttcgaaaaagttaaacggaattacatttgatttggttgttattgatgaagctgcccaggcacttgaggtggcatgctggatagccttgttgaaagggccgagatgtattcttgctggagaccatcttcaacttcctccaacaattcaaagtgttgaggctgaaaagaaggggatgggaaagacactctttgaacgccttactgaagcttatggagaggaaatcacatccatgctcactgtgcagtacagaatgcacgagcacattatgagctggtcatctaaagaactttacaataataagatcaaagcacattctagtgttgctgggcatatgctctatgatctagaagaagtcactagatcttcttcaacagaaccaactattgtactcattgacactacagggtgtgatatggaagaagtaaaagatgaagaggagagcaccatgaatgagggcgaggcagcagtatccattgctcatgccaagttgcttgttgagagtggcgttaatgcttctgatattggaataattacgccttacgctgcacaggtaacctgcttgaagatgatgagaaacaaagatgccaagttgaaagatttagagatatctacagttgatgggtttcaaggccgggagaaagaagccatcatcatttctatggtccggtctaactcaaagaaagaggtggggttcttgagcgatcacaggcggatgaacgtggcggtgacgcgagccaggaggcagtgctgcctggtgtgcgacgtggagaccgtgagcagcgacaggttcctgaaacgcttggtcgaatacttcgaggagaacggggagtacttgagtgcttcagaataccagagcagctgactggcgtcgatcagatccattcagctcttcttctagtggctcgtggtggcatctggctggcatgtccgtggagcaagtggataggatccgcatggagtcttggagaacacaatatcaagctttggttcctagatatctcagcttttcttttcttttctcttggtgaacgcataaatgatgtattgttgtgacgttgccaatgccatgggaatgagatctttaacaaaacaaaaaacaaaaaaacaagagggcagtggagaatgtgctgtggcatagtgtgtgtgct

SEQ ID NO: 4509 - DNA, 2319 bp, Zea Mays
tgggctcagtccaccacggctctgttaatgattttctggagtctggacggaagccgtagccgatagggaagtattcgtgttcgtgtccgactccagtggacaaggcatggcggggagaggcggcggcggcaaaggcgccgcagggaggatgatgtcgctgcaggaattcgtgtcctgcatgcagccgctcatcgatctcgagaaggcggcggagatatcggcggagtccgagacgagcgctaagagcctggagaggagggggtgcgtcattgccaacctcaagtgcactgatgcccagacgggactgatggggaagacgctcctggagttccaacccaacaaaggcgacgttctcccgtctcacaagtttggaacacatgatgtggttgccctgaagccaaataaggcagatgctggatctgcttcacttggtcaaggtgtagtttatcgcttaaaggattcttccattactgttgcttttgatgatattcctgaagatggcttaaacagccctctgcgtcttgagaagcttgcaaatgaggatgaaggatgcactaattgaacttagcaaggctgtccaaacaggaccttgtgcaaaccttgttcctgttttatttggagagaaggcacccatgcgctccaaggatgctatgaaattcagtccattcaacaagaacttggatgattcacagaaagaggctatttcgaaggctcttggatcaagggatgttttcttgcttcacggacctcctggaactgggaaaacaacaactattattgagataatattgcaggaggtcaagcgtggatcaaagattcttgcctgtgctgcttccaatattgctgtggataatattgttgagcgacttgcacgatacagaacaaaattggtgaggttagggcaccctgctcgtttactgcctcaagtgctcgacagcgctcttgatgcacaggttttacgagctgataatagtagcttggcaggagacattcgcaaggaaatgaaggtgctcaatagcaaattgctgaaggctaaagataggaacactaaacgggacatcaggaaagagctcaaaacgcttgcaaaagaggagagaaaacgacagcagcttgcagtcactgatgtactgaaaaatgcagatgttgtgctgaccactctgactggtgcatcttcgaaaaagttaaacggaattacatttgatttggttgttattgatgaagctgcccaggcacttgaggtggcatgctggatagccttgttgaaagggccgagatgtattcttgctggagaccatcttcaacttcctccaacaattcaaagtgttgaggctgaaaagaaggggatgggaaagacactctttgaacgccttactgaagcttatggagaggaaatcacatccatgctcactgtgcagtacagaatgcacgagcacattatgagctggtcatctaaagaactttacaataataagatcaaagcacattctagtgttgctgggcatatgctctatgatctagaagaagtcactagatcttcttcaacagaaccaactattgtactcattgacactacagggtgtgatatggaagaagtaaaagatgaagaggagagcaccatgaatgagggcgaggcagcagtatccattgctcatgccaagttgcttgttgagagtggcgttaatgcttctgatattggaataattacgccttacgctgcacaggtaacctgcttgaagatgatgagaaacaaagatgccaagttgaaagatttagagatatctacagttgatgggtttcaaggccgggagaaagaagccatcatcatttctatggtccggtctaactcaaagaaagaggtggggttcttgagcgatcacaggcggatgaacgtggcggtgacgcgagccaggaggcagtgctgcctggtgtgcgacgtggagaccgtgagcagcgacaggttcctgaaacgcttggtcgaatacttcgaggagaacggggagtacttgagtgcttcagaataccagagcagctgactggcgtcgatcagatccattcagctcttcttctagtggctcgtggtggcatctggctggcatgtccgtggagcaagtggataggatccgcatggagtcttggagaacacaatatcaagctttggttcctagatatctcagcttttcttttcttttctcttggtgaacgcataaatgatgtattgttgtgacgttgccaatgccatgggaatgagatctttaacaaaacaaaaaacaaaaaaacaagagggcagtggagaatgtgctgtggcatagtgtgtgtgct

SEQ ID NO: 4510 - DNA, 1514 bp, Zea Mays
attttttgctttaagatttctgttggaaagaaatgataacatatattgcatccattttagagaagatgggatgtgaacaaaattggtgaggttagggcaccctgctcgtttactgcctcaagtgctcgacagcgctcttgatgcacaggttttacgagctgataatagtagcttggcaggagacattcgcaaggaaatgaaggtgctcaatagcaaattgctgaaggctaaagataggaacactaaacgggacatcaggaaagagctcaaaacgcttgcaaaagaggagagaaaacgacagcagcttgcagtcactgatgtactgaaaaatgcagatgttgtgctgaccactctgactggtgcatcttcgaaaaagttaaacggaattacatttgatttggttgttattgatgaagctgcccaggcacttgaggtggcatgctggatagccttgttgaaagggccgagatgtattcttgctggagaccatcttcaacttcctccaacaattcaaagtgttgaggctgaaaagaaggggatgggaaagacactctttgaacgccttactgaagcttatggagaggaaatcacatccatgctcactgtgcagtacagaatgcacgagcacattatgagctggtcatctaaagaactttacaataataagatcaaagcacattctagtgttgctgggcatatgctctatgatctagaagaagtcactagatcttcttcaacagaaccaactattgtactcattgacactacagggtgtgatatggaagaagtaaaagatgaagaggagagcaccatgaatgagggcgaggcagcagtatccattgctcatgccaagttgcttgttgagagtggcgttaatgcttctgatattggaataattacgccttacgctgcacaggtaacctgcttgaagatgatgagaaacaaagatgccaagttgaaagatttagagatatctacagttgatgggtttcaaggccgggagaaagaagccatcatcatttctatggtccggtctaactcaaagaaagaggtggggttcttgagcgatcacaggcggatgaacgtggcggtgacgcgagccaggaggcagtgctgcctggtgtgcgacgtggagaccgtgagcagcgacaggttcctgaaacgcttggtcgaatacttcgaggagaacggggagtacttgagtgcttcagaataccagagcagctgactggcgtcgatcagatccattcagctcttcttctagtggctcgtggtggcatctggctggcatgtccgtggagcaagtggataggatccgcatggagtcttggagaacacaatatcaagctttggttcctagatatctcagcttttcttttcttttctcttggtgaacgcataaatgatgtattgttgtgacgttgccaatgccatgggaatgagatctttaacaaaacaaaaaacaaaaaaacaagagggcagtggagaatgtgctgtggcatagtgtgtgtgct

SEQ ID NO: 4511 - DNA, 1422 bp, Zea Mays
cttttgcctatgttattacagggcgattatttcttttcccagcatcaagaaatgaggttttacgagctgataatagtagcttggcaggagacattcgcaaggaaatgaaggtgctcaatagcaaattgctgaaggctaaagataggaacactaaacgggacatcaggaaagagctcaaaacgcttgcaaaagaggagagaaaacgacagcagcttgcagtcactgatgtactgaaaaatgcagatgttgtgctgaccactctgactggtgcatcttcgaaaaagttaaacggaattacatttgatttggttgttattgatgaagctgcccaggcacttgaggtggcatgctggatagccttgttgaaagggccgagatgtattcttgctggagaccatcttcaacttcctccaacaattcaaagtgttgaggctgaaaagaaggggatgggaaagacactctttgaacgccttactgaagcttatggagaggaaatcacatccatgctcactgtgcagtacagaatgcacgagcacattatgagctggtcatctaaagaactttacaataataagatcaaagcacattctagtgttgctgggcatatgctctatgatctagaagaagtcactagatcttcttcaacagaaccaactattgtactcattgacactacagggtgtgatatggaagaagtaaaagatgaagaggagagcaccatgaatgagggcgaggcagcagtatccattgctcatgccaagttgcttgttgagagtggcgttaatgcttctgatattggaataattacgccttacgctgcacaggtaacctgcttgaagatgatgagaaacaaagatgccaagttgaaagatttagagatatctacagttgatgggtttcaaggccgggagaaagaagccatcatcatttctatggtccggtctaactcaaagaaagaggtggggttcttgagcgatcacaggcggatgaacgtggcggtgacgcgagccaggaggcagtgctgcctggtgtgcgacgtggagaccgtgagcagcgacaggttcctgaaacgcttggtcgaatacttcgaggagaacggggagtacttgagtgcttcagaataccagagcagctgactggcgtcgatcagatccattcagctcttcttctagtggctcgtggtggcatctggctggcatgtccgtggagcaagtggataggatccgcatggagtcttggagaacacaatatcaagctttggttcctagatatctcagcttttcttttcttttctcttggtgaacgcataaatgatgtattgttgtgacgttgccaatgccatgggaatgagatctttaacaaaacaaaaaacaaaaaaacaagagggcagtggagaatgtgctgtggcatagtgtgtgtgct

SEQ ID NO: 4512 - DNA, 3592 bp, Zea Mays
cgacggatgaatatgactgatattatatttggtttatatatttatttggactcgaatacttaactctttactccgtatgtcggatttgtgatattcttgggatacggatacgaatatagcatcggatattgaacgtcctcgatttggttagcagactgcagacctagcaggctagcaaccattctagctccgaattcggagcaggcgagggcgaactgaccgaggcgaggacgatcactgtccatgtccatggaggcggcggttggggcggagttcggacctcatctgcatcccgctctcgggttcagacacagccagcgccgtgtctttttttgctgttggcgcctgcatccgccccggccggcctcgcttggcctctgcggtggcgggggagcccgtccccgcggcgctatccccgtcgcggatggcgaccagcggcggcggctgcgagagctcgaggcggaggcggaggcggaagctggatcgatcttgggtcctccgaggagcagcccccgcgaggtgagggaggagatggccccggtgcttcgacctcgtccgccgcctcggtaggggcgccgtctacctcggctcctccagggtcccgcccacgcacccgcacttcctccaaaccaccgagctcgccagagaggcaatcagtactactatagcaatctactagcattgacatgttgctagtttcagcagcagattcttgactgaagtgttagagaacgccgtaaacaaaatctattcagacatgagccaatacattgaattcgactgcaagtagctgtagacatgagtcattggcattgtgcaccatatctttctgcatttatgggttgtttggtttctagagactaatttttaatccttttattttattccattttagtccttaaattactaaatacggaatctaaatagagttttagtttccgtatttagcaatttagggactaaaataaaataaaatggagagactaaaaattagtccctagataccaaacacccccttactcagccacctgtctttgcatcgacagatagctcggctgctcggctgcaccacatggacgggagccggccctgggctcatggatgctgccatccaaggcgcctttgaggcagacaagcctgtcggtggcttgaagattgcaaaggaagcgggtgaatggacaagctcaggcttccatccttacctgccaccggagacctacctcacatgcaggttcttctctgcgaggaagcatggcctggtggatgctgcggtgcggagcagctctactgacagaaccgctgtggttgcgctgccaggaggggttgggacgctggacgagctgtttgagatcttggcgctgattcaactagagaggatcgggtcagcgctcccggtcccggtcttgcttctcaactacgattcttattactccaagcttttggaatttctgaatgactgccaggagtggggcacggttgctccgggcgaagttgcatcactttggaaggtttgtgatgggaatcatgaagctttggagtacctggcagagttctacggtgttccccataacgagagagaatattaaataacaccacagttgaagaaccaaagagtttcatatgccacgagctgaggacaaaatatttgcaagagttttcttgcttctttttactcctgtgcaggaggacaaataattgttgagctgttgagttttccatgtggagatgctctcaaggcatattagcaacagaagcaacatttagaacagacaacaatttccagaccagtcgcatgttgtacactttctgttgactgattgacagagatgatgaatgcagacgatttacgtttaaaccttgcatgccattttttctttagttaatgacagttaactaaataggagcattagtatttagtagaaggaactatgctatgcagattctcttcagatttggtctgctgcagctggtttttctctgtagaagtttgttttgttggtataattattgggctcatggaagatgaacggggtgattgtgagttgtgactcatcatcggctctataacgccattctttgctccaaggatgaagcaacatgcgttgtaaaattacttctttcacctgaagtttacctttcggccattctgttcaagatgtttactggaaacaaacatggaagagtaaccggacggtatacatgcctccagacttttggcctgtgacctggacagctggtgatgtttcaacagagatctggcacaacaactcgatagctgcatactgactgctgagctgtacagattacaaggagtgcagaatagacttgtttattgtacaacaaagtataacaagctcgaactgaaagttggttttgttgaaggccagagcaatgttgtcgtcgttattccagaaggcagtggtgatatttagcctagcaagcctacattttttgggttttgcaagtcattgcagaaaatttcggcttcaaacatgcagcagaatacatggaaatgttcaatgggtaatggcataaaatctgctccttgtgctagctctaaagaagagcaggaaactaaattaagatctgatagagagtagagacgcagcagctttcaagccccctagtgatcagacaccagcaacttcttatggacaagagttcaagaattgtcctctgccgaaagatctcttctgacggaagagcagttaaagtcataatttgttctagtgttaaaactcagtgaattgaggccacgaaggcaaacaacaatttatagaccaaatccattggtaagactgtattacgaaagatgaaaggcatgtttggttcgttacctcaattgccacactttgcctaacttttctgtctaagattaattattcaatttggacgactaacattagacaaagtgtggcacatttagccacaaaccaaacatgcccgaagttcattaaagtcctggtggtggaaccaacagttgcccaatgctcttttcatgaatgagccttgtcatctgctcttggcaacaaagccatgccttgattacattttctttcacacacacacttcatctcttctaaatcgcttccaatggtttgaagatgttttcatatgccatgattcatctgtggcattagttgatgaatgctccacatgtagcgccttatgtgacattgagtctacctcccagatcaaaggaaatcgtgatgccaccaagtgctctatcttcatcaggttttccctctgataatgctgttccagctcgtcgctgggaataaacataagcagagggcacttgatcgctgatagatgtgtaaggccttctgaaagacaaggtaaaatcttcagattggtatcaagcaacaatttagaacaatcctgattgagcttggtatcaagtggtaggccttctaacacacatcaattaacgagcccaaaagattgcaaattctcaaaacaggagctctcaagtctcgagtaactatggtggcggtctagcgacaaggcggcgactataggaagtcattctcaatagagggttttatcacattatcaacatttgtatagaaaacagcgtatatagagtttc

SEQ ID NO: 4513 - DNA, 3137 bp, Zea Mays
cttaactctttactccgtatgtcggatttgtgatattcttgggatacggatacgaatatagcatcggatattgaacgtcctcgatttggttagcagactgcagacctagcaggctagcaaccattctagctccgaattcggagcaggcgagggcgaactgaccgaggcgaggacgatcactgtccatgtccatggaggcggcggttggggcggagttcggacctcatctgcatcccgctctcgggttcagacacagccagcgccgtgtctttttttgctgttggcgcctgcatccgccccggccggcctcgcttggcctctgcggtggcgggggagcccgtccccgcggcgctatccccgtcgcggatggcgaccagcggcggcggctgcgagagctcgaggcggaggcggaggcggaagctggatcgatcttgggtcctccgaggagcagcccccgcgaggtgagggaggagatggccccggtgcttcgacctcgtccgccgcctcggtaggggcgccgtctacctcggctcctccagggtcccgcccacgcacccgcacttcctccaaaccaccgagctcgccagagagatagctcggctgctcggctgcaccacatggacgggagccggccctgggctcatggatgctgccatccaaggcgcctttgaggcagacaagcctgtcggtggcttgaagattgcaaaggaagcgggtgaatggacaagctcaggcttccatccttacctgccaccggagacctacctcacatgcaggttcttctctgcgaggaagcatggcctggtggatgctgcggtgcggagcagctctactgacagaaccgctgtggttgcgctgccaggaggggttgggacgctggacgagctgtttgagatcttggcgctgattcaactagagaggatcgggtcagcgctcccggtcccggtcttgcttctcaactacgattcttattactccaagcttttggaatttctgaatgactgccaggagtggggcacggttgctccgggcgaagttgcatcactttggaaggtttgtgatgggaatcatgaagctttggagtacctggcagagttctacggtgttccccataacgagagagaatattaaataacaccacagttgaagaaccaaagagtttcatatgccacgagctgaggacaaaatatttgcaagagttttcttgcttctttttactcctgtgcaggaggacaaataattgttgagctgttgagttttccatgtggagatgctctcaaggcatattagcaacagaagcaacatttagaacagacaacaatttccagaccagtcgcatgttgtacactttctgttgactgattgacagagatgatgaatgcagacgatttacgtttaaaccttgcatgccattttttctttagttaatgacagttaactaaataggagcattagtatttagtagaaggaactatgctatgcagattctcttcagatttggtctgctgcagctggtttttctctgtagaagtttgttttgttggtataattattgggctcatggaagatgaacggggtgattgtgagttgtgactcatcatcggctctataacgccattctttgctccaaggatgaagcaacatgcgttgtaaaattacttctttcacctgaagtttacctttcggccattctgttcaagatgtttactggaaacaaacatggaagagtaaccggacggtatacatgcctccagacttttggcctgtgacctggacagctggtgatgtttcaacagagatctggcacaacaactcgatagctgcatactgactgctgagctgtacagattacaaggagtgcagaatagacttgtttattgtacaacaaagtataacaagctcgaactgaaagttggttttgttgaaggccagagcaatgttgtcgtcgttattccagaaggcagtggtgatatttagcctagcaagcctacattttttgggttttgcaagtcattgcagaaaatttcggcttcaaacatgcagcagaatacatggaaatgttcaatgggtaatggcataaaatctgctccttgtgctagctctaaagaagagcaggaaactaaattaagatctgatagagagtagagacgcagcagctttcaagccccctagtgatcagacaccagcaacttcttatggacaagagttcaagaattgtcctctgccgaaagatctcttctgacggaagagcagttaaagtcataatttgttctagtgttaaaactcagtgaattgaggccacgaaggcaaacaacaatttatagaccaaatccattggtaagactgtattacgaaagatgaaaggcatgtttggttcgttacctcaattgccacactttgcctaacttttctgtctaagattaattattcaatttggacgactaacattagacaaagtgtggcacatttagccacaaaccaaacatgcccgaagttcattaaagtcctggtggtggaaccaacagttgcccaatgctcttttcatgaatgagccttgtcatctgctcttggcaacaaagccatgccttgattacattttctttcacacacacacttcatctcttctaaatcgcttccaatggtttgaagatgttttcatatgccatgattcatctgtggcattagttgatgaatgctccacatgtagcgccttatgtgacattgagtctacctcccagatcaaaggaaatcgtgatgccaccaagtgctctatcttcatcaggttttccctctgataatgctgttccagctcgtcgctgggaataaacataagcagagggcacttgatcgctgatagatgtgtaaggccttctgaaagacaaggtaaaatcttcagattggtatcaagcaacaatttagaacaatcctgattgagcttggtatcaagtggtaggccttctaacacacatcaattaacgagcccaaaagattgcaaattctcaaaacaggagctctcaagtctcgagtaactatggtggcggtctagcgacaaggcggcgactataggaagtcattctcaatagagggttttatcacattatcaacatttgtatagaaaacagcgtatatagagtttc

SEQ ID NO: 4514 - DNA, 438 bp, Zea Mays
ctaaaataacacacaaccctacaggaccagaagggcaaatgaagtacataagaataacatagagaaagtactaactctataagaaaaacaaatgcttaattgattatagtttttagtgaaaatgacgaaacattctgctctgcaaagtgggatagagagcaagaagagaatataataaatatataagtttctatttcatctttacaacatgtcaattgaagattttaagctcctttcaatctacataagagtagtaaacaaatgtcaaaataaaacccacaagtagcatattagttcctttatccttcctcttaaaatgagtcgaagagaaatatgttgtctgagtgcctgtacatactacagaccgatcaaatattcagtcagcaaaactttgcaaatacttaattttcaagatatgtttattttcctggacatggg

SEQ ID NO: 4515 - DNA, 124 bp, Zea Mays
atggaagtgacagatcaggtaagactcagtacctgttcatggagaatatggaatgattgcttcataggtaaattaatgtctaaggcaataacctgaaattcaaaataacattactcatgttatt

SEQ ID NO: 4516 - DNA, 364 bp, Zea Mays
cgagttggaactggagcgccgcgatggggcgaagtggagcacggccagcgcgcgtctaccaaagaactcgcgcggtacacagggagaacaggcagccaccagggagatcgtccaggcgcgcgcgacgagcagagagcctgccatggaaacagagggagcaggtcacgacgagctggagtaccgaggccatggaaccgagcagacagagcgccgtgagatggagctgggcagtggagagctcggctgggcgagcagggacgccgcgagcagaggcaaacagccatggacggagcaggaaagaaagagccgcgagcgctgagagagagaagcaggggggcgcggccatgggagtggcaggaccgag

SEQ ID NO: 4517 - DNA, 1344 bp, Zea Mays
ggagtatccattgtcggtgcctccaccactcctcggtcgcgtagcctccaccgcgacagaacaacatcctccaaccccggcggcctccatctcccccttctcttcaacgtgtgacacaacggcctcctcctcccccaccggcggactccaccaccccaccggtcggcgacctcaaccgtccccgcccctgtgcacgccgtagatccagagacagctccacgacatcatcttctaaggaccgcatcttcgtcttcaacggcgactacgttgatcgtggtgcctagggcctcgaggtcttcctcctgctcctcgactggaagatgggtctttctccgaataaagaacaagacaatggattgctttggggtcctgatatcacccagcaatttctgaggacaaatcatttgaaggcgaattgatcatgtggaggtctggaagtgtaatggtggtttatcgagggagcatttacaaaaggcctctaaaatctcaagctctaaatggtgcctcatcatcggttaaaggcgaatatggtgcattgttcatcccaaatgcctcgaacgctgttgagaatgatattcatgggatatatttgtctgcaaaacatgcaactgtgtccctattgaatgtgtagaatattgagcacatgaatgaggaagggctggagttcaattagataattgatgagctaggtcctcattttgtggattggtgggaacaggtattttaccaatggatgtcgacttgctgcctcaaataatccctggttataatataccatacagagttcttccgactagaatgtgttcgacccttaccaacgctgagctgactagccaaagttagtgaggaaccttccatgcattttgctctagggagaaaccagaactatcaagtttagcagcagtaatataataaggagcatgctgcaactgccctagcgcggcgacgacgatgaatatggacatcgagcgtgtgctcaaggagaagttcggcgacgctttcaaggaaatccatcgggtgttcgacggggaccagctggcggccgagacaacgtccgaggtttgcacctctttcttagccttcaaggacaacatccctttttggccaaaaaaagataacgacctgcagcaccagagcccttgctctcagcctcaccacgcatctggctcaggcctaggcaccgcgagcaccctctccgacttagcccctcaagtggaggttctcgcagaactctctctgcgactccgtctggtgcaagaccgatatattaattttgataaagatgttcctccagtgagaattatagttgctgatggagaagaggatgttactatcaaggtataa

SEQ ID NO: 4518 - DNA, 1330 bp, Zea Mays
ctcctcggtcgcgtagcctccaccgcgacagaacaacatcctccaaccccggcggcctccatctcccccttctcttcaacgtgtgacacaacggcctcctcctcccccaccggcggactccaccaccccaccggtcggcgacctcaaccgtccccgcccctgtgcacgccgtagatccagagacagctccacgacatcatcttctaaggaccgcatcttcgtcttcaacggcgactacgttgatcgtggtgcctagggcctcgaggtcttcctcctgctcctcgactggaagatgggtctttctccgaataaagaacaagacaatggattgctttggggtcctgatatcacccagcaatttctgaggacaaatcatttgaaggcgaattgatcatgtggaggtctggaagtgtaatggtggtttatcgagggagcatttacaaaaggcctctaaaatctcaagctctaaatggtgcctcatcatcggttaaaggcgaatatggtgcattgttcatcccaaatgcctcgaacgctgttgagaatgatattcatgggatatatttgtctgcaaaacatgcaactgtgtccctattgaatgtgtagaatattgagcacatgaatgaggaagggctggagttcaattagataattgatgagctaggtcctcattttgtggattggtgggaacaggtattttaccaatggatgtcgacttgctgcctcaaataatccctggttataatataccatacagagttcttccgactagaatgtgttcgacccttaccaacgctgagctgactagccaaagttagtgaggaaccttccatgcattttgctctagggagaaaccagaactatcaagtttagcagcagtaatataataaggagcatgctgcaactgccctagcgcggcgacgacgatgaatatggacatcgagcgtgtgctcaaggagaagttcggcgacgctttcaaggaaatccatcgggtgttcgacggggaccagctggcggccgagacaacgtccgaggttatcacgctccactgactgacaggctgacagcatcaagttatggttctttagattctggttttcttcaaacaagagcccttgctctcagcctcaccacgcatctggctcaggcctaggcaccgcgagcaccctctccgacttagcccctcaagtggaggttctcgcaggtggctcaagctgattgtcaagatgcatgttctgtctatttaagggaatactgatcagctcctgatattaacatatacgacgattcaaattttacatttttaactctctctgcgactccgtctggtgca

SEQ ID NO: 4519 - DNA, 2951 bp, Zea Mays
cggcggcctccatctcccccttctcttcaacgtgtgacacaacggcctcctcctcccccaccggcggactccaccaccccaccggtcggcgacctcaaccgtccccgcccctgtgcacgccgtagatccagagacagctccacgacatcatcttctaaggaccgcatcttcgtcttcaacggcgactacgttgatcgtggtgcctagggcctcgaggtcttcctcctgctcctcgactggaaggtgctactccaaaattgtgtgttccttctccggggaaaccatgaatcctttaatatggttttgagaaggagataatgactaaatacaaagatcagggccctcaactttatcgaaaattttaaagatgttttggggagcttcctctagtggcaataatagcaggatgtgtgtacacttcacgtggaggtgtctcagtagttccatggtacaattgtaatgccatcaaataattcaaaaaaggggggaaagggtcacaactacaaggtgaattttactgatgatttgacttccatgaaacttggatcattggatgagttattgaaagcaatgagaactgttcttgaccctccttaggaaggctcaaatttgatccctagggatgtgttgtggtctgacccttccttgcagatgggtctttctccgaataaagaacaagacaatggattgctttggggtcctgatatcacccagcaatttctgaggacaaatcatttgaaggcgaattgatcatgtggaggtctggaagtgtaatggtggtttatcgagggagcatttacaaaaggcctctaaaatctcaagctctaaatggtgcctcatcatcggttaaaggcgaatatggtgcattgttcatcccaaatgcctcgaacgctgttgagaatgatattcatgggatatatttgtctgcaaaacatgcaactgtgtccctattgaatgtgtagaatattgagcacatgaatgaggaagggctggagttcaattagataattgatgagctaggtcctcattttgtggattggtgggaacaggtattttaccaatggatgtcgacttgctgcctcaaataatccctggttataatataccatacagagttcttccgactagaatgtgttcgacccttaccaacgctgagctgactagccaaagttagtgaggaaccttccatgcattttgctctagggagaaaccagaactatcaagtttagcagcagtaatataataaggagcatgctgcaactgccctagcgcggcgacgacgatgaatatggacatcgagcgtgtgctcaaggagaagttcggcgacgctttcaaggaaatccatcgggtgttcgacggggaccagctggcggccgagacaacgtccgaggttatcacgctccactgactgacaggctgacagcatcaagttatggttctttagattctggttttcttcaaacaaggtttgcacctctttcttagccttcaaggacaacatccctttttggccaaaaaaagataacgacctgcagcaccagagcccttgctctcagcctcaccacgcatctggctcaggcctaggcaccgcgagcaccctctccgacttagcccctcaagtggaggttctcgcaggtgagagaggtgaaacgtccatcctcaatattattctcagggtcctaatcatgttgtatcacctacgctgcatagcagttctccatatgtatttactattttcaaattgtcgaattatacgccagcaaccaaaaatttgtcacttgcctttatgttcatagcacacttgttttgttttacaattatggctttttttatcaactattgtacatttttgatctagttactgttgcagggttgtcttgtcaaagtaaatttctgcttcctaacatgctaatgtttttcttcgtgtttggggttcttcacctccctcgcagcaaagaatgtattttttatcaagggatatttcgttaattagctagatgaatattattaccaatgtgaccattatgttgtgggcagtgggactcatgtttggtctgttaaccattttgtggcctgagttgtttggactcgattaatttaagggaagcatgtggctttgcatgatcataaaccagagcttggtgtcatatgcctcatcaatacaagattgtccccaatacaggtggctcaagctgattgtcaagatgcatgttctgtctatttaagggaatactgatcagctcctgatattaacatatacgacgattcaaattttacatttttacatcacattacacctacgactgatgttatttgaattggtgaagaactctctctgcgactccgtctggtgcaagaccgatatattaattttgataaagatgttcctccagtgagaattatagttgctgatggagaagaggatgttactatcaagatattttttaaattttcttttgaaaatgccacgacttgaagctattctcattgtgatatgcatggtatcttcacattattcaatgagctaaagaaagaaaaactaaagaatgttgttgccaataaaagaactgcaagaaaaaaactgaacaaaagctgcaggatgagctgcagaggaagaatgaagaaacaatccaacggattgagacggctcaagagacgacaaaagatgaacttgttgcagctgttgtaaaagagaaagcatcccagattgaccaaattaataaacaatttattattcagtttttacaaaatcgcactattgcatatatctgtttttatttagcatattatatggttggatgcagttgtgccaatacaaaaataaatttcatttatgtgacatcggcatcaatttattcttgtatatatgtgttatagtcataatttcttggctacatattcaaatctctaattacttatattgattgctgattttatgttgttgaagtgtt

SEQ ID NO: 4520 - DNA, 804 bp, Zea Mays
gtttcgcagaacgggaagaaaaggtatgggacgtatgtgcgtcttgaggtagtaatttataagggcgtggagggagtttgttgaattctgttaccgtcggagtcggactctatctctatctccaaaagtccgttctaatctaatctcttcgtgagtcgtcctaatcagcgcgagccgcagcccccgctgacgcgaatcgcgacctccgcgcgaccctccgctgacccggtctccctgccgcctggagcgatgaaaccgcaccctcgcgcccaagcccagactcaaaactcagccaaacccttcgcatcttcctgtggtggcgtcctcctccaacgttggtccgtgtttgtctccatggcgctctcgaatgcctaagccaaggccgaccgcgtcgagctggtgctgcaggtgctcgacgaaacgccccgcaggaccgagttctcgtagaccatgctcgtcgattctctggcgagggccggccgacagcacgacgcattctgcctctccgcggagatgcgggcctccagcgtggcctgcgactcccacgtctgcgtatgtcactacgggaagagctacatattcatcgtaaattatgtggaaaggatgtacaagcaagctgcccttgtgcagacagactcagaggtgtagagaagacatggtgtccgctgaggattgcaagatccattgctgcataggctgatgtatgcggcacaccatcaggagcagactgatcccgcacacataaggtcagggatggcctatgaccctttaagaactcatctagagcgaagagcagctgagcag

SEQ ID NO: 4521 - DNA, 3596 bp, Zea Mays
ttcgcagaacgggaagaaaaggtatgggacgtatgtgcgtcttgaggtagtaatttataagggcgtggagggagtttgttgaattctgttaccgtcggagtcggactctatctctatctccaaaagtccgttctaatctaatctcttcgtgagtcgtcctaatcagcgcgagccgcagcccccgctgacgcgaatcgcgacctccgcgcgaccctccgctgacccggtctccctgccgcctggagcgatgaaaccgcaccctcgcgcccaagcccagactcaaaactcagccaaacccttcgcatcttcctgtggtggcgtcctcctccaacgttggtccgtgtttgtctccatggcgctctcgaatgcctaagccaaggccgaccgcgtcgagctggtgctgcaggtgctcgacgaaacgccccgcaggaccgagttctcgtagaccatgctcgtcgattctctggcgagggccggccgacagcacgacgcattctgcctctccgcggagatgcgggcctccagcgtggcctgcgactcccacgtctgcgtatgtcactacgggaagagctacatattcatcgtaaattatgtggaaaggatgtacaagcaagctgcccttgtgcagacagactcagaggtgtagagaagacatggtgtccgctgaggattgcaagatccattgctgcataggctgatgtatgcggcacaccatcaggagcagactgatcccgcacacataaggcgatcatcacttccgatgagttgagttttattgcttactatttccttccttccgattcttagctgctaggagctttcaagttgttccctcccataatctagagtaattacagatctgtacacgttatataagcaacttcccttatgcaaacctggatgattagttatgtatatagaattttgaagagaaaatatattttttcgaatacagactttgttctgccctcgaatcctccattttaaatagcagcttgatgtactagttctcacgccatgctgctataaaataattggaaggccatagtttatttgattgccatagcccaaagtttcacttccattgccatggttgagtgatgaatttccatgatgctcctatggcgtaaaacaaactaaaaaaggtcgtcattaatcattgttggagttgtggtaaaacatatatcaaatcatttggttcatgtgaactgatctagaaaccacgttctgtatcagcaactcatcgcacaaggctgactagagagcaactgtaagcttaccacaaacactaaaagccttcttccaactggtatgacagttccacttggcttctccctatgtgtgtttcaaatcaaaatgtgcaagagacacacccaattgaagacccatccatggtgcctaaaacattaataaatgcttatgtagttccaaacctcacagtataatatagcaagctgattgcagttaacttaccactgagagggcattttttgtaacggtcgatggtgcctggcacgatatcttactacttattaagacaacaaaggtagtctgcctccctcgttctgccgttctgccgttaatcgatctggaccgtccgtgacacgatagccgcccacgccagccgcttgcgcatccgcccgcgctccgtgtgtcctcccaccccctttcgcacgcgcaacatggctccctctgccctctcccgttcgcagttctcctcccaatacgcacgctaacaactgctccctccacctccacctccacctccgggcgccccggccgccacgaccctgagcctgatgcctggcgcggacgtcggcgcggacgagcagcaggagccggccgccgcgagggccgaggagatgcccgagcctgcccccgcccccgccgcgccgccgccgctcaccatcttctacggcggcacggtggtggtgttcgaggacttcccggcggagaagacggccgaggtcatgcgcctcgcggccggcgacgacctgcccatcgcccggaaggcgtcgctgccgtggttcctggccaagcgcaaggaccgcctcgtcgagcgcgcgccctacgcccgcccgttgtcccccgcgaaggagccggagaagaagacgtttactttttgtttgagaattcacatgacagggatggcctatgaccctttaagaactcatctagagcgaagagcagctgagcagttggatatattcaaggaaatggtatctttgcgtgtatttgagaggtacatgataagtgtaatggtttcacgttgtctgcagattttgtttggatattcactagatgagtaatttcaccatggtttaattctaacagttgctcttattacatccaagaccgccaagttctactgtaatattgtcttgtgtcctatcaaagcaaagaaatgtgttgacatgctttggttgttctgttgaaataatattcccagtatcatatatcccccttctatttcttctgagcaaaatgattaccagtttgaacttagtttggtgctgatgttcttgtgatgactggactactcatccgttttttagttaattctgctttttgcaggatttttagtgaactcctatactgtgagcactggactacacattatgtttttttgcaggattacaagttcattctgtttttcagatagttggctatattgctgacagatagctggttgcacaattacctgttgataaggcgattgaactgtggggttttagcagggagtttgaagtcctatttggtgccaagctcctaaactgagaaggcacagtaggcacacaagtaactattgtttctatgctccaaacttagatgttctaagctctccatgattaggaaatatctattgtttctgtgcaccaaatccaagttgcaggtacctccaagtttttatttaatgttgttaatctacttcaatatcgtctagctacaagttgatgtgaacctatgattgtgttatatagggcttcaatcctagcattggtcacgtgttatgacagtgtggtcgagcatgagatttgaaccactaattgtgttatgtcgagcttgtataagctatcctttattatctatccttattatcttcagatacatgtgatcagcgatcatctatagagtaatttgaactctatgtgctgtagactttttactcataacctccacattcctaaacttatgttttttaagtttgagatgatgatgtgcttatgtgaagttaatgctgacaacaatactattggatggtaagctaagatatttcattttcaactaatatcatatagatacttggttaattgagaattagtcagttgtgtattgcacaactaagaagcatacaagtgtttatgcctctgatatgtttgtcaccttttactggtctagaatcgatgaaaacattagctttcttagccataagagttttttgtgcttccttctatatcactatttgttgggaactttgcgcttttaactatggtggagcaatatgggcatgtcggcgctacagaaagttgtagcagcggtagtccacgatgtcaacgctgagggctgggatcgaggattggaggggtgagaggcgg

SEQ ID NO: 4522 - DNA, 1252 bp, Zea Mays
cacagatgcggctcgacgctctccatcgtctggtataccaggcttcaagagaggctaagaaaatctaagtgtttaggacttgaagaggctgcaaagaacaaaggttttgaccttggtaacgtcgatgccatgcagacggacatggaggttgtgttcgaggtgctgaagagcctagaggacgttgaggagctggaccccgagtggctgcatgatcctcacaagctgcacacgtgcgtggagaaggacacctccttgtcggactcgtgcggcgtcgacccattcgggctggtggtgatggcgcccgaaggcatgcagagcaggagcagatcaccgtattcttcagggagtgaccaggatctcagcttctcgatctatgcttctttgtgatttctcttctaatttgtctacctcctttttctgcccgcagattggagcaagagcaaggtggtcagatctagatcgaaagtcagtgagacgaaagccgtttttacctcactggtcaagcaacactattcactctttgatgcaacatgggaagctttatttcctgaagcactagctgggaagtcagtgagacgaaagctcatgagggcaggtccaagggcactgatcttcccagcacctgcaaacgctacctcagcaaccatgcgcctcttgaagatcacctgggcagagctggcactgtttgcaacatctgccttcacttcattgacatgaccgtattggctaaagatcttgataaggtcacactttgtaggataaatgcatggtctgctgaagtgcagcaccagattttctctctgctgaagaccacatgctgctacagagagctgccatagcatttctccacagatgcaagcccaaccattctgttcttccaataaaatactggtatggtgagagtgatggttatccttctcagaaagggagagatcaagaaagatgagatataaattcatatgctaccagaacaagaaagatgagagcggttggtggccgagactcctaaaaaaggacctgtgttcttgaaggttgactggacaaatggtatgacgaggatgtcgaagatgttggatgttagaatttcacttttggttgattatgttttttcttatgcacctgacaaatctagatatgcaaccagacatgctttattcttgttcctgttttgttttccttatgtattaattccttaacttgtaatgcacatgatgttttccttatgtattaattccttaacttttaaagcaca

SEQ ID NO: 4523 - DNA, 1613 bp, Zea Mays
agtgaagaggccttggcaaattggataggcttcaagagaggctaagaaaatctaagtgtttaggacttgaagaggctgcaaagaacaaaggttttgaccttggtaacgatgcactcattgcaaactgttgaggaggaataactatttggcagatgcagacatgcagtagcttcacacttggttcatcggacaacagttctttgaactgagtagagtggaaggaaactgaacctaacacccatccatgacccagcttacatataggtggttttactgggttctgcatcagatcctcgcatacaaggtgacttcacaaatttagccaataagttgtatagccgagtgaagctatgtttgacctatgctacgacgagccaccatcacatttgcaacatgctaaagagcaaaatgacaccaaactaatggaaaatgtaatccatgttctatcaagatatttcttaccgctgcaaccaggcacaactgacatagtcttcagacggacatggaggttgtgttcgaggtgctgaagagcctagaggacgttgaggagctggaccccgagtggctgcatgatcctcacaagctgcacacgtgcgtggagaaggacacctccttgtcggactcgtgcggcgtcgacccattcgggctggtggtgatggcgcccgaaggcatgcagagcaggagcagatcaccgtattcttcagggagtgaccaggatctcagcttctcgatctatgcttctttgtgatttctcttctaatttgtctacctcctttttctgcccgcagattggagcaagagcaaggtggtcagatctagatcgaaagtcagtgagacgaaagccgtttttacctcactggtcaagcaacactattcactctttgatgcaacatgggaagctttatttcctgaagcactagctgggaagtcagtgagacgaaagctcatgagggcaggtccaagggcactgatcttcccagcacctgcaaacgctacctcagcaaccatgcgcctcttgaagatcacctgggcagagctggcactgtttgcaacatctgccttcacttcattgacatgaccgtattggctaaagatcttgataaggtcacactttgtaggataaatgcatggtctgctgaagtgcagcaccagattttctctctgctgaagaccacatgctgctacagagagctgccatagcatttctccacagatgcaagcccaaccattctgttcttccaataaaatactggtatggtgagagtgatggttatccttctcagaaagggagagatcaagaaagatgagatataaattcatatgctaccagaacaagaaagatgagagcggttggtggccgagactcctaaaaaaggacctgtgttcttgaaggttgactggacaaatggtatgacgaggatgtcgaagatgttggatgttagaatttcacttttggttgattatgttttttcttatgcacctgacaaatctagatatgcaaccagacatgctttattcttgttcctgttttgttttccttatgtattaattccttaacttgtaatgcacatgatgttttccttatgtattaattccttaacttttaaagcaca

SEQ ID NO: 4524 - DNA, 2005 bp, Zea Mays
ctccagtcttggtgtttccaaaggatcccatgatcctcctcatgcaaacaaacacagttctcaattgtctccacaccaccagtgaagtttgtgaaatgtgcatcaaaatattttatgtagcccaagcaccctcttgtagaaatccttgcattataaagaaatatagcttttcaatgaccatttcaccttttttgtatccaccatttctacatttcacaagttccagtgaataggtgatagttgtgattttaaggtggttgaaaatgaaggataggcttcaagagaggctaagaaaatctaagtgtttaggacttgaagaggctgcaaagaacaaaggttttgaccttggtaacggtgagttattttattaatgtttatatgccaacaactttagcttttgtacactagcactgttatcttaatcatctatattttgtggtgatatctgatccaatccttcactcattgcaaactgttgaggaggaataactatttggcagatgcactcattgcaaactgttgaggaggaataactatttggcagatgcagacatgcagtagcttcacacttggttcatcggacaacagttctttgaactgagtagagtggaaggaaactgaacctaacacccatccatgacccagcttacatataggtggttttactgggttctgcatcagatcctcgcatacaaggtgacttcacaaatttagccaataagttgtatagccgagtgaagctatgtttgacctatgctacgacgagccaccatcacatttgcaacatgctaaagagcaaaatgacaccaaactaatggaaaatgtaatccatgttctatcaagatatttcttaccgctgcaaccaggcacaactgacatagtcttcagacggacatggaggttgtgttcgaggtgctgaagagcctagaggacgttgaggagctggaccccgagtggctgcatgatcctcacaagctgcacacgtgcgtggagaaggacacctccttgtcggactcgtgcggcgtcgacccattcgggctggtggtgatggcgcccgaaggcatgcagagcaggagcagatcaccgtattcttcagggagtgaccaggatctcagcttctcgatctatgcttctttgtgatttctcttctaatttgtctacctcctttttctgcccgcagattggagcaagagcaaggtggtcagatctagatcgaaagtcagtgagacgaaagccgtttttacctcactggtcaagcaacactattcactctttgatgcaacatgggaagctttatttcctgaagcactagctgggaagtcagtgagacgaaagctcatgagggcaggtccaagggcactgatcttcccagcacctgcaaacgctacctcagcaaccatgcgcctcttgaagatcacctgggcagagctggcactgtttgcaacatctgccttcacttcattgacatgaccgtattggctaaagatcttgataaggtcacactttgtaggataaatgcatggtctgctgaagtgcagcaccagattttctctctgctgaagaccacatgctgctacagagagctgccatagcatttctccacagatgcaagcccaaccattctgttcttccaataaaatactggtatggtgagagtgatggttatccttctcagaaagggagagatcaagaaagatgagatataaattcatatgctaccagaacaagaaagatgagagcggttggtggccgagactcctaaaaaaggacctgtgttcttgaaggttgactggacaaatggtatgacgaggatgtcgaagatgttggatgttagaatttcacttttggttgattatgttttttcttatgcacctgacaaatctagatatgcaaccagacatgctttattcttgttcctgttttgttttccttatgtattaattccttaacttgtaatgcacatgatgttttccttatgtattaattccttaacttttaaagcaca

SEQ ID NO: 4525 - DNA, 2092 bp, Zea Mays
ctccagtcttggtgtttccaaaggatcccatgatcctcctcatgcaaacaaacacagttctcaattgtctccacaccaccagtgaagtttgtgaaatgtgcatcaaaatattttatgtagcccaagcaccctcttgtagaaatccttgcattataaagaaatatagcttttcaatgaccatttcaccttttttgtatccaccatttctacatttcacaagttccagtgaataggtgatagttgtgattttaaggtggttgaaaatgaaggataggcttcaagagaggctaagaaaatctaagtgtttaggacttgaagaggctgcaaagaacaaaggttttgaccttggtaacgatgcagacatgcagtagcttcacacttggttcatcggacaacagttctttgaactgagtagagtggaaggaaactgaacctaacacccatccatgacccagcttacatataggtggttttactgggttctgcatcagatcctcgcatacaaggtgacttcacaaatttagccaataagttgtatagccgagtgaagctatgtttgacctatgctacgacgagccaccatcacatttgcaacatgctaaagagcaaaatgacaccaaactaatggaaaatgtaatccatgttctatcaagatatttcttaccgctgcaaccaggcacaactgacatagtcttcagacggacatggaggttgtgttcgaggtgctgaagagcctagaggacgttgaggagctggaccccgagtggctgcatgatcctcacaagctgcacacgtgcgtggagaaggacacctccttgtcggactcgtgcggcgtcgacccattcgggctggtggtgatggcgcccgaaggcatgcagagcaggagcagatcaccgtattcttcagggagtgaccaggatctcagcttctcgatctatgcttctttgtgatttctcttctaatttgtctacctcctttttctgcccgcagattggagcaagagcaaggtggtcagatctagatcgaaagtcagtgagacgaaagccgtttttacctcactggtcaagcaacactattcactctttgatgcaacatgggaagctttatttcctgaagcactagctgggaagtcagtgagacgaaagctcatgagggcaggtccaagggcactgatcttcccagcacctgcaaacgctacctcagcaaccatgcgcctcttgaagatcacctgggcagagctggcactgtttgcaacatctgccttcacttcattgacatgaccgtattggctaaagatcttgataaggtcacactttgtaggataaatgcatggtctgctgaagtgcagcaccagattttctctctgctgaagaccacatgctgctacagagagctgccatagcatttctccacagatgcaagcccaaccattctgttcttccaataaaatactggtagtatccttttttcccctatgtacatataaaccatacttcatatgatgggtcaaattttatcagactcattctattaaatcctttactgctagacatcgctcacgatgacgcagcaactacagtgcaatgtttttatgctttcctatagagggcatgctatttcttacttctattatatttatgccattcaaacttgtagctctcaataatttgtgggtttaaatgttcttgttttctttatttgtgttacatctaaatctgattttctttgtaggtatggtgagagtgatggttatccttctcagaaagggagagatcaagaaagatgagatataaattcatatgctaccagaacaagaaagatgagagcggttggtggccgagactcctaaaaaaggacctgtgttcttgaaggttgactggacaaatggtatgacgaggatgtcgaagatgttggatgttagaatttcacttttggttgattatgttttttcttatgcacctgacaaatctagatatgcaaccagacatgctttattcttgttcctgttttgttttccttatgtattaattccttaacttgtaatgcacatgatgttttccttatgtattaattccttaacttttaaagcaca

SEQ ID NO: 4526 - DNA, 1285 bp, Zea Mays
agcacgtattgtaaatgtaccattggttatagctgatgcgacatcattaacgcaagcaagttcattactgacttactaacattgttttctttagaatgtcttggaaaagagtgcaaatgctagtagacatgtatctggagaaggtgttcaacaagcattgttgaaaatcctagaaggaactgtaagttactaaagttgcattttggttttgtgcctgtggaattaggagtttagaagctatcttcgattcacttttttttataaggatctttgattgactttaactctctgtcaagagactacagtaatgattctttgtatgttgcctacttattcctaatgcatgttgttaatattcctgagaaaggatcacacaagaattctcgcaatgatagtatacaggttacataccctatatggtccttaatgaatacgtgcactatatatcatatgggttaaatttggattcaattgaatgaaaaaggatctttaaaatgttcttttttatgtcataaggaccctgtactacattacataatgaacataggaagtgttacctcaaaaacatttattgacaaccagataacaacaaacatgctggttgtgttaaaaatgtgcagggcataagtattctactccctccgtcttaaaatataagaaatctagagtttttgcaccaaaatacaagtattctggagttccctttttctttttcttttagcatacaatattgagattccttttaaaattagcatcacccaaacagccactcagttgtttgcagtcttattttcaatcttggattcatgcttttctgtttttctgctgaagattttagttaccaatcttcctttctgtttggctttaaatatgtttttatctatcccaaaaacttgctccacctatgtgcttttgaaatgctactacattttcagggcataggataaggtgattgaccactcccatttaagaattgcttccagcttttcctaaagaacattccacgaaatcataactcacgccctattggtgacgagcacaaattagcacattagctaccattcaagtgcttacataggttgtgaatgttttaatttgtgtacgcttaactatgtatgctaccaaatattagattataattatattctttgttttcattttggggtaatgtaggattatgattctaccaaaaacagcaattggatatcaaccacaaaactacaagcactagtcgttaatttaagaatttttttgctagtcgtaaacttatttatatggaatagca

SEQ ID NO: 4527 - DNA, 645 bp, Zea Mays
caagcattgttgaaaatcctagaaggaactgtagttccagttgacgatgtgtgaatcaggcaatcgtcgcccttgtgcagctttgctccatggtgcttgtttctttgtgaggagacaccggataggatgggacattgctcgccctccccaagctcggtagttccatggaatgaacaaccaattagttaaagcaatgtcaagtcttattttcacacaaaagtgcaagatgttgattgtacatcatcaacatgtgccatttgcttggaagactacatcagaaacgtcatatattttggaacagaggtagtagtcaataattagcttattcgttttttatatggttgtatatatcctagcaagagaccactctgtagtcatttccttagtttcttgagagctgggaccacacttatagtgaagaaaactatgttcaactaacagaattaacttggatgcacctttgcacaatcatatctgtacaagttttggcggcatatgcttatttcaaattaggcttgtggtgttagattaatatattcattggatatggtgtgaatttctgagggataccggatgatgtgtacacctgtttgtctttgtcaaaatgttatcatgcattctttttgtctttgtcaaaatgttatc

SEQ ID NO: 4528 - DNA, 1222 bp, Zea Mays
ctcgccgtacgcggtgcataggggacatgagggtgctgctgtctaggtcgtgtaggtcggtcgccggtcccgcccgccgtctccacggccaagaccgtggtggcgtcctcctccaacgttcgtccgtgtttgtctccatggcgctctcgaatgcctaagccaaggccgaccgcctcgagctggtgctcgacgaaacgccccgcaggaccgagttctggtagaccatgctcgtcgattcgctggcgagggccggccgacagcacgacgcattctgcctctctgcggagatgcgggcctccagcgtggcctgcgactcccacgtctgcgtatgtcactacgggaagagctacatattcatcgtaaattatgtgcaaaggatgtacaagcaagctgcccttgtgcagacagactcagaggtgtagagaagacatggtgtccgctgaggattgcaagatccattgctgcataggctgatgtatgcggcacaccatcaggagcagactgatcccgcacacataagaatgtcttggaaaggagtgcagatgttactagacatgtatctggagaaggtgttcaacaagcattgttgaaaatcctagaaggaactgtagttccagttgacgatgtgtgaatcaggcaatcgtcgcccttgtgcagctttgctccatggtgcttgtttctttgtgaggagacaccggataggatgggacattgctcgccctccccaagctcggtagttccatggaatgaacaaccaattagttaaagcaatgtcaagtcttattttcacacaaaagtgcaagatgttgattgtacatcatcaacatgtgccatttgcttggaagactacatcagaaacgtcatatattttggaacagaggtagtagtcaataattagcttattcgttttttatatggttgtatatatcctagcaagagaccactctgtagtcatttccttagtttcttgagagctgggaccacacttatagtgaagaaaactatgttcaactaacagaattaacttggatgcacctttgcacaatcatatctgtacaagttttggcggcatatgcttatttcaaattaggcttgtggtgttagattaatatattcattggatatggtgtgaatttctgagggataccggatgatgtgtacacctgtttgtctttgtcaaaatgttatcatgcattctttttgtctttgtcaaaatgttatc

SEQ ID NO: 4529 - DNA, 9122 bp, Zea Mays
cgccgtacgcggtgcataggggacatgagggtgctgctgtctaggtcgtgtaggtcggtcgccggtcccgcccgccgtctccacggccaagaccgtggtggcgtcctcctccaacgttcgtccgtgtttgtctccatggcgctctcgaatgcctaagccaaggccgaccgcctcgagctggtgctcgacgaaacgccccgcaggaccgagttctggtagaccatgctcgtcgattcgctggcgagggccggccgacagcacgacgcattctgcctctctgcggagatgcgggcctccagcgtggcctgcgactcccacgtctgcgtatgtcactacgggaagagctacatattcatcgtaaattatgtgcaaaggatgtacaagcaagctgcccttgtgcagacagactcagaggtgtagagaagacatggtgtccgctgaggattgcaagatccattgctgcataggctgatgtatgcggcacaccatcaggagcagactgatcccgcacacataagtgcacgctttgcggattttatcctgggaattctgaatttggcttgccctttgcggattttcaagtggtgtgtgctatttgtggataggtttggtgctgcgaacagagtgttagaaccaaattcttgtcaggctaaaccgatttatatcatagatgcagaaaaaagaaataaaggagatttttgacgagtttcatttttttatggaaccttcgttggtggctcgagcaacatataaaggcgatcatcacttccgatgagttgagttttattgcttactatttccttccttccgattcttagctgctaggagctttcaagttgttccctcccataatctagagtaattacagatctgtacacgttatataagcaatttcccttatgcaaacctggatgattagttatgtatatagaattttgaagagaaaatatattttttcgaatacagactttgttctgccctcgaatcctccattttaaatagcagcttgatgtactagttctcacgtcatgctgctataaaataattggaaggccatagtttatttgattgccatagcccaaagtttcacttccattgccatggttgagtgatgaatttccatgatgctcctatggcgtaaaacaaactaaaaaaggtcgtcattaatcattgttggagttgtggtaaaacatatatcaaatcatttggttcatgtgaactgatctagaaaccacgttctgtatcagcaactcagcgcacaaggctgactagagagcaactgtaagcttaccacaaacactaaaagccttcttccaactggtatgacagttccacttggcttctccctatgtgtgtttcaaatcaaaatgtgcaagagacacatacccaattgaagacccatccatggtgcctgaaacattaataaaccttatgtagttccaaacctcacggcataatatagcaagctgattgcggttaacttaccactgagagggcattttttgtaacggtcgatggtgcccggcacgatttcaccaattaaggacccactttcatcatttgtttgtggagtcctcaacgattgatgattactacctagccatgtaccagcagttgacactggactcgttaaaaaagatcttgtgacctgtacaatcaactacaaacttataatttcgtaaacctgtatttgactatttgttagcatactgcacagcagtgaaagcagagacattcagtagttagataggtagaaacttaagagcatacttcttgacttatgaggtccacacacaaaaacgaaaaatcgtctaacatttgttcaaacagatgaagcgcatgtcattagagttggttgcccgtactatatctgtggacatgtgagcagatgttaacttggtttttattgtccaccttcccatcattggacatgtgagcacggctatcatggagttcttcaaccaatggcccacaatagtgcttgcccttttgaactcacccgcgttcaaaaacatcacatgctcacaaaatcagtaaggaaagcaataaaagacataacttgtttctaaaacggtggcttttgtttcttcagttcaccatcatattcaactttgtcattgtatgttgctaaaaaaactcggtcggggagggaaagaccgtcctcccggtattatattaagaaaagaccgaaacaatggtctcggtcgagaaaaacttcgaaccctggccctatcactaatgggcctcgtcaacggtccactctgcaacggctcaaccggagataagaataaaaaggggcccaaaggagcacccatatacaaacctcttgttacggcggccaaaaacaagcatacacaaaactatccataaaaacaccgagaaaactactgcagccctccagcactagtactgggagcagccaaaaaggagagaccctttgctccagcagcttgccatttctccctcttctcattgacaaaatccaagagcatggtgaggcttggtgacacaccatcaaataccactccgttcctatgcttccaaatcaaccatgccccaagaatgaccagagagtccaatccttgtcaagccagacacaatggctgaaattcttttccaccacaataggaagtgagtgtcatcatgaagaggagccaaactttcttagaatgttataccagcacacccttcagaaaacacaagataccagcaaatggttggtctctggctcttaatcacaaatggggcatctaggagggtgattcaagcctcttttttccagcctgtcagcagtccagcatctattatgagccaccaacaacaaaaaagaacttgcatttgggggtgcccaagacttctagatcctttgataatgttcaaaggaaacagatccaaaaagaggccattgtatacgaactagcagaatattggatatcgggggcaactgaaaaaatatgtttatccttagtattaggttgcaacaccataccagataaagagttccaaaggtgaagatagtcagtcaaagctcccacagttaatgcccctctaatatcagcaatccaacctctgtttaacaaggcttcttcatttggctagcctctattaatcattgttggacgactgatcgtctagcccgtagaggtttgggccacccccagtgttgcttactttgtgataagcaggaagagacggtgcaacacttgttggtgtcttgtgtttttgcaagggaggtctggttcagaagtttgggcagaatgaggttgcagcactcggcgcccattcctgattctgctgtgttccaggattggtggagagaatctgaggaattggtgcctaagccacaaaagtaaggattcaattccttggtgattttagtggcttggcaaatttggaaacataggaacacttgtgtttttgaagctgcttctccgtatatcagcaagattttgcatgatattcatgatgaagctgttttgtggggtatggctgggggtaggggcctatgaggccagtaaccatccctctccttcctgaggtctagtgtgtttggattggttgtgtgtgtctgatggattgtttcagttttctgtgtttttgccctccgtaaggaaacccatgtatttgcctatttggtcttcttagaccttttcctttcctgttaatataatgaggcacagttatcctgcgttttcgagaaaaacaaggtttcctgtacagttgttctggaagcaattctttttgggataatactgaacaaccttggggcaatatctgagactctctttccattaatccatttgtcagtccaaaaaagggtattacagccattcccaacctcagtgataagaataacagaaaagaatgatctggccttactaggaacttgtatagggagatcaatccatggtttggtagggttagttttttccaaccaaagccatctcattataagtgcccaacaaagctcagggaaactagagatacccacacctcccattgcctgaggtctgcacacttcccccaagcaaccagacaatggccacccttcgcttccctccttcctcttcataagaaacccttcccgatcttatcaaattcattaatgccccatttggggaagtcaatagccattgcagtatagacagacatcccagtaagaacatgctgcaccaaaactcttctgcctgccctgttaagcaaatcagccttccagttgggtaacctatcagcaattttgtccaccaagggccaggattgatgcttagaaagtttttgtaaggataatggaaggcccaaatatttgcaagggaaggaagcaatctcacaaggtaagatgttttgaacagccaggatagtttcctcagaacatcttatgggataaatattagacttttgagcattgttatggagtccagaagcatccccaaaaagttttaggatgtcaagggtggtagagatatcagcctgggtgggatgcaaaaacagggccacatcatcaacatagattgatattctgtgtaattttttcctgctgcataaatgttgtaacaaaccttcctcagctttgaaaaatagaaaactcagaacatccatagaaagaataaacagcattggagacaaatggtctccctgtctgaggcctcttctatgttggataattgtgcctggaccgccattcaaaagcacttgagtggtagatgatccaagaagctcacatatgatgtctctccatatcagaccaaaacccatctgtttcattacttcaatcaagaaaggacaagaaacagaatcaaatgcttttattatatctaacttgaagagcaatctggccttattctgtgaatgcagtaatctggatttctgttggaccaacatgaaattgtcttgaataaatcttcctttgatgacagcactttggtttggggagactatctcattcagtttttttgccagtcggttggcaagcaccttggtgactaatttggcaaaactatgtaccaaactaatgggtctgaaatccttgacctgatcagccccctccactttagggatcatagtaatatatgctgaattgagtctgctcatatttgtgaaatttctgtgccaaacagctcccactgcctttagcacatcttttttgataatattccagcatactttatagaaccttccagtgaaaccatcaggcccaggggccttgttagaaggcaaatttctaatagtgtcccaagtttcctgttctgaaaatgggagatccaattcagagagattatgcacaggtaacccaagagcctcaaggtttatagttctttccctccctgcagccagccctataaggttgtatagaagtgatctacaagagcttctttctcagtatggctagttaaagtattctccccatctctgagtttggtcaccaagttctttctctttctatgtctggcatgcatgtgaaaaaacttggtgtttgcatccccatccttcaaccaactgattcttgatcttaatcttgccatagtccttttgaatgaggtcaacaacaaggattgctttttaagcttatttttaagccacaattcagcaggagtaaggaagatcctgggcaatctcaaacctgtgcaaaagctcctttgccaaagccaactaggaagtcacatggccaacctgcctatcactccaactctgtagtctcctctcctagaattttctttaagcttcctttgcaaggtcagataaggacaaggagaaggtccaacagaagtccaagcagcctgtacagtatcaaggaatccctccatgtttggccaaaatgcttgaaagtgaaatcctttctttccatggaaattatcctttagaccgagaagcaggggtcaatgatcagaatcttgggaggcagagctttgaagcagaacattagggaaatatgatgtcaatgagcagaaaaccctatcaagcttaaccaacacagggttgtcctgctaattagaccaggtgtattttctaccatgtagttgtattgtatctctcttagagcaagatcattgatcacagacctgaatctacccatcatagccctatttaggtttgaattatttttgtcagagtcccatgcaatgacccatgtcccatcacaagcagccctgatgtcctaaatttcttgaaggaaaagaattttctcagcatcagtctgaggcccatacacacaagttaaccaccagggaattccatcatctttgcaaaactggacagaaacacaatgggcatccatcctttgtactcctgtatgtcctacatttcttttcgaagcaactagaattcctccgctagcaccaacagaaggtagaaaaacaaattcagtaaactcaactcccgatgtcaccctgagtaataagttacatttttgtttcctgacagcacactatatccacctgaaaggaatccaccaggtctctaacagtatccatccgaacagaagaattaagacccctaacattccaaacaagaattttagaaggatccatagaaaacaaaatagatcaaccaagggggtgggaccagaacactaatacttcaaattatcaggaagtgcccagccaaatagggcagaaggggcttccacctgatcctaattcagaaagtgattgaacagcctagcatattcttttagagcttcccaatggggatggcaacgggaaattccccgtcggggaatagctccccatccccgtccccgcggcatccacacgaatgcttgtggggaacatttcttctccatccccatttcccacggggataaatccccaacggggatccccatccccgtttaaattataattaagacttacgttctttgttattgatgttaaacattgtcacttatacacattgtcagatgtaagaaatcattatgcatacatcaaaatgaacatgtttgtacaattagtggcctcttaacaaggtaattatttatttttgtcgttaactagtacacgaaaaaaacgtcacatgcaagtttaacgggccccgcggggaacggggaatgggaatgcttccccgtccccatccccgtttacccgtcgggggataaattttccccgtttatatccccgcgggggaagtttcttccccatcccctaatggaggacttctacgcggggaatcggagatcgggtccccattgccatctctacttcccaacacagattctctatatatgtttgatgatgtggttatatttatccaaccaacagttagagatattagtactgtactggacattcttcatatttttggggaggcttccgagttgcgaaccaatatccagaaaagcaatgtatacccaattagatgcggggaacaagacttgaccttgctgcaaaactcgtcgccttgtgagatctcgcaatttccctgcaaatacttgggtctacctcttgccataaaggaacttaccaaggaccaagtacaaccgattattgataaaattgctaaccaactgacagggtggaaagctgatttgatgactaaggctagattaaaggtacatgtgcagtttgtcctcacatggatggtcatatatctcgcaatggctgtggatttaccaccttgggctatcaaagtattgacaagatccgacgaggctttctttgccgagggcgcaaagaagcgagggaaggacactgtcttgttgcttggggaaaagtttgtcggccgcttgagcttggtgggctggggatttccaatctcaatgatcttgcttgggcacttcgtatgcgttggctctggttagcaaaaactgatccaagacggccatgggcatctcttgctatacaagttcccagcaatgctaaagatttcttctcagtggctatgcaaactgaaattcgtaatggggcctctactctgttttggtcttatcgttggttgatgggacacagggtcgtggacattgccccatcattattccagaatattcctaaaagaagggttaataagaagattgtcttggattatctctctaatcatacatggatttcggacatacaaggagctcttactgtatatcttgctctatgggataatcaccttggttcaacttagacctgaagtggatgacactcacttttttcgtctcgtcaccaatgggaagtattcagcaaaggcagcctatggggttttttccttgggtcgacgacttttgaaccgtactacagaatttggaaaacctgggttcctccaaagaccaagttcttcatgtggctggtagctcaacgaaggctttggatagttgacatgatgcaaaagaggcatggatcaccctgtgatcaggagcaggaaacacttgaccatctactgattgggtgcgtgttcgcccgggatttctggtttaaacttatatctcaagttaatctccaaagcatggcctctcagcatgttgatgcatcttttatgggctggtggagatggctgggcaatcaggtccatggagtggctgggtaaactctggtaattttaggagcatggacactgtagaaacaacggaataactttgtcttcgacagaactagacctaatgtggatcttgctgttaggatggctgatcaagagcgagagaagtggaagctggctggagcaagaaagctatccttgctaactagtcacatcccgggtcagtaggctgtgttagagttagtagttttgtgtgttttatacatggatgagtattagtgtgcctgtacttggcccccgtaaggtggctgttttgtattatctttgtatttcttcttaatggaatggtatgcagccctcctgcgtttttcgagaaaaaaacttcttgagctaaaacactatgtgatgctgtttggggggcatttgcaggatgttatactaccatgaatattggatgatgccactctagcaagtttaaacacaatgatacactcaaataatgtttatgttagtgcttctgcggttctgcctctccccagtgttggtatccttaaattgtttcccatttgttacttatgatatatatgcaagcaggtactaggtgcaagcgtgtaatcagactttttagcctgttagatctgtatccaacggtaaatataattgtggtttgt

SEQ ID NO: 4530 - DNA, 2670 bp, Zea Mays
cgccgtacgcggtgcataggggacatgagggtgctgctgtctaggtcgtgtaggtcggtcgccggtcccgcccgccgtctccacggccaagaccgtggtggcgtcctcctccaacgttcgtccgtgtttgtctccatggcgctctcgaatgcctaagccaaggccgaccgcctcgagctggtgctcgacgaaacgccccgcaggaccgagttctggtagaccatgctcgtcgattcgctggcgagggccggccgacagcacgacgcattctgcctctctgcggagatgcgggcctccagcgtggcctgcgactcccacgtctgcgtatgtcactacgggaagagctacatattcatcgtaaattatgtgcaaaggatgtacaagcaagctgcccttgtgcagacagactcagaggtgtagagaagacatggtgtccgctgaggattgcaagatccattgctgcataggctgatgtatgcggcacaccatcaggagcagactgatcccgcacacataagtgcacgctttgcggattttatcctgggaattctgaatttggcttgccctttgcggattttcaagtggtgtgtgctatttgtggataggtttggtgctgcgaacagagtgttagaaccaaattcttgtcaggctaaaccgatttatatcatagatgcagaaaaaagaaataaaggagatttttgacgagtttcatttttttatggaaccttcgttggtggctcgagcaacatataaaggcgatcatcacttccgatgaaatgtcttggaaaggagtgcagatgttactagacatgtatctggagaaggtgttcaacaagcattgttgaaaatcctagaaggaactgtaagttactaaagttgcctttggttttgtgcctgtggaattaggagtttagaagctatcttcgattcacttttttttataaggatctttgattgactttaaacctcagtaatgattctttgtatgttgcctacttattcctaacgcatgttgttaatattcatgagaaagtatcacacaagaattctcgcaatgatagtatacaggttacataccctatatggtccttaatgaatacgtgcactatatatcatatgggttaaatttggattcaattgaatgaaaaaggatctttaaaatgttcttttttatgtcataaggaccctgtactacattacacataatgagcagaggaagtgttacctcaaaaacatttattgacaaccagataacagcaaacacgctggttgtgttaaaaatgtgcagggcataagtattctactccctccgtcttaaaatataagaaatctagagttcaaaatttgcaccaaaatacaagtattctggagttccctttttctttgtcttttagcatacaatattgagattccttttaaaattagcatcacccaaacagccactcagttgtttgcagtcttattttcaatcttggattcatgcttttctgtttttctgctgaagatatttagttaccaatcttcctttctgtttggctttaaatatgtttttatctatcccaaaaagttgctcaacctatgtgcttttgaaatgctactacattttcagggcatagaataaggtgattgaccacttccatttaaaaattgcttccaacttttcctaaagaacattccacgaagtcataactcacgccctattggtgatgggcaaaaattagcgcattagctaccattcaagtgcttatataggttgtgaatgttttagtttgtgttatttgataatatatcaaacttgttttatttgaatgtaaatgatttggactgatatcttgcttcaagatcatctatgttttgttgtcttggatattgttactttatcttcataatttaccgctatcatttgtccttctcatattgatgttaggtagttccagttgacgatgtgtgaatcaggcaatcgtcgcccttgtgcagctttgctccatggtgaatttaaattattttattttgccaaactgattctgagttgtggaaaataccaacatacgagaactcagtttggtcaattatggcaatttcatttatatcactgcttgttatgtctgctatcctaggtgcttgtttctttgtgaggagacaccggataggatgggacattgctcgccctccccaagctcggtagttccatggaatgaacaaccaattagttaaagcaatgtcaagtcttattttcacacaaaagtgcaagatgttgattgtacatcatcaacatgtgccatttgcttggaagactacatcagaaacgtcatatattttggaacagaggtagtagtcaataattagcttattcgttttttatatggttgtatatatcctagcaagagaccactctgtagtcatttccttagtttcttgagagctgggaccacacttatagtgaagaaaactatgttcaactaacagaattaacttggatgcacctttgcacaatcatatctgtacaagttttggcggcatatgcttatttcaaattaggcttgtggtgttagattaatatattcattggatatggtgtgaatttctgagggataccggatgatgtgtacacctgtttgtctttgtcaaaatgttatcatgcattctttttgtctttgtcaaaatgttatc

SEQ ID NO: 4531 - DNA, 2255 bp, Zea Mays
gtgctgctgtctaggtcgtgtaggtcggtcgccggtcccgcccgccgtctccacggccaagaccgtggtggcgtcctcctccaacgttcgtccgtgtttgtctccatggcgctctcgaatgcctaagccaaggccgaccgcctcgagctggtgctcgacgaaacgccccgcaggaccgagttctggtagaccatgctcgtcgattcgctggcgagggccggccgacagcacgacgcattctgcctctctgcggagatgcgggcctccagcgtggcctgcgactcccacgtctgcgtatgtcactacgggaagagctacatattcatcgtaaattatgtgcaaaggatgtacaagcaagctgcccttgtgcagacagactcagaggtgtagagaagacatggtgtccgctgaggattgcaagatccattgctgcataggctgatgtatgcggcacaccatcaggagcagactgatcccgcacacataagaatgtcttggaaaggagtgcagatgttactagacatgtatctggagaaggtgttcaacaagcattgttgaaaatcctagaaggaactgtaagttactaaagttgcctttggttttgtgcctgtggaattaggagtttagaagctatcttcgattcacttttttttataaggatctttgattgactttaaacctcagtaatgattctttgtatgttgcctacttattcctaacgcatgttgttaatattcatgagaaagtatcacacaagaattctcgcaatgatagtatacaggttacataccctatatggtccttaatgaatacgtgcactatatatcatatgggttaaatttggattcaattgaatgaaaaaggatctttaaaatgttcttttttatgtcataaggaccctgtactacattacacataatgagcagaggaagtgttacctcaaaaacatttattgacaaccagataacagcaaacacgctggttgtgttaaaaatgtgcagggcataagtattctactccctccgtcttaaaatataagaaatctagagttcaaaatttgcaccaaaatacaagtattctggagttccctttttctttgtcttttagcatacaatattgagattccttttaaaattagcatcacccaaacagccactcagttgtttgcagtcttattttcaatcttggattcatgcttttctgtttttctgctgaagatatttagttaccaatcttcctttctgtttggctttaaatatgtttttatctatcccaaaaagttgctcaacctatgtgcttttgaaatgctactacattttcagggcatagaataaggtgattgaccacttccatttaaaaattgcttccaacttttcctaaagaacattccacgaagtcataactcacgccctattggtgatgggcaaaaattagcgcattagctaccattcaagtgcttatataggttgtgaatgttttagtttgtgttatttgataatatatcaaacttgttttatttgaatgtaaatgatttggactgatatcttgcttcaagatcatctatgttttgttgtcttggatattgttactttatcttcataatttaccgctatcatttgtccttctcatattgatgttaggtagttccagttgacgatgtgtgaatcaggcaatcgtcgcccttgtgcagctttgctccatggtgcttgtttctttgtgaggagacaccggataggatgggacattgctcgccctccccaagctcggtagttccatggaatgaacaaccaattagttaaagcaatgtcaagtcttattttcacacaaaagtgcaagatgttgattgtacatcatcaacatgtgccatttgcttggaagactacatcagaaacgtcatatattttggaacagaggtagtagtcaataattagcttattcgttttttatatggttgtatatatcctagcaagagaccactctgtagtcatttccttagtttcttgagagctgggaccacacttatagtgaagaaaactatgttcaactaacagaattaacttggatgcacctttgcacaatcatatctgtacaagttttggcggcatatgcttatttcaaattaggcttgtggtgttagattaatatattcattggatatggtgtgaatttctgagggataccggatgatgtgtacacctgtttgtctttgtcaaaatgttatcatgcattctttttgtctttgtcaaaatgttatc

SEQ ID NO: 4532 - DNA, 2107 bp, Zea Mays
atgcctaagccaaggccgaccgcctcgagctggtgctcgacgaaacgccccgcaggaccgagttctggtagaccatgctcgtcgattcgctggcgagggccggccgacagcacgacgcattctgcctctctgcggagatgcgggcctccagcgtggcctgcgactcccacgtctgcgtatgtcactacgggaagagctacatattcatcgtaaattatgtgcaaaggatgtacaagcaagctgcccttgtgcagacagactcagaggtgtagagaagacatggtgtccgctgaggattgcaagatccattgctgcataggctgatgtatgcggcacaccatcaggagcagactgatcccgcacacataagtgcacgctttgcggattttatcctgggaattctgaatttggcttgccctttgcggattttcaagtggtgtgtgctatttgtggataggtttggtgctgcgaacagagtgttagaaccaaattcttgtcaggctaaaccgatttatatcatagatgcaggtacatgtgcagtttgtcctcacatggatggtcatatatctcgcaatggctgtggatttaccaccttgggctatcaaagtattgacaagatccgacgaggctttctttgccgagggcgcaaagaagcgagggaaggacactgtcttgttgcttggggaaaagtttgtcggccgcttgagcttggtgggctggggatttccaatctcaatgatcttgcttgggcacttcgtatgcgttggctctggttagcaaaaactgatccaagacggccatgggcatctcttgctatacaagttcccagcaatgctaaagatttcttctcagtggctatgcaaactgaaattcgtaatggggcctctactctgttttggtcttatcgttggttgatgggacacagggtcgtggacattgccccatcattattccagaatattcctaaaagaagggttaataagaagattgtcttggattatctctctaatcatacatggatttcggacatacaaggagctcttactgtatatcttgctctatgggataatcaccttggttcaacttagacctgaagtggatgacactcacttttttcgtctcgtcaccaatgggaagtattcagcaaaggcagcctatggggttttttccttgggtcgacgacttttgaaccgtactacagaatttggaaaacctgggttcctccaaagaccaagttcttcatgtggctggtagctcaacgaaggctttggatagttgacatgatgcaaaagaggcatggatcaccctgtgatcaggagcaggaaacacttgaccatctactgattgggtgcgtgttcgcccgggatttctggtttaaacttatatctcaagttaatctccaaagcatggcctctcagcatgttgatgcatcttttatgggctggtggagatggctgggcaatcaggtccatggagtggctgggtaaactctggtaattttaggagcatggacactgtagaaacaacggaataactttgtcttcgacagaactagacctaatgtggatcttgctgttaggatggctgatcaagagcgagagaagtggaagctggctggagcaagaaagctatccttgctaactagtcacatcccgggtcagtaggctgtgttagagttagtagttttgtgtgttttatacatggatgagtattagtgtgcctgtacttggcccccgtaaggtggctgttttgtattatctttgtatttcttcttaatggaatggtatgcagccctcctgcgtttttcgagaaaaaaacttcttgagctaaaacactatgtgatgctgtttggggggcatttgcaggatgttatactaccatgaatattggatgatgccactctagcaagtttaaacacaatgatacactcaaataatgtttatgttagtgcttctgcggttctgcctctccccagtgttggtatccttaaattgtttcccatttgttacttatgatatatatgcaagcaggtactaggtgcaagcgtgtaatcagactttttagcctgttagatctgtatccaacggtaaatataattgtggtttgt

SEQ ID NO: 4533 - DNA, 2115 bp, Zea Mays
atgcctaagccaaggccgaccgcctcgagctggtgctcgacgaaacgccccgcaggaccgagttctggtagaccatgctcgtcgattcgctggcgagggccggccgacagcacgacgcattctgcctctctgcggagatgcgggcctccagcgtggcctgcgactcccacgtctgcgtatgtcactacgggaagagctacatattcatcgtaaattatgtgcaaaggatgtacaagcaagctgcccttgtgcagacagactcagaggtgtagagaagacatggtgtccgctgaggattgcaagatccattgctgcataggctgatgtatgcggcacaccatcaggagcagactgatcccgcacacataagatgttactagacatgtatctggagaaggtgttcaacaagcattgttgaaaatcctagaaggaactgtaagttactaaagttgcctttggttttgtgcctgtggaattaggagtttagaagctatcttcgattcacttttttttataaggatctttgattgactttaaacctcagtaatgattctttgtatgttgcctacttattcctaacgcatgttgttaatattcatgagaaagtatcacacaagaattctcgcaatgatagtatacaggttacataccctatatggtccttaatgaatacgtgcactatatatcatatgggttaaatttggattcaattgaatgaaaaaggatctttaaaatgttcttttttatgtcataaggaccctgtactacattacacataatgagcagaggaagtgttacctcaaaaacatttattgacaaccagataacagcaaacacgctggttgtgttaaaaatgtgcagggcataagtattctactccctccgtcttaaaatataagaaatctagagttcaaaatttgcaccaaaatacaagtattctggagttccctttttctttgtcttttagcatacaatattgagattccttttaaaattagcatcacccaaacagccactcagttgtttgcagtcttattttcaatcttggattcatgcttttctgtttttctgctgaagatatttagttaccaatcttcctttctgtttggctttaaatatgtttttatctatcccaaaaagttgctcaacctatgtgcttttgaaatgctactacattttcagggcatagaataaggtgattgaccacttccatttaaaaattgcttccaacttttcctaaagaacattccacgaagtcataactcacgccctattggtgatgggcaaaaattagcgcattagctaccattcaagtgcttatataggttgtgaatgttttagtttgtgttatttgataatatatcaaacttgttttatttgaatgtaaatgatttggactgatatcttgcttcaagatcatctatgttttgttgtcttggatattgttactttatcttcataatttaccgctatcatttgtccttctcatattgatgttaggtagttccagttgacgatgtgtgaatcaggcaatcgtcgcccttgtgcagctttgctccatggtgcttgtttctttgtgaggagacaccggataggatgggacattgctcgccctccccaagctcggtagttccatggaatgaacaaccaattagttaaagcaatgtcaagtcttattttcacacaaaagtgcaagatgttgattgtacatcatcaacatgtgccatttgcttggaagactacatcagaaacgtcatatattttggaacagaggtagtagtcaataattagcttattcgttttttatatggttgtatatatcctagcaagagaccactctgtagtcatttccttagtttcttgagagctgggaccacacttatagtgaagaaaactatgttcaactaacagaattaacttggatgcacctttgcacaatcatatctgtacaagttttggcggcatatgcttatttcaaattaggcttgtggtgttagattaatatattcattggatatggtgtgaatttctgagggataccggatgatgtgtacacctgtttgtctttgtcaaaatgttatcatgcattctttttgtctttgtcaaaatgttatc

SEQ ID NO: 4534 - DNA, 1287 bp, Zea Mays
ctcctggccaccggctcgggtgccgggatgtgagcacctgtgccgactttggagacgacgccttatggtttgcgaggtgagtttcagtttgtattttctttctgaattagttcatctctattacagactttataagccaactacctgagccgaataaacctaggcccataccaccagattaaggactaatgacccaactaagcaaaaccaaacagaaaatatgaatacaatgtttgaaccacccactgttctacttctggcacagctggccgatctcttcttcattcactatcttcagtggtcgtaacatgaaggtgacgaatttttcccacctcgtcagaatcacatcttggctcttagtttcttggtctatctcggcgagttagttcgtgataatgtcatacaagaattgcttcgaagggtcgaggatgtcatgttgcttacgcaggtatctgaccatagtttgctctatttagttctgcaacgagtccgtgctttgtgacggtgatgtaaggttaatggcacaaacacgaaactgaaagtaaaacggaagtagaacaaattaatgggagacgattatcttatagcaatctgcaccagattggtctctgtaaattgttcaagttgaaatgtagctcatttactatgttttcatgtcacaaaccatactgctttttacttgctattccttctgttgtcaaagtgggacactcgtatgtgatctaattagtgacaagcatgtctagaagtgacctattagcatgaccaggtcgtaaaatatttctgacaaattacttttcgttcttgattttctgtaaatcatgaatgcatggagtcgtatactggcaacctcctgagtcagctctggataagatcgaaaaaatctttagggaaccaactctcagtagatatggttctgatgatggtcttcccaagcttcgagaagcgcttcttgacaaggattgtcacttggatatatgacaacagtcatagttccactcaaaataggatgagtaaattgggcaccaaaagaagaaaggagggcatgatttatatgattgaccgaagggcggagacgtcaagcataaccatggtggtgctcgtcttcgcctgcgtcccagtggcacttgtctatgcattcgctggttggatcctctcctacttcggaggggactagccaggccaccacgacatcgttgtgtcgtcgtgcctgcaggctcgggcaccacagtaatcgatcaactccagtttctaggcagatgtgccttcgtccttgcctagtttgat

SEQ ID NO: 4535 - DNA, 2118 bp, Zea Mays
tgcgtcttgaggtagtaatttataagggcgtggagggagtttgttgaattctgttaccgtcggagtcggactctatctctatctccaaaagtccgttctaatctaatctcttcgtgcgtcgtcctaatcagcgcgagccgcagcccccgctgacgcgaatcgcgacctccgcgcgaccctccgccaccgcaccctccgctgacccggtctccctgccgcctggagcgatgaaaccgcaccctcgcgcccaagcccagactcaaaactcagccaaacccctcgcatcttcctgtggtggcgtcctcctccaacgttggtccgtgtttgtctctatggcgctctcgaatgcctaagccaaggccgaccgcctcgagctggtgctcgacgaaacgccccgcaggaccgagttctcgtagaccatgctcgtcgattcgctggcgagggccggccgacagcacgacgcattctgcctctctgcggagatgcgggcctccagcgtggcctgcgactcccacgtctgcgtatgtcactatgggaagagctacatcttcatcgtaaattatgtgcaaaggttagtctgttaatcatcttgcagatatctgcaaggattctatatgattccaaagtagatgtaataggtattcaggtaaatacaaatgaagttatattgcattgtttttgtcaattgtgtgtatagatttatattggtaagacatttatgtacgttgcaaatacatgctttctgttccctatatcataatataaacaattatgtaccttcctctctgcaagtctgtacagcagtacagacaagctgaagactcagaggtgtagagacgacatggtgtttgctgagggttgcaagacccactgttgcataggctgatctatgcgtcacaccatgaggagtagactgatccagcacgcacaaggtctggtacctctagattagcaaagccacagaacattgaacggcacggcaggtcctgcggtgacttctccatcaaattcggatcaaatagagtgatgaacttggatgcttcaaatcgtggcttatccatcagcttcgaatcggatagagtactactgaacatggacaatataaatcacagtttctccatcatcttcatatcaaacaggatactactgaacttggatactataaatcgaaaaccatctagggtatacatccttaatactcagatcagaccttgagcgattgtaatctaacctatttgattgtgaggggcaggcaacaggttcgattgtgctgctcggtttcgcagaacgcgaagaaaaggtacaagaagggcctggcctggtatgtgcgctgagttggtaatttatggggcgtcgaggagcgcatcccgtttatttgtattctattaagatattctaaaccgaacggcacggtcagacctgttccaacccgaggggccagcactgctccaactcgggatcacacgtctgtattctatatcttttgtagaaaaacttattaaacttttggtcttcacttttcttcttgtcaggctgaactgatttatctcatagtcggaggtgatttttttcttatgattatgatcctaaaggggattcagttggaccgtgctgttttgctataactgtaaagttagggtgccaaatagttgatgcacctgcttcatcatctagaaaaaagaaataaaggagatttctgatgagtttcattttttctttttatggaaccttcgttggtggctcgagcaacatataaagttaaagtaccagtgtgcagaggaggcatgtaggtgatgcttttcaaaataacaagtcgatggtgcctggcgcgatttcaccaattcaggacccgctttcatcatttgtgtatggagtcctgaatgatggatgattactacccagccatgtaccagcagttgacactggattcgttcaaaaagatcttgtgaattctacaataaactacaaacttataatttcctaaacctgtatttgactatttgttagcatactgcacagtagtgaaagcagagacattcagtagttagatgggtagaaacttttttttttctggaatacgcaggagagctgcgcatctttgtattaatagaagaaaag

SEQ ID NO: 4536 - DNA, 2178 bp, Zea Mays
ggagtttgttgaattctgttaccgtcggagtcggactctatctctatctccaaaagtccgttctaatctaatctcttcgtgcgtcgtcctaatcagcgcgagccgcagcccccgctgacgcgaatcgcgacctccgcgcgaccctccgccaccgcaccctccgctgacccggtctccctgccgcctggagcgatgaaaccgcaccctcgcgcccaagcccagactcaaaactcagccaaacccctcgcatcttcctgtggtggcgtcctcctccaacgttggtccgtgtttgtctctatggcgctctcgaatgcctaagccaaggccgaccgcctcgagctggtgctcgacgaaacgccccgcaggaccgagttctcgtagaccatgctcgtcgattcgctggcgagggccggccgacagcacgacgcattctgcctctctgcggagatgcgggcctccagcgtggcctgcgactcccacgtctgcgtatgtcactatgggaagagctacatcttcatcgtaaattatgtgcaaaggttagtctgttaatcatcttgcagatatctgcaaggattctatatgattccaaagtagatgtaataggtattcaggtaaatacaaatgaagttatattgcattgtttttgtcaattgtgtgtatagatttatattggtaagacatttatgtacgttgcaaatacatgctttctgttccctatatcataatataaacaattatgtaccttcctctctgcaagtctgtacagcagtacagacaagctgaagactcagaggtgtagagacgacatggtgtttgctgagggttgcaagacccactgttgcataggctgatctatgcgtcacaccatgaggagtagactgatccagcacgcacaaggtctggtacctctagattagcaaagccacagaacattgaacggcacggcaggtcctgcggtgacttctccatcaaattcggatcaaatagagtgatgaacttggatgcttcaaatcgtggcttatccatcagcttcgaatcggatagagtactactgaacatggacaatataaatcacagtttctccatcatcttcatatcaaacaggatactactgaacttggatactataaatcgaaaaccatctagggtatacatccttaatactcagatcagaccttgagcgattgtaatctaacctatttgattgtgaggggcaggcaacaggttcgattgtgctgctcggtttcgcagaacgcgaagaaaaggtacaagaagggcctggcctggtatgtgcgctgagttggtaatttatggggcgtcgaggagcgcatcccgtttatttgtattctattaagatattctaaaccgaacggcacggtcagacctgttccaacccgaggggccagcactgctccaactcgggatcacacgtctgtattctatatcttttgtagaaaaacttattaaacttttggtcttcacttttcttcttgtcaggctgaactgatttatctcatagtcggaggtgatttttttcttatgattatgatcctaaaggggattcagttggaccgtgctgttttgctataactgtaaagttagggtgccaaatagttgatgcacctgcttcatcatctagaaaaaagaaataaaggagatttctgatgagtttcattttttctttttatggaaccttcgttggtggctcgagcaacatataaagttaaagtaccagtgtgcagaggaggcatgtaggtgatgcttttcaaaataacaagtacttaatgagaaatggaaaggtccaaccgatacaattgaatagttacccaaaaggtgctgccgacaccaccatcttgctctttatcttcagtatctgcaacttttttggctgactgggggaggtgttcttattcctgagtcccttagctgagggtgaaagggctataaagccaagaagaggaagaaggggtgaagaattcaggttttcggaagcaatactgaagactattttttggtttctctttgcaatatgctctattgggattggattttcaatcactgttattaataatctaacacaaatatgagttgttgcatgtcatgtcgacacaaccatctcactctctgccttcagtttttgcaatttttggctgcctgggaggtgttgttgttcctgag

SEQ ID NO: 4537 - DNA, 1980 bp, Zea Mays
gttgaattctgttaccgtcggagtcggactctatctctatctccaaaagtccgttctaatctaatctcttcgtgcgtcgtcctaatcagcgcgagccgcagcccccgctgacgcgaatcgcgacctccgcgcgaccctccgccaccgcaccctccgctgacccggtctccctgccgcctggagcgatgaaaccgcaccctcgcgcccaagcccagactcaaaactcagccaaacccctcgcatcttcctgtggtggcgtcctcctccaacgttggtccgtgtttgtctctatggcgctctcgaatgcctaagccaaggccgaccgcctcgagctggtgctcgacgaaacgccccgcaggaccgagttctcgtagaccatgctcgtcgattcgctggcgagggccggccgacagcacgacgcattctgcctctctgcggagatgcgggcctccagcgtggcctgcgactcccacgtctgcgtatgtcactatgggaagagctacatcttcatcgtaaattatgtgcaaaggttagtctgttaatcatcttgcagatatctgcaaggattctatatgattccaaagtagatgtaataggtattcaggtaaatacaaatgaagttatattgcattgtttttgtcaattgtgtgtatagatttatattggtaagacatttatgtacgttgcaaatacatgctttctgttccctatatcataatataaacaattatgtaccttcctctctgcaagtctgtacagcagtacagacaagctgaagactcagaggtgtagagacgacatggtgtttgctgagggttgcaagacccactgttgcataggctgatctatgcgtcacaccatgaggagtagactgatccagcacgcacaaggtctggtacctctagattagcaaagccacagaacattgaacggcacggcaggtcctgcggtgacttctccatcaaattcggatcaaatagagtgatgaacttggatgcttcaaatcgtggcttatccatcagcttcgaatcggatagagtactactgaacatggacaatataaatcacagtttctccatcatcttcatatcaaacaggatactactgaacttggatactataaatcgaaaaccatctagggtatacatccttaatactcagatcagaccttgagcgattgtaatctaacctatttgattgtgaggggcaggcaacaggttcgattgtgctgctcggtttcgcagaacgcgaagaaaaggtacaagaagggcctggcctggctgaactgatttatctcatagtcggaggtgatttttttcttatgattatgatcctaaaggggattcagttggaccgtgctgttttgctataactgtaaagttagggtgccaaatagttgatgcacctgcttcatcatctagaaaaaagaaataaaggagatttctgatgagtttcattttttctttttatggaaccttcgttggtggctcgagcaacatataaaggtgatcatcacttccgacgattaaagtaccagtgtgcagaggaggcatgtaggtgatgcttttcaaaataacaagtacttaatgagaaatggaaaggtccaaccgatacaattgaatagttacccaaaaggtgctgccgacaccaccatcttgctctttatcttcagtatctgcaacttttttggctgactgggggaggtgttcttattcctgagtcccttagctgagggtgaaagggctataaagccaagaagaggaagaaggggtgaagaattcaggttttcggaagcaatactgaagactattttttggtttctctttgcaatatgctctattgggattggattttcaatcactgttattaataatctaacacaaatatgagttgttgcatgtcatgtcgacacaaccatctcactctctgccttcagtttttgcaatttttggctgcctgggaggtgttgttgttcctgag

SEQ ID NO: 4538 - DNA, 1790 bp, Zea Mays
gtcggagtcggactctatctctatctccaaaagtccgttctaatctaatctcttcgtgcgtcgtcctaatcagcgcgagccgcagcccccgctgacgcgaatcgcgacctccgcgcgaccctccgccaccgcaccctccgctgacccggtctccctgccgcctggagcgatgaaaccgcaccctcgcgcccaagcccagactcaaaactcagccaaacccctcgcatcttcctgtggtggcgtcctcctccaacgttggtccgtgtttgtctctatggcgctctcgaatgcctaagccaaggccgaccgcctcgagctggtgctcgacgaaacgccccgcaggaccgagttctcgtagaccatgctcgtcgattcgctggcgagggccggccgacagcacgacgcattctgcctctctgcggagatgcgggcctccagcgtggcctgcgactcccacgtctgcgtatgtcactatgggaagagctacatcttcatcgtaaattatgtgcaaaggttagtctgttaatcatcttgcagatatctgcaaggattctatatgattccaaagtagatgtaataggtattcaggtaaatacaaatgaagttatattgcattgtttttgtcaattgtgtgtatagatttatattggtaagacatttatgtacgttgcaaatacatgctttctgttccctatatcataatataaacaattatgtaccttcctctctgcaagtctgtacagcagtacagacaagctgaagactcagaggtgtagagacgacatggtgtttgctgagggttgcaagacccactgttgcataggctgatctatgcgtcacaccatgaggagtagactgatccagcacgcacaaggtctggtacctctagattagcaaagccacagaacattgaacggcacggcaggtcctgcggtgacttctccatcaaattcggatcaaatagagtgatgaacttggatgcttcaaatcgtggcttatccatcagcttcgaatcggatagagtactactgaacatggacaatataaatcacagtttctccatcatcttcatatcaaacaggatactactgaacttggatactataaatcgaaaaccatctagggtatacatccttaatactcagatcagaccttgagcgattgtaatctaacctatttgattgtgaggggcaggcaacaggttcgattgtgctgctcggtttcgcagaacgcgaagaaaaggtacaagaagggcctggcctggtatgtgcgctgagttggtaatttatggggcgtcgaggagcgcatcccgtttatttgtattctattaagatattctaaaccgaacggcacggtcagacctgttccaacccgaggggccagcactgctccaactcgggatcacacgtctgtattctatatcttttgtagaaaaacttattaaacttttggtcttcacttttcttcttgtcaggctgaactgatttatctcatagtcggaggtgatttttttcttatgattatgatcctaaaggggattcagttggaccgtgctgttttgctataactgtaaagttagggtgccaaatagttgatgcacctgcttcatcatctagaaaaaagaaataaaggagatttctgatgagtttcattttttctttttatggaaccttcgttggtggctcgagcaacatataaagttaaagtaccagtgtgcagaggaggcatgtaggtgatgcttttcaaaataacaaggggaacactcacattccaagtgcctctctcaaggt

SEQ ID NO: 4539 - DNA, 2729 bp, Zea Mays
ggaaccaccaccatgcaaatatgcaattcgccgccgctctaacaaaaaccccaacccgctacaccctcccggccgatggctcagtccacccctgatcccccggctttagtggcgatgacgttggcggagctagaggcagccatcgccgccctgcccggcaagtggggtgccctgcgggaggcgttcgatcgcctcgccgcctgctcaccctcgccgctccccttcgcctgggaggacctcgacggctacatctcctcgctccagtcgtcagtcgcgctgcggtttcgccaggtccgcgcactcgaggccgccggcgctgtacctgctgctgccgcgtcgttggtaactcgcggagatggaaagggagaaaaccaggagttggaggaggatgatgaattagatgaggatgtcgcggtggaagtggaggagaaggtcgcggtggaagtggaggaggaggccgatgaggagatacaggaagccgacagcgataagatttgcaatgatgaaaaggatgggaaggaggcgagagaggtggaagtggagaaggaggtggcggagttggagaaggccgatgaggatatgcaggaagccaacagcgacaagttttgcaatgatgaaaaggacgggaacgagacaagagaggtggaagtggaggacgaggtggcagaactggagaagaaggccgatttggagatgcaagaagttgactacgataaaatttgcaatgatgaaaaggacgagaaggggggcaaagaagaggtggtggaggaagagggagttgaggaggcatccaacatcaagattggcaatgagattaagtatgagaaggagtcaagggaggaggagcaggccagtaaggtgaatgagcaagatcctgacaaggagatgcaggtggttgataaggacaagctgaataccaaaggtgcttttaaggcttctcaggacaaggagaaggatcaggataccaacatggatgagacagtgaccaagatggcgtcttcagtgcagcacaaggagggggaggaggcttgcgacaggaagcagaaggaagcacagaaacaggaccttcatgagaaggtggaaggtaccaaaaatgctaaggaccagggtaatcgagctcttccacgcagatctgatgattgcactgtagcatgtgcatacatggatgccaagaggttggtcaagctcgtatgcaccaacactgacctcaaatcagagcttcatgctgcatttcgctgtgctccagatgctgcagcagtcgctctccacgtagttgagttattcctacacaacaagacatttgttaggaccaacaaggtctgggcaaactgtgttgagctagttcaaatggtacctgtatttgttaccaagccttctgcagacacgactgagcaggccaagcggatggctaaggattggaaggagatgattgacagtccagagagttgctatgttcttggcagcctagcctcgtggggcctcctttactttcttatctcctataacattgtaactgagtttgacatgaaggagatcttccgtctctttggtaacatccctttcaaacagaagaagaaatctgccatgctcttaaaaggtcttgggctcagcaatagaatcccagagttaatggactatttgatcggaaacggacaacaaatggatgttttatgtttggcacgtgttcttaacatggtggacaagtatcctccactttctcttctgaagggatatgtcgaaaaggcaaaacaaactgctatggaaatatctcaaaagaatatgacacgccaattgagggtagttataataaaggagcttgatgatctaagaagggctcattttttggttaagaaggaaatcacgaacaccaacctctgcaccagtatcagggaagaaatcaacattttgttaggtgagcttgaaaaaaagaagcggggtttagcaaatcccttgacagcctcaacttcaaattcacagcagcgacaaacaaagattaacaagaagcgcaaggtaatgcagaagcaggagcatcacaaaggacaagaagaccggatgcaagggcaactgagtgggctggcagagaagcccgagaagaaacaaaggaagccccaacaggagcagcaacaggaacaagaaaataagccggaagagaagaaacagaaacaagaagatgggccagaagagaagaaaccgaaacacgaatataagccagaagagaagaaacggaaacaagaagataagtcagaagagaagcagcaacagaaaaagcagaaacatcataaatggctgaggcaacgcactcccatgctacctgcacagggttaccctgcaatgtggaacgcagcaatgaggagcgacttggagcctccaccatatgccgcgacgcatggagtccatcatggttaccaccaccctgtccagccaggctggcctggggttcattgcgcatcgccgttcataggaccctctacaccctggtaccctcctcctcagttctatcccaggtagcagtacctgctgtgttgaggggtgttgctccatcgcccagtataacatggattacgcgcaggagttcagttaggactttggagaaatagagtgttcttttgcaacatggtgtatgtacagttgccagtcacttgcatcgattcgttgaagaactttatacgggtagccttatagtctggtctctggtcacgttcacgtatgacgtattcagccaagtgccg

SEQ ID NO: 4540 - DNA, 1712 bp, Zea Mays
gatgcttcggttgtggagttgcaaggctgaaggcgcaatctcaccacaatccctcccggcgccgcccgccggtcgctcccgacgctatgttccgccttcgaaattgcattcttccacatctactcttctcgtcccgccgctcctcttcctgcatcacccccctccatcgcctcctctccggttccgccgccaccaccgcgagcaaccctttcacggtcgccgactacctcgtcgccagatgcggtctctccagggagcaggtcctcaaggcatccaaaatcaaaaggatcctcgacctcaggtctccctcgaagcccgacgtcgtcctcgccttcctggcgggcctcgacatctccggcaccgacctcacaaccgtcatcgccaatgatcccagactcctttgcaccgacgtggggaagaccctgtctctccgcgtcgccgagctccgcagcctcggcctgtcaagccaccaggtcggccaggtagtcatcgccgcccagatccggttccgcagcccctcgttcctccgcaattttgaattctggcttgggctcttcggctccttcgacgagctcttgcggttcgtcaagatgaacggcaacctcctcagcgtcaacctcgagaaggttgccatgcccaacctggccctccttcagcgatgcgggatggagatttccgatattcccaacactttcctgtcccggatacttgtcaggagcactgagcacctccaggaaactctggcacgcgtttcagagtttggaatccagcagggatcgtgggttttccctttcgcgttcatgaggtttgcgatcttgaaccgtgagaagctcgacagtaatatacagctgtttgagaagcttgggtggtcgagggatgatatagcatcagcagtgaggaaggcgccgaatatcctgagcttaactccggaaagggttcataaaaagttggattttctaatgggtgttgttgggttgcagatggcagtcattgtgtatcggccagtgctgctattgcatagtgtggagcgtcggttgttgccgcggtattacttgatgaaatttctcaagaacaggggattgatgagttctagtttaagcttcctaactattgcatcgatgggcaatgataatcttctggataaacttgtgcaccctcacgagatgagtgtcccaggtcttgctgctgcttatgcttctagctgcgctggaaaacaccagtgggagctccttgacgacatgacaaagggaaagagaaagagaaagtgctaagacatgttctggtaactagtgctgtgaaggatctcttctaagccgtcttcagccgcccagccgacgtcctctgcgctgcccgctacggcgctaccgtcgtccagagactccatagccgccagtgctgagtgctgacagtgcccagtccatagccaccgccagtgcccatagccgccgccaccagtgcccagttctgctgacagttaatttgttgaatcaatctctatttggtgacagtgaatttgaatggcaacaaatagcgaggcattgtctgccggttaaattctataacaagtctgaaaagacgtttcaacgttcgtttaaacatttaaacgttgaaaagttggttcataacgttttaacgttttaccgttttaataaccatgggtctgagtagcatccctcagatcttgagtttgacttttaggctggaggtaaaaa

SEQ ID NO: 4541 - DNA, 1608 bp, Zea Mays
gatgcttcggttgtggagttgcaaggctgaaggcgcaatctcaccacaatccctcccggcgccgcccgccggtcgctcccgacgctatgttccgccttcgaaattgcattcttccacatctactcttctcgtcccgccgctcctcttcctgcatcacccccctccatcgcctcctctccggttccgccgccaccaccgcgagcaaccctttcacggtcgccgactacctcgtcgccagatgcggtctctccagggagcaggtcctcaaggcatccaaaatcaaaaggatcctcgacctcaggtctccctcgaagcccgacgtcgtcctcgccttcctggcgggcctcgacatctccggcaccgacctcacaaccgtcatcgccaatgatcccagactcctttgcaccgacgtggggaagaccctgtctctccgcgtcgccgagctccgcagcctcggcctgtcaagccaccaggtcggccaggtagtcatcgccgcccagatccggttccgcagcccctcgttcctccgcaattttgaattctggcttgggctcttcggctccttcgacgagctcttgcggttcgtcaagatgaacggcaacctcctcagcgtcaacctcgagaaggttgccatgcccaacctggccctccttcagcgatgcgggatggagatttccgatattcccaacactttcctgtcccggatacttgtcaggagcactgagcacctccaggaaactctggcacgcgtttcagagtttggaatccagcagggatcgtgggttttccctttcgcgttcatgaggtttgcgatcttgaaccgtgagaagctcgacagtaatatacagctgtttgagaagcttgggtggtcgagggatgatatagcatcagcagtgaggaaggcgccgaatatcctgagcttaactccggaaagggttcataaaaagttggattttctaatgggtgttgttgggttgcagatggcagtcattgtgtatcggccagtgctgctattgcatagtgtggagcgtcggttgttgccgcggtattacttgatgaaatttctcaagaacaggggattgatgagttctagtttaagcttcctaactattgcatcgatgggcaatgataatcttctggataaacttgtgcaccctcacgagatgagtgtcccaggtcttgctgctgcttatgcttctagctgcgctggaaaacaccagtgggagctccttgacgacatgacaaagggaaagagaaagagaaagtgctaagacatgttctggtaactagtgctgtgaaggatctcttctaaggagacctatactgtcaatcaccaaaaagagcattgggtttgatctgaagggcagtgctacgtctatgtgactttgagcaatttctggtacttagggcttcgctttcaccaggttctcggggcattgtgtttttggaataccttctaggactgctgtctgacggccttgctggctaaggaaaaagtggggattgcggtctctaagttctgtctccaacaacaccctgtaaagggtcctgtcctctaaatatagaggactgtcaggtcccctatggctccagcaaggcactctattc

SEQ ID NO: 4542 - DNA, 1635 bp, Zea Mays
gatgcttcggttgtggagttgcaaggctgaaggcgcaatctcaccacaatccctcccggcgccgcccgccggtcgctcccgacgctatgttccgccttcgaaattgcattcttccacatctactcttctcgtcccgccgctcctcttcctgcatcacccccctccatcgcctcctctccggttccgccgccaccaccgcgagcaaccctttcacggtcgccgactacctcgtcgccagatgcggtctctccagggagcaggtcctcaaggcatccaaaatcaaaaggatcctcgacctcaggtctccctcgaagcccgacgtcgtcctcgccttcctggcgggcctcgacatctccggcaccgacctcacaaccgtcatcgccaatgatcccagactcctttgcaccgacgtggggaagaccctgtctctccgcgtcgccgagctccgcagcctcggcctgtcaagccaccaggtcggccaggtagtcatcgccgcccagatccggttccgcagcccctcgttcctccgcaattttgaattctggcttgggctcttcggctccttcgacgagctcttgcggttcgtcaagatgaacggcaacctcctcagcgtcaacctcgagaaggttgccatgcccaacctggccctccttcagcgatgcgggatggagatttccgatattcccaacactttcctgtcccggatacttgtcaggagcactgagcacctccaggaaactctggcacgcgtttcagagtttggaatccagcagggatcgtgggttttccctttcgcgttcatgaggtttgcgatcttgaaccgtgagaagctcgacagtaatatacagctgtttgagaagcttgggtggtcgagggatgatatagcatcagcagtgaggaaggcgccgaatatcctgagcttaactccggaaagggttcataaaaagttggattttctaatgggtgttgttgggttgcagatggcagtcattgtgtatcggccagtgctgctattgcatagtgtggagcgtcggttgttgccgcggtattacttgatgaaatttctcaagaacaggggattgatgagttctagtttaagcttcctaactattgcatcgatgggcaatgataatcttctggataaacttgtgcaccctcacgagatgagtgtcccaggtcttgctgctgcttatgcttctagctgcgctggaaaacaccagtgggagctccttgacgacatgacaaagggaaagagaaagagaaagtgctaagacatgttctggtaactagtgctgtgaaggatctcttctaaggagacctatactgtcaatcaccaaaaagagcattgggtttgatctgaagggcagtgctacgtctatgtgactttgagcaatttctggtacttagggcttcgctttcaccaggttctcggggcattgtgtttttggaataccttctaggactgctgtctgacggccttgctggctaaggaaaaagaaacgctgtgacgctgctttgttttagtggggattgcggtctctaagttctgtctccaacaacaccctgtaaagggtcctgtcctctaaatatagaggactgtcaggtcccctatggctccagcaaggcactctattc

SEQ ID NO: 4543 - DNA, 858 bp, Zea Mays
ctgccttagactagctgttgcgctcgccttatctcttggtgaaggtttcttgaagctgagaagatggtgctgaagacagaactctgccgcttcagcggccagaagatttatcctgggaaaggcatccgatttatccgtgctgattctcaggttttcctttttgccaactcaaaatgcaagcgctacttccacaaccgcctgaagcctgcaaagcttacctggacagcaatgtacaggaagcagcacaagaaggatatccatgctgaggctgtcaagaagaggcgccgcgccaccaagaagccatactcgaggtccattgtgggtgcttccctagaggtgatccagaagaagagggctgagaagcccgaggtccgcgatgctgctagagaagctgctcttcgtgagatcaaggagcgcatcaagaagaccaaggatgagaagaaggcgaaaaaggctgaggtgaccaagtcccagaaggcacagacgaagggagcggtccagaagggttccaagggccccaagttgggtggtggcggtggcaagcgctgaaagaacctaagtgtcgttccttgaccttgcaattgctcctccatagcccaccttgttgcaccaacgccacttttgtagtacctcggttaattttgcattttctttcagagttgtttgtgggttttgagttccatctcaagagagttgagtttatttatctttatattgggtgaaatgttcatatgctttcctcagcttggatgatggtttgctttgtttctcagctgtgtttggttagacaaggctgatatgcccgcgccatcctggctcggtgctggtgcctcagtgaaaccgaatgatctgctatag

SEQ ID NO: 4544 - DNA, 1345 bp, Zea Mays
cgccaggtgtctaggtcgctgccgccctacgcctacggcaggtgccaggtgcccagctcttgttcggcccgtacgccggcgaggagcaccaccagggatactaaatatgcagaaagatgctcgtcgaaattcttggaaaataattaatgacaatattagattgcataaagaactggaaaccaagaaaaaaagaaattggcaggagacacgaggaacttgagaagttggttatgaacagtactaacagagaaaagcttgaagcggcaaaagaagagattgcaaaggagaacaggcttctcgatttagcaaccctaaagaagaaggaagaagatgagaagttcttaaaacttgtaaaggaacaagagcaagagaaagaaaatgtcaggaagatgctatatgatttagaaatgcagttggcttccaaacaaaaacttgaactggaaagagaacagttgagggggaatcttgaggtatggaagcatatgggaaaggaagatgcaaaatcgaaggaaatgctcgataagttgcatgaagcactgaaagagaaagatgaagaaatggatcatattgattctataaaccagacccttattattaagcaacgaagaaccaatgatgagctggaagaagccaagaaagaactgactactgacctacttaatatgtcatcagctcgatccattgttggtgtcaaaaaaatgggtgagcttgacaagaaagctttcattgtctcttgcaaagagaaaacagcagacgagttgtcattgtcaattctgtgctcgaaatgggaagatgagatcaggcaaccagaatggcatcctttcaaagttatagatgttggtggacaggcaaaggaaataattcgggaggatgatgagaagctgcaagctttgaaggctgaactgggtgtgcaggcgcacgatgtggtcgtcaaggcccttcttgagatgaacgagtacaatccaagcggcaggtaccccataccggagctgtggaacttcaaggaggaccggagagcaccgatgggcgaggcagtagcctacatagtgaagcagtggaaggcgaacaagaggaagcattaggcgggcctgatgcctgatggcccttgtgccattggttcctgggtcgatgtccctgacagtgagagctgagaccctgatcccctgactttttctgctgatggaagacctagtaccagtagcactactaaaaaaattgtccgatctcttggacggttagattggctatggcacctagtgcaatgatctatatgtataaaaaatatctgtagtgtttaatgattttaccagaactagataaagattatagaatatttattattata

SEQ ID NO: 4545 - DNA, 2260 bp, Zea Mays
cgccaggtgtctaggtcgctgccgccctacgcctacggcaggtgccaggtgcccagctcttgttcggcccgtacgccggcgaggagcaccaccaggattttgtcccatttctccagttccaatggaacatagctctgcagaagattcagacattagcgattcagatattgctgagcacaaggaggagatttgtgcccaactccgagcagggaaattgaacgtgaagcgtggtgaggccttccgctgccctttctgccctggcaagaagaggcaggactacaacctaaaggatctactgcagcatgccacaggaataggggctgcttctaagcgcagcgccaaggtgaaggcatcacacctggggcttgctatgttcttggagaaggatatagccagcacgttggagcaaccattgcaaattgttccctacaagccaaaaactccaaaggatgaagagatctttgtgtggccatggatgggcattgtggttaatttgcagtgtgagttcaaaggcaaagaatgttccagggaaagtgaagaaaggctaacagcacagttctcgcggttcagacccctccaagccacaacccttagggatggaaagaaccaacagttttgcgctatcgtcaagtttgctaaggattggagtggatttaaggatgcaatggcttttgaaaatcattttgtactcgagcagtacagtaagcctgattggaaaaaaagaaattgcagaaaggacgacctttatggatggcttgcaaaaacagatgattacaactcacctgagccaattggggagtatctaaggaaaaatggaaatcttagaagtgttggtgacctggaacgagagggtctgaaagaaactggcgagcgtgtagctcattatgctcgccaaattgacgcaacaaataaacatatgagtgaactggagctgaagaacaatcagaatgcaatgaaacttgataggatgttggaggagaatgatcgattggttgaagagcacaatgaaaggatactaaatatgcagaaagatgctcgtcgaaattcttggaaaataattaatgacaatattagattgcataaagaactggaaaccaagaaaaaaagaaattggcaggagacacgaggaacttgagaagttggttatgaacagtactaacagagaaaagcttgaagcggcaaaagaagagattgcaaaggagaacaggcttctcgatttagcaaccctaaagaagaaggaagaagatgagaagttcttaaaacttgtaaaggaacaagagcaagagaaagaaaatgtcaggaagatgctatatgatttagaaatgcagttggcttccaaacaaaaacttgaactggaaagagaacagttgagggggaatcttgaggtatggaagcatatgggaaaggaagatgcaaaatcgaaggaaatgctcgataagttgcatgaagcactgaaagagaaagatgaagaaatggatcatattgattctataaaccagacccttattattaagcaacgaagaaccaatgatgagctggaagaagccaagaaagaactgactactgacctacttaatatgtcatcagctcgatccattgttggtgtcaaaaaaatgggtgagcttgacaagaaagctttcattgtctcttgcaaagagaaaacagcagacgagttgtcattgtcaattctgtgctcgaaatgggaagatgagatcaggcaaccagaatggcatcctttcaaagttatagatgttggtggacaggcaaaggaaataattcgggaggatgatgagaagctgcaagctttgaaggctgaactgggtgtgcaggcgcacgatgtggtcgtcaaggcccttcttgagatgaacgagtacaatccaagcggcaggtaccccataccggagctgtggaacttcaaggaggaccggagagcaccgatgggcgaggcagtagcctacatagtgaagcagtggaaggcgaacaagaggaagcattaggcgggcctgatgcctgatggcccttgtgccattggttcctgggtcgatgtccctgacagtgagagctgagaccctgatcccctgactttttctgctgatggaagacctagtaccagtagcactactaaaaaaattgtccgatctcttggacggttagattggctatggcacctagtgcaatgatctatatgtataaaaaatatctgtagtgtttaatgattttaccagaactagataaagattatagaatatttattattata

SEQ ID NO: 4546 - DNA, 2175 bp, Zea Mays
cgccaggtgtctaggtcgctgccgccctacgcctacggcaggtgccaggtgcccagctcttgttcggcccgtacgccggcgaggagcaccaccagttccaatggaacatagctctgcagaagattcagacattagcgattcagatattgctgagcacaaggaggagatttgtgcccaactccgagcagggaaattgaacgtgaagcgtggtgaggccttccgctgccctttctgccctggcaagaagaggcaggactacaacctaaaggatctactgcagcatgccacaggaataggggctgcttctaagcgcagcgccaaggtgaaggcatcacacctggggcttgctatgttcttggagaaggatatagccagcacgttggagcaaccattgcaaattgttccctacaagccaaaaactccaaaggatgaagagatctttgtgtggccatggatgggcattgtggttaatttgcagtgtgagttcaaaggcaaagaatgttccagggaaagtgaagaaaggctaacagcacagttctcgcggttcagacccctccaagccacaacccttagggatggaaagaaccaacagttttgcgctatcgtcaagtttgctaaggattggagtggatttaaggatgcaatggcttttgaaaatcattttgtactcgagcagtacagtaagcctgattggaaaaaaagaaattgcagaaaggacgacctttatggatggcttgcaaaaacagatgattacaactcacctgagccaattggggagtatctaaggaaaaatggaaatcttagaagtgttggtgacctggaacgagagggtctgaaagaaactggcgagcgtgtagctcattatgctcgccaaattgacgcaacaaataaacatatgagtgaactggagctgaagaacaatcagaatgcaatgaaacttgataggatgttggaggagaatgatcgattggttgaagagcacaatgaaaattgcataaagaactggaaaccaagaaaaaaagaaattggcaggagacacgaggaacttgagaagttggttatgaacagtactaacagagaaaagcttgaagcggcaaaagaagagattgcaaaggagaacaggcttctcgatttagcaaccctaaagaagaaggaagaagatgagaagttcttaaaacttgtaaaggaacaagagcaagagaaagaaaatgtcaggaagatgctatatgatttagaaatgcagttggcttccaaacaaaaacttgaactggaaagagaacagttgagggggaatcttgaggtatggaagcatatgggaaaggaagatgcaaaatcgaaggaaatgctcgataagttgcatgaagcactgaaagagaaagatgaagaaatggatcatattgattctataaaccagacccttattattaagcaacgaagaaccaatgatgagctggaagaagccaagaaagaactgactactgacctacttaatatgtcatcagctcgatccattgttggtgtcaaaaaaatgggtgagcttgacaagaaagctttcattgtctcttgcaaagagaaaacagcagacgagttgtcattgtcaattctgtgctcgaaatgggaagatgagatcaggcaaccagaatggcatcctttcaaagttatagatgttggtggacaggcaaaggaaataattcgggaggatgatgagaagctgcaagctttgaaggctgaactgggtgtgcaggcgcacgatgtggtcgtcaaggcccttcttgagatgaacgagtacaatccaagcggcaggtaccccataccggagctgtggaacttcaaggaggaccggagagcaccgatgggcgaggcagtagcctacatagtgaagcagtggaaggcgaacaagaggaagcattaggcgggcctgatgcctgatggcccttgtgccattggttcctgggtcgatgtccctgacagtgagagctgagaccctgatcccctgactttttctgctgatggaagacctagtaccagtagcactactaaaaaaattgtccgatctcttggacggttagattggctatggcacctagtgcaatgatctatatgtataaaaaatatctgtagtgtttaatgattttaccagaactagataaagattatagaatatttattattata

SEQ ID NO: 4547 - DNA, 2262 bp, Zea Mays
cgccaggtgtctaggtcgctgccgccctacgcctacggcaggtgccaggtgcccagctcttgttcggcccgtacgccggcgaggagcaccaccagaggattttgtcccatttctccagttccaatggaacatagctctgcagaagattcagacattagcgattcagatattgctgagcacaaggaggagatttgtgcccaactccgagcagggaaattgaacgtgaagcgtggtgaggccttccgctgccctttctgccctggcaagaagaggcaggactacaacctaaaggatctactgcagcatgccacaggaataggggctgcttctaagcgcagcgccaaggtgaaggcatcacacctggggcttgctatgttcttggagaaggatatagccagcacgttggagcaaccattgcaaattgttccctacaagccaaaaactccaaaggatgaagagatctttgtgtggccatggatgggcattgtggttaatttgcagtgtgagttcaaaggcaaagaatgttccagggaaagtgaagaaaggctaacagcacagttctcgcggttcagacccctccaagccacaacccttagggatggaaagaaccaacagttttgcgctatcgtcaagtttgctaaggattggagtggatttaaggatgcaatggcttttgaaaatcattttgtactcgagcagtacagtaagcctgattggaaaaaaagaaattgcagaaaggacgacctttatggatggcttgcaaaaacagatgattacaactcacctgagccaattggggagtatctaaggaaaaatggaaatcttagaagtgttggtgacctggaacgagagggtctgaaagaaactggcgagcgtgtagctcattatgctcgccaaattgacgcaacaaataaacatatgagtgaactggagctgaagaacaatcagaatgcaatgaaacttgataggatgttggaggagaatgatcgattggttgaagagcacaatgaaaggatactaaatatgcagaaagatgctcgtcgaaattcttggaaaataattaatgacaatattagattgcataaagaactggaaaccaagaaaaaaagaaattggcaggagacacgaggaacttgagaagttggttatgaacagtactaacagagaaaagcttgaagcggcaaaagaagagattgcaaaggagaacaggcttctcgatttagcaaccctaaagaagaaggaagaagatgagaagttcttaaaacttgtaaaggaacaagagcaagagaaagaaaatgtcaggaagatgctatatgatttagaaatgcagttggcttccaaacaaaaacttgaactggaaagagaacagttgagggggaatcttgaggtatggaagcatatgggaaaggaagatgcaaaatcgaaggaaatgctcgataagttgcatgaagcactgaaagagaaagatgaagaaatggatcatattgattctataaaccagacccttattattaagcaacgaagaaccaatgatgagctggaagaagccaagaaagaactgactactgacctacttaatatgtcatcagctcgatccattgttggtgtcaaaaaaatgggtgagcttgacaagaaagctttcattgtctcttgcaaagagaaaacagcagacgagttgtcattgtcaattctgtgctcgaaatgggaagatgagatcaggcaaccagaatggcatcctttcaaagttatagatgttggtggacaggcaaaggaaataattcgggaggatgatgagaagctgcaagctttgaaggctgaactgggtgtgcaggcgcacgatgtggtcgtcaaggcccttcttgagatgaacgagtacaatccaagcggcaggtaccccataccggagctgtggaacttcaaggaggaccggagagcaccgatgggcgaggcagtagcctacatagtgaagcagtggaaggcgaacaagaggaagcattaggcgggcctgatgcctgatggcccttgtgccattggttcctgggtcgatgtccctgacagtgagagctgagaccctgatcccctgactttttctgctgatggaagacctagtaccagtagcactactaaaaaaattgtccgatctcttggacggttagattggctatggcacctagtgcaatgatctatatgtataaaaaatatctgtagtgtttaatgattttaccagaactagataaagattatagaatatttattattata

SEQ ID NO: 4548 - DNA, 2239 bp, Zea Mays
cgccaggtgtctaggtcgctgccgccctacgcctacggcaggtgccaggtgcccagctcttgttcggcccgtacgccggcgaggagcaccaccagttccaatggaacatagctctgcagaagattcagacattagcgattcagatattgctgagcacaaggaggagatttgtgcccaactccgagcagggaaattgaacgtgaagcgtggtgaggccttccgctgccctttctgccctggcaagaagaggcaggactacaacctaaaggatctactgcagcatgccacaggaataggggctgcttctaagcgcagcgccaaggtgaaggcatcacacctggggcttgctatgttcttggagaaggatatagccagcacgttggagcaaccattgcaaattgttccctacaagccaaaaactccaaaggatgaagagatctttgtgtggccatggatgggcattgtggttaatttgcagtgtgagttcaaaggcaaagaatgttccagggaaagtgaagaaaggctaacagcacagttctcgcggttcagacccctccaagccacaacccttagggatggaaagaaccaacagttttgcgctatcgtcaagtttgctaaggattggagtggatttaaggatgcaatggcttttgaaaatcattttgtactcgagcagtacagtaagcctgattggaaaaaaagaaattgcagaaaggacgacctttatggatggcttgcaaaaacagatgattacaactcacctgagccaattggggagtatctaaggaaaaatggaaatcttagaagtgttggtgacctggaacgagagggtctgaaagaaactggcgagcgtgtagctcattatgctcgccaaattgacgcaacaaataaacatatgagtgaactggagctgaagaacaatcagaatgcaatgaaacttgataggatgttggaggagaatgatcgattggttgaagagcacaatgaaaggatactaaatatgcagaaagatgctcgtcgaaattcttggaaaataattaatgacaatattagattgcataaagaactggaaaccaagaaaaaaagaaattggcaggagacacgaggaacttgagaagttggttatgaacagtactaacagagaaaagcttgaagcggcaaaagaagagattgcaaaggagaacaggcttctcgatttagcaaccctaaagaagaaggaagaagatgagaagttcttaaaacttgtaaaggaacaagagcaagagaaagaaaatgtcaggaagatgctatatgatttagaaatgcagttggcttccaaacaaaaacttgaactggaaagagaacagttgagggggaatcttgaggtatggaagcatatgggaaaggaagatgcaaaatcgaaggaaatgctcgataagttgcatgaagcactgaaagagaaagatgaagaaatggatcatattgattctataaaccagacccttattattaagcaacgaagaaccaatgatgagctggaagaagccaagaaagaactgactactgacctacttaatatgtcatcagctcgatccattgttggtgtcaaaaaaatgggtgagcttgacaagaaagctttcattgtctcttgcaaagagaaaacagcagacgagttgtcattgtcaattctgtgctcgaaatgggaagatgagatcaggcaaccagaatggcatcctttcaaagttatagatgttggtggacaggcaaaggaaataattcgggaggatgatgagaagctgcaagctttgaaggctgaactgggtgtgcaggcgcacgatgtggtcgtcaaggcccttcttgagatgaacgagtacaatccaagcggcaggtaccccataccggagctgtggaacttcaaggaggaccggagagcaccgatgggcgaggcagtagcctacatagtgaagcagtggaaggcgaacaagaggaagcattaggcgggcctgatgcctgatggcccttgtgccattggttcctgggtcgatgtccctgacagtgagagctgagaccctgatcccctgactttttctgctgatggaagacctagtaccagtagcactactaaaaaaattgtccgatctcttggacggttagattggctatggcacctagtgcaatgatctatatgtataaaaaatatctgtagtgtttaatgattttaccagaactagataaagattatagaatatttattattata

SEQ ID NO: 4549 - DNA, 2791 bp, Zea Mays
atgggactagtgtgcatccggaatcgaaaatgggatgggaccaagtctcttgtagaaatacggtttatgaataagtctccaaatcactcgttgtacatagattctgctgtcatccttcaaactgaactgatatttttagcgctagacagcgcggattcaccatttgatgagtgggagatacgttcagtaggtaatgccgcccgcttttccatgtgttcacccataggattttgtcccatttctccagttccaatggaacatagctctgcagaagattcagacattagcgattcagatattgctgagcacaaggaggagatttgtgcccaactccgagcagggaaattgaacgtgaagcgtggtgaggccttccgctgccctttctgccctggcaagaagaggcaggactacaacctaaaggatctactgcagcatgccacaggaataggggctgcttctaagcgcagcgccaaggtgaaggcatcacacctggggcttgctatgttcttggagaaggatatagccagcacgttggagcaaccattgcaaattgttccctacaagccaaaaactccaaaggatgaagagatctttgtgtggccatggatgggcattgtggttaatttgcagtgtgagttcaaaggcaaagaatgttccagggaaagtgaagaaaggctaacagcacagttctcgcggttcagacccctccaagccacaacccttagggatggaaagaaccaacagttttgcgctatcgtcaagtttgctaaggattggagtggatttaaggatgcaatggcttttgaaaatcattttgtactcgagcagtacagtaagcctgattggaaaaaaagaaattgcagaaaggacgacctttatggatggcttgcaaaaacagatgattacaactcacctgagccaattggggagtatctaaggaaaaatggaaatcttagaagtgttggtgacctggaacgagagggtctgaaagaaactggcgagcgtgtagctcattatgctcgccaaattgacgcaacaaataaacatatgagtgaactggagctgaagaacaatcagaatgcaatgaaacttgataggatgttggaggagaatgatcgattggttgaagagcacaatgaaaggatactaaatatgcagaaagatgctcgtcgaaattcttggaaaataattaatgacaatattagattgcataaagaactggaaaccaagaaaaaaagaaattggcaggagacacgaggaacttgagaagttggttatgaacagtactaacagagaaaagcttgaagcggcaaaagaagagattgcaaaggagaacaggcttctcgatttagcaaccctaaagaagaaggaagaagatgagaagttcttaaaacttgtaaaggaacaagagcaagagaaagaaaatgtcaggaagatgctatatgatttagaaatgcagttggcttccaaacaaaaacttgaactggaaagagaacagttgagggggaatcttgaggtatggaagcatatgggaaaggaagatgcaaaatcgaaggaaatgctcgataagttgcatgaagcactgaaagagaaagatgaagaaatggatcatattgattctataaaccagacccttattattaagcaacgaagaaccaatgatgagctggaagaagccaagaaagaactgactactgacctacttaatatgtcatcagctcgatccattgttggtgtcaaaaaaatgggtgagcttgacaagaaagctttcattgtctcttgcaaagagaaaacagcagacgagttgtcattgtcaattctgtgctcgaaatgggaagatgagatcaggcaaccagaatggcatcctttcaaagttatagatgttggtggacaggcaaaggaaataattcgggaggatgatgagaagctgcaagctttgaaggctgaactgggtgtgcaggcgcacgatgtggtcgtcaaggcccttcttgagatgaacgagtacaatccaagcggcaggtaccccataccggagctgtggaacttcaaggaggaccggagagcaccgatgggcgaggcagtagcctacatagtgaagcagtggaaggcgaacaagaggaagcattaggcgggcctgatgcctgatggcccttgtgccattggttcctgggtcgatgtccctgacagtgaccgagactgcagacttccaaaaggacctgagcttggacagcttagaccgggtggaacttgttatggcctttgaacaagagttctccgttgagatccctgatgacaaggctgacaagctgacctgttgtgcggatgttgccaagtacatcatatccgaatctgaagcgagtgatacaaatgccggtggatcctgagggacagatgaaaccgagtgcaatgtttctttttctttttgtgtgtgtgtttatcataacgagtctgggttacaaaggacgatctatgcgcatgatttccttttaatttttttttccagtatggaaggaaatgctgttccaatgcgtttatattgtctgtcaatactgtgaaactatctctatctcggttgtttgtcacaaagtgaagttttttctatgtcgatcatggttcatgttcaagacttgtacattgtactggattctattagcatagccaatgctatacgttttctgtacactggtatttctttttttttaaaaaaaaaatctcctacagtggatatttttgtttcttttgaccgctgctgtccagaatatatttccgacctatggtaccatcaattgac

SEQ ID NO: 4550 - DNA, 80 bp, Zea Mays
gttcatcttctgcaattgcaccactcaactctgctcctcgtaacattaacttcagttcatcttcagtaacatatggttca

SEQ ID NO: 4551 - DNA, 56 bp, Zea Mays
ctccctttcaggcctagaatctttagcatccccattgacagaaaagtaacaatccg

SEQ ID NO: 4552 - DNA, 176 bp, Zea Mays
atggactgcaacacttttgggagtgatttctgtaagaagtaagatggcaacctaaaaaatggtgctctatagttagattaaagaacacttgttcaagagcagaaggtcagtatgagagaggagacatactgtcatgacacctgttgctgcactaacgcctgcttcaccgaacattg

SEQ ID NO: 4553 - DNA, 3832 bp, Zea Mays
ttacacgtgcagaaccaagcttcaaagcaagttaggccacacaaacacatgcgttgcatccgcgagcacagccagaccatcggaccaaggtcgcaaacgtgcctattgtatccaaacatgaatgatgaaggcgcacatctataggctggaaacgcaaaccacggcgcggcgcacgcaggattcgtctccgcgctcttttttcccttttcccggttccctccactggccgtctcccccaacctcaaaattcgaaagctggggcgccctgcggccgcacaggatgctcctgtcaccgcacggacggctaggatctcaccgagacgcctcggtcgccgtgcccgcgcccaaaccggttaggaaggaaataaaatggaagacgtcctcgtctccatcgccggttgtgtctcctcctatccatttctccagtcgtttctctcccctcgcgctgcccatggccatcccggaggacctagaggggacctcgggcgatggcggggtgacgaatcgcgggagtagagggcggcgaaaaggcgcggcgaaggggcgcgggaggggcaggccgcggagcgccgacagatcctttccgccgccggcgatggctggggtggcggtcggggacagggtgctcagggagaggaggcacacgaccaacgttttctgcgagcgcgacacggatgttgacgatgaggatgatgttgagacagttaggtccaaggactcaaggagtggcgatgttttacagactgcaaaaaagaggaagaagggaggtgcagggaaggtttctgtcacaaaaaggtcgaaaagagagggtgaagaacaaaagaaggcatcaccctccaaggataaagattgtgctgaaactaatgggaaaaggaagatgttgactggggataatgccctgatgtgccaccagtgccagaggaatgataaagggagggtggtctggtgtaattcatgcagaaataagcgcttctgtgtgccatgcattgaaagatggtatcctaacttgtcagaagacgaatttgctgcaaaatgcccatattgtcgcaagaactgtaattgcaaaggatgccttagaatgagaggggttgaagagcctccaaagaaggaaatttctgaagaaaatcaaatctcttatgcttgcaatgttgtgcgcttgttgcttccctggttgagaaaactgcgacaggagcagatggaggagaagaaattggaggctaaaataaaaggtgttttggtgaatgagatgaagttggaacaagctgaatataatctagatgagcgtgtctactgcaataattgcaaaacttctatagttgattttcacagaagctgcaagtactgcttttatgatctgtgccttgactgctgtgtggagatccgcagaggtgagattcctggaggagaagagataatgagagtaaagcctgaagatagaggccgagcatatctttttggtactactaactcaaaggatgggagtaaaaggttctccatgaggaggcacagctcatccctggagaatgagccttccaatgtagtaggttctagtgagggggcaaataactctctggagctgtggaaagcagaaagtgatggtagcataccttgcccaccaaaggagctaggaggctgtggcggttcgattttggatctcaagtgtttttttccagaaaagatgctttcaaatttagaagaacgagctgacagaattatgaggagcgaagtatttgcaaaagcagtagccaaaagaagtgaccagtgcccttgttatgaccattcaggaaacataagaactcaggacgtgcgagagactgcaaatacgaaaggctcaagtgataaccatctctactgcccagttgccactgctatcaaggaggatgacttggcgcactttcagatgcactggacaaaaggcgaaccagttattgtttctgatgttctgcatttgacttctggtctaagttgggaaccattagttatgtggcgggcattgcgagagaaaaagactaatggtgacgtagaagatgagcactttgctgtcagggcattagattgccttgattggtgtgaggtggaaattaacatacacatgttttttgtgggatatatgaaaggcagaacgcatcacatgacacactggcctgagatgcttaagctaaaggactggccgccatctagttcttttgatcagagattgcctcgccatggtgctgagtttatcagtgcattgccatttcctgagtacactgatcctcgatatggtccgctgaatcttacagtcaagctacctgatggtgcattgaagccagatcttggaccaaaaacttacatcgcttatggattttaccaagagttaggcaggggtgattctgtgaccaagcttcactgtgacatgtctgatgcggtaaatatattgacacacacagcacaagtgccctatgcgcgttatcaacttgagaagatagaggaaaccagaaagaaaatgaaagaacaagatcttcaggaactttatggtgtttcagaactaaacctatcatcaccttttactgattccaggaatataagtgctgatgaaatgtcaaagacctcatgtaactatggtttggacgtcaatgatgtaccacctgttaataatgaatctgaggtacaaagtggggcaggccagtgttcagattacattgacaaggatagaagttatgctgggatgcataacggggagagaaccggtggtgccttatgggatattttccgaagagaagattctgacaagatacaagattatcttaggaaacatgccacggaattccggcacatcttttgcaatcctgtgaagcaggttattcacccaattcacgatcagactttctacttaaccgaggagcataagagaaagctcaaggaagaatatggtgttgaaccctggacgtttgagcagaagcttggtgaagcggttttcattcctgctggatgtcctcaccaagtgaggaacttgaagtcttgcattaaggttgcgatggactttgtctccccagaaagcgtcaacgagtgcatgaaactgactggagagtttaggcggcttccacctgatcacagggctaaagaggataagctggagatcaagaagattgctcttcatgctctgaaccaagtagtaaatttcttggatccttcctcggagtggtcgaagagttggtttgcccaactcaagaacaaaaaaaaggctggagctgaagaacaggagaagcctaaaaggaagcgtggccgcccatgtcgcaagtccaacgatgaagctgctggcgataggcacagaaagaagggcggccgccaaagaggtcggaagaggggatacggcaagtccaaagatggcgctggcgctgttgatgtgaagcctcctaaaaggcagcgcaatctcctgaaaggctctggcaatcgtgtaggtggttgattgtttcactgctgactgggaagatggaaggcgtaagggctgtaccgacccaaccttgacgtggttattttggtaccaggttgtaagtgtagactctagattgtagaatagaccaggcatttcgtcacccctgggcgccattatggcgtcttgcttttgttcatatgtggcgattgccggttgacaccgttttggaagaataatatgctagatgctcgttgtaccagactcttcatgtagcgggctatggtgaattgctgttcagcatgtctgatgctgatgttggtaattgacctgaatagatgtggtcatttgaactctctggattctgattttacatatccaatccattggctgaggctgagcattcttagttgaaaaacg

SEQ ID NO: 4554 - DNA, 3871 bp, Zea Mays
ccgcgcccaaaccggttaggaaggaaataaaatggaagacgtcctcgtctccatcgccggttgtgtctcctcctatccatttctccagtcgtttctctcccctcgcgctgcccatggccatcccggaggacctagaggggacctcgggcgatggcggggtgacgaatcgcgggagtagagggcggcgaaaaggcgcggcgaaggggcgcgggaggggcaggccgcggagcgccgacagatcctttccgccgccggcgatggctggggtggcggtcggggacagggtgctcagggagaggaggcacacgaccaacgttttctgcgagcgcgacacggatgttgacgatgagtccatttattttcaggatgatgttgagacagttaggtccaaggactcaaggagtggcgatgttttacagactgcaaaaaagaggaagaagggaggtgcagggaaggtttctgtcacaaaaaggtcgaaaagagagggtgaagaacaaaagaaggcatcaccctccaaggataaagattgtgctgaaactaatgggaaaaggaagatgttgactggggataatgccctgatgtgccaccagtgccagaggaatgataaagggagggtggtctggtgtaattcatgcagaaataagcgcttctgtgtgccatgcattgaaagatggtatcctaacttgtcagaagacgaatttgctgcaaaatgcccatattgtcgcaagaactgtaattgcaaaggatgccttagaatgagaggggttgaagagcagcctccaaagaaggaaatttctgaagaaaatcaaatctcttatgcttgcaatgttgtgcgcttgttgcttccctggttgagaaaactgcgacaggagcagatggaggagaagaaattggaggctaaaataaaaggtgttttggtgaatgagatgaagttggaacaagctgaatataatctagatgagcgtgtctactgcaataattgcaaaacttctatagttgattttcacagaagctgcaagtactgcttttatgatctgtgccttgactgctgtgtggagatccgcagaggtgagattcctggaggagaagagataatgagagtaaagcctgaagatagaggccgagcatatctttttggtactactaactcaaaggatgggagtaaaaggttctccatgaggaggcacagctcatccctggagaatgagccttccaatgtagtaggttctagtgagggggcaaataactctctggagctgtggaaagcagaaagtgatggtagcataccttgcccaccaaaggagctaggaggctgtggcggttcgattttggatctcaagtgtttttttccagaaaagatgctttcaaatttagaagaacgagctgacagaattatgaggagcgaagtatttgcaaaagcagtagccaaaagaagtgaccagtgcccttgttatgaccattcaggaaacataagaactcaggacgtgcgagagactgcaaatacgaaaggctcaagtgataaccatctctactgcccagttgccactgctatcaaggaggatgacttggcgcactttcagatgcactggacaaaaggcgaaccagttattgtttctgatgttctgcatttgacttctggtctaagttgggaaccattagttatgtggcgggcattgcgagagaaaaagactaatggtgacgtagaagatgagcactttgctgtcagggcattagattgccttgattggtgtgaggtcaggagttatatttcattgaatgtttgagtgcatcctgtgaccttttatatttatgtatatatttaaatgtttccgtttgtattcctcttagatgtgctgttacttatttttgtagacttccctaggtgcatttagagagatgttcatttccctagctgatttttgtagacttccctaggtccctttgtgctctgctgcatatctttgtcccatgctgattttcatggtcgtacaactcttctagaagatttctttattaccatgacaagaaacaggacatgctctacaagtaaagtacaatgttgaattatcaatggatttgaattctatttcaattttgatggaattgtgttacctgtatgcatgcagatagactgctcacagctctgttgtcaacaggcagaacgcatcacatgacacactggcctgagatgcttaagctaaaggactggccgccatctagttcttttgatcagagattgcctcgccatggtgctgagtttatcagtgcattgccatttcctgagtacactgatcctcgatatggtccgctgaatcttacagtcaagctacctgatggtgcattgaagccagatcttggaccaaaaacttacatcgcttatggattttaccaagagttaggcaggggtgattctgtgaccaagcttcactgtgacatgtctgatgcggtaaatatattgacacacacagcacaagtgccctatgcgcgttatcaacttgagaagatagaggaaaccagaaagaaaatgaaagaacaagatcttcaggaactttatggtgtttcagaactaaacctatcatcaccttttactgattccaggaatataagtgctgatgaaatgtcaaagacctcatgtaactatggtttggacgtcaatgatgtaccacctgttaataatgaatctgaggtacaaagtggggcaggccagtgttcagattacattgacaaggatagaagttatgctgggatgcataacggggagagaaccggtggtgccttatgggatattttccgaagagaagattctgacaagatacaagattatcttaggaaacatgccacggaattccggcacatcttttgcaatcctgtgaagcaggttattcacccaattcacgatcagactttctacttaaccgaggagcataagagaaagctcaaggaagaatatggtgttgaaccctggacgtttgagcagaagcttggtgaagcggttttcattcctgctggatgtcctcaccaagtgaggaacttgaagtcttgcattaaggttgcgatggactttgtctccccagaaagcgtcaacgagtgcatgaaactgactggagagtttaggcggcttccacctgatcacagggctaaagaggataagctggagatcaagaagattgctcttcatgctctgaaccaagtagtaaatttcttggatccttcctcggagtggtcgaagagttggtttgcccaactcaagaacaaaaaaaaggctggagctgaagaacaggagaagcctaaaaggaagcgtggccgcccatgtcgcaagtccaacgatgaagctgctggcgataggcacagaaagaagggcggccgccaaagaggtcggaagaggggatacggcaagtccaaagatggcgctggcgctgttgatgtgaagcctcctaaaaggcagcgcaatctcctgaaaggctctggcaatcgtgtaggtggttgattgtttcactgctgactgggaagatggaaggcgtaagggctgtaccgacccaaccttgacgtggttattttggtaccaggttgtaagtgtagactctagattgtagaatagaccaggcatttcgtcacccctgggcgccattatggcgtcttgcttttgttcatatgtggcgattgccggttgacaccgttttggaagaataatatgctagatgctcgttgtaccagactcttcatgtagcgggctatggtgaattgctgttcagcatgtctgatgctgatgttggtaattgacctgaatagatgtggtcatttgaactctctggattctgattttacatatccaatccattggctgaggctgagcattcttagttgaaaaacg

SEQ ID NO: 4555 - DNA, 3374 bp, Zea Mays
ctcctcctatccatttctccagtcgtttctctcccctcgcgctgcccatggccatcccggaggacctagaggggacctcgggcgatggcggggtgacgaatcgcgggagtagagggcggcgaaaaggcgcggcgaaggggcgcgggaggggcaggccgcggagcgccgacagatcctttccgccgccggcgatggctggggtggcggtcggggacagggtgctcagggagaggaggcacacgaccaacgttttctgcgagcgcgacacggatgttgacgatgagactgcaaaaaagaggaagaagggaggtgcagggaaggtttctgtcacaaaaaggtcgaaaagagagggtgaagaacaaaagaaggcatcaccctccaaggataaagattgtgctgaaactaatgggaaaaggaagatgttgactggggataatgccctgatgtgccaccagtgccagaggaatgataaagggagggtggtctggtgtaattcatgcagaaataagcgcttctgtgtgccatgcattgaaagatggtatcctaacttgtcagaagacgaatttgctgcaaaatgcccatattgtcgcaagaactgtaattgcaaaggatgccttagaatgagaggggttgaagagcctccaaagaaggaaatttctgaagaaaatcaaatctcttatgcttgcaatgttgtgcgcttgttgcttccctggttgagaaaactgcgacaggagcagatggaggagaagaaattggaggctaaaataaaaggtgttttggtgaatgagatgaagttggaacaagctgaatataatctagatgagcgtgtctactgcaataattgcaaaacttctatagttgattttcacagaagctgcaagtactgcttttatgatctgtgccttgactgctgtgtggagatccgcagaggtgagattcctggaggagaagagataatgagagtaaagcctgaagatagaggccgagcatatctttttggtactactaactcaaaggatgggagtaaaaggttctccatgaggaggcacagctcatccctggagaatgagccttccaatgtagtaggttctagtgagggggcaaataactctctggagctgtggaaagcagaaagtgatggtagcataccttgcccaccaaaggagctaggaggctgtggcggttcgattttggatctcaagtgtttttttccagaaaagatgctttcaaatttagaagaacgagctgacagaattatgaggagcgaagtatttgcaaaagcagtagccaaaagaagtgaccagtgcccttgttatgaccattcaggaaacataagaactcaggacgtgcgagagactgcaaatacgaaaggctcaagtgataaccatctctactgcccagttgccactgctatcaaggaggatgacttggcgcactttcagatgcactggacaaaaggcgaaccagttattgtttctgatgttctgcatttgacttctggtctaagttgggaaccattagttatgtggcgggcattgcgagagaaaaagactaatggtgacgtagaagatgagcactttgctgtcagggcattagattgccttgattggtgtgaggtggaaattaacatacacatgttttttgtgggatatatgaaaggcagaacgcatcacatgacacactggcctgagatgcttaagctaaaggactggccgccatctagttcttttgatcagagattgcctcgccatggtgctgagtttatcagtgcattgccatttcctgagtacactgatcctcgatatggtccgctgaatcttacagtcaagctacctgatggtgcattgaagccagatcttggaccaaaaacttacatcgcttatggattttaccaagagttaggcaggggtgattctgtgaccaagcttcactgtgacatgtctgatgcggtaaatatattgacacacacagcacaagtgccctatgcgcgttatcaacttgagaagatagaggaaaccagaaagaaaatgaaagaacaagatcttcaggaactttatggtgtttcagaactaaacctatcatcaccttttactgattccaggaatataagtgctgatgaaatgtcaaagacctcatgtaactatggtttggacgtcaatgatgtaccacctgttaataatgaatctgaggtacaaagtggggcaggccagtgttcagattacattgacaaggatagaagttatgctgggatgcataacggggagagaaccggtggtgccttatgggatattttccgaagagaagattctgacaagatacaagattatcttaggaaacatgccacggaattccggcacatcttttgcaatcctgtgaagcaggttattcacccaattcacgatcagactttctacttaaccgaggagcataagagaaagctcaaggaagaatatggtgttgaaccctggacgtttgagcagaagcttggtgaagcggttttcattcctgctggatgtcctcaccaagtgaggaacttgaagtcttgcattaaggttgcgatggactttgtctccccagaaagcgtcaacgagtgcatgaaactgactggagagtttaggcggcttccacctgatcacagggctaaagaggataagctggagatcaagaagattgctcttcatgctctgaaccaagtagtaaatttcttggatccttcctcggagtggtcgaagagttggtttgcccaactcaagaacaaaaaaaaggctggagctgaagaacaggagaagcctaaaaggaagcgtggccgcccatgtcgcaagtccaacgatgaagctgctggcgataggcacagaaagaagggcggccgccaaagaggtcggaagaggggatacggcaagtccaaagatggcgctggcgctgttgatgtgaagcctcctaaaaggcagcgcaatctcctgaaaggctctggcaatcgtgtaggtggttgattgtttcactgctgactgggaagatggaaggcgtaagggctgtaccgacccaaccttgacgtggttattttggtaccaggttgtaagtgtagactctagattgtagaatagaccaggcatttcgtcacccctgggcgccattatggcgtcttgcttttgttcatatgtggcgattgccggttgacaccgttttggaagaataatatgctagatgctcgttgtaccagactcttcatgtagcgggctatggtgaattgctgttcagcatgtctgatgctgatgttggtaattgacctgaatagatgtggtcatttgaactctctggattctgattttacatatccaatccattggctgaggctgagcattcttagttgaaaaacg

SEQ ID NO: 4556 - DNA, 3433 bp, Zea Mays
ctcctcctatccatttctccagtcgtttctctcccctcgcgctgcccatggccatcccggaggacctagaggggacctcgggcgatggcggggtgacgaatcgcgggagtagagggcggcgaaaaggcgcggcgaaggggcgcgggaggggcaggccgcggagcgccgacagatcctttccgccgccggcgatggctggggtggcggtcggggacagggtgctcagggagaggaggcacacgaccaacgttttctgcgagcgcgacacggatgttgacgatgagtccatttattttcaggatgatgttgagacagttaggtccaaggactcaaggagtggcgatgttttacagactgcaaaaaagaggaagaagggaggtgcagggaaggtttctgtcacaaaaaggtcgaaaagagagggtgaagaacaaaagaaggcatcaccctccaaggataaagattgtgctgaaactaatgggaaaaggaagatgttgactggggataatgccctgatgtgccaccagtgccagaggaatgataaagggagggtggtctggtgtaattcatgcagaaataagcgcttctgtgtgccatgcattgaaagatggtatcctaacttgtcagaagacgaatttgctgcaaaatgcccatattgtcgcaagaactgtaattgcaaaggatgccttagaatgagaggggttgaagagcagcctccaaagaaggaaatttctgaagaaaatcaaatctcttatgcttgcaatgttgtgcgcttgttgcttccctggttgagaaaactgcgacaggagcagatggaggagaagaaattggaggctaaaataaaaggtgttttggtgaatgagatgaagttggaacaagctgaatataatctagatgagcgtgtctactgcaataattgcaaaacttctatagttgattttcacagaagctgcaagtactgcttttatgatctgtgccttgactgctgtgtggagatccgcagaggtgagattcctggaggagaagagataatgagagtaaagcctgaagatagaggccgagcatatctttttggtactactaactcaaaggatgggagtaaaaggttctccatgaggaggcacagctcatccctggagaatgagccttccaatgtagtaggttctagtgagggggcaaataactctctggagctgtggaaagcagaaagtgatggtagcataccttgcccaccaaaggagctaggaggctgtggcggttcgattttggatctcaagtgtttttttccagaaaagatgctttcaaatttagaagaacgagctgacagaattatgaggagcgaagtatttgcaaaagcagtagccaaaagaagtgaccagtgcccttgttatgaccattcaggaaacataagaactcaggacgtgcgagagactgcaaatacgaaaggctcaagtgataaccatctctactgcccagttgccactgctatcaaggaggatgacttggcgcactttcagatgcactggacaaaaggcgaaccagttattgtttctgatgttctgcatttgacttctggtctaagttgggaaccattagttatgtggcgggcattgcgagagaaaaagactaatggtgacgtagaagatgagcactttgctgtcagggcattagattgccttgattggtgtgagatagactgctcacagctctgttgtcaacaggcagaacgcatcacatgacacactggcctgagatgcttaagctaaaggactggccgccatctagttcttttgatcagagattgcctcgccatggtgctgagtttatcagtgcattgccatttcctgagtacactgatcctcgatatggtccgctgaatcttacagtcaagctacctgatggtgcattgaagccagatcttggaccaaaaacttacatcgcttatggattttaccaagagttaggcaggggtgattctgtgaccaagcttcactgtgacatgtctgatgcggtaaatatattgacacacacagcacaagtgccctatgcgcgttatcaacttgagaagatagaggaaaccagaaagaaaatgaaagaacaagatcttcaggaactttatggtgtttcagaactaaacctatcatcaccttttactgattccaggaatataagtgctgatgaaatgtcaaagacctcatgtaactatggtttggacgtcaatgatgtaccacctgttaataatgaatctgaggtacaaagtggggcaggccagtgttcagattacattgacaaggatagaagttatgctgggatgcataacggggagagaaccggtggtgccttatgggatattttccgaagagaagattctgacaagatacaagattatcttaggaaacatgccacggaattccggcacatcttttgcaatcctgtgaagcaggttattcacccaattcacgatcagactttctacttaaccgaggagcataagagaaagctcaaggaagaatatggtgttgaaccctggacgtttgagcagaagcttggtgaagcggttttcattcctgctggatgtcctcaccaagtgaggaacttgaagtcttgcattaaggttgcgatggactttgtctccccagaaagcgtcaacgagtgcatgaaactgactggagagtttaggcggcttccacctgatcacagggctaaagaggataagctggagatcaagaagattgctcttcatgctctgaaccaagtagtaaatttcttggatccttcctcggagtggtcgaagagttggtttgcccaactcaagaacaaaaaaaaggctggagctgaagaacaggagaagcctaaaaggaagcgtggccgcccatgtcgcaagtccaacgatgaagctgctggcgataggcacagaaagaagggcggccgccaaagaggtcggaagaggggatacggcaagtccaaagatggcgctggcgctgttgatgtgaagcctcctaaaaggcagcgcaatctcctgaaaggctctggcaatcgtgtaggtggttgattgtttcactgctgactgggaagatggaaggcgtaagggctgtaccgacccaaccttgacgtggttattttggtaccaggttgtaagtgtagactctagattgtagaatagaccaggcatttcgtcacccctgggcgccattatggcgtcttgcttttgttcatatgtggcgattgccggttgacaccgttttggaagaataatatgctagatgctcgttgtaccagactcttcatgtagcgggctatggtgaattgctgttcagcatgtctgatgctgatgttggtaattgacctgaatagatgtggtcatttgaactctctggattctgattttacatatccaatccattggctgaggctgagcattcttagttgaaaaacg

SEQ ID NO: 4557 - DNA, 3419 bp, Zea Mays
ctcctcctatccatttctccagtcgtttctctcccctcgcgctgcccatggccatcccggaggacctagaggggacctcgggcgatggcggggtgacgaatcgcgggagtagagggcggcgaaaaggcgcggcgaaggggcgcgggaggggcaggccgcggagcgccgacagatcctttccgccgccggcgatggctggggtggcggtcggggacagggtgctcagggagaggaggcacacgaccaacgttttctgcgagcgcgacacggatgttgacgatgaggatgatgttgagacagttaggtccaaggactcaaggagtggcgatgttttacagactgcaaaaaagaggaagaagggaggtgcagggaaggtttctgtcacaaaaaggtcgaaaagagagggtgaagaacaaaagaaggcatcaccctccaaggataaagattgtgctgaaactaatgggaaaaggaagatgttgactggggataatgccctgatgtgccaccagtgccagaggaatgataaagggagggtggtctggtgtaattcatgcagaaataagcgcttctgtgtgccatgcattgaaagatggtatcctaacttgtcagaagacgaatttgctgcaaaatgcccatattgtcgcaagaactgtaattgcaaaggatgccttagaatgagaggggttgaagagcctccaaagaaggaaatttctgaagaaaatcaaatctcttatgcttgcaatgttgtgcgcttgttgcttccctggttgagaaaactgcgacaggagcagatggaggagaagaaattggaggctaaaataaaaggtgttttggtgaatgagatgaagttggaacaagctgaatataatctagatgagcgtgtctactgcaataattgcaaaacttctatagttgattttcacagaagctgcaagtactgcttttatgatctgtgccttgactgctgtgtggagatccgcagaggtgagattcctggaggagaagagataatgagagtaaagcctgaagatagaggccgagcatatctttttggtactactaactcaaaggatgggagtaaaaggttctccatgaggaggcacagctcatccctggagaatgagccttccaatgtagtaggttctagtgagggggcaaataactctctggagctgtggaaagcagaaagtgatggtagcataccttgcccaccaaaggagctaggaggctgtggcggttcgattttggatctcaagtgtttttttccagaaaagatgctttcaaatttagaagaacgagctgacagaattatgaggagcgaagtatttgcaaaagcagtagccaaaagaagtgaccagtgcccttgttatgaccattcaggaaacataagaactcaggacgtgcgagagactgcaaatacgaaaggctcaagtgataaccatctctactgcccagttgccactgctatcaaggaggatgacttggcgcactttcagatgcactggacaaaaggcgaaccagttattgtttctgatgttctgcatttgacttctggtctaagttgggaaccattagttatgtggcgggcattgcgagagaaaaagactaatggtgacgtagaagatgagcactttgctgtcagggcattagattgccttgattggtgtgaggtggaaattaacatacacatgttttttgtgggatatatgaaaggcagaacgcatcacatgacacactggcctgagatgcttaagctaaaggactggccgccatctagttcttttgatcagagattgcctcgccatggtgctgagtttatcagtgcattgccatttcctgagtacactgatcctcgatatggtccgctgaatcttacagtcaagctacctgatggtgcattgaagccagatcttggaccaaaaacttacatcgcttatggattttaccaagagttaggcaggggtgattctgtgaccaagcttcactgtgacatgtctgatgcggtaaatatattgacacacacagcacaagtgccctatgcgcgttatcaacttgagaagatagaggaaaccagaaagaaaatgaaagaacaagatcttcaggaactttatggtgtttcagaactaaacctatcatcaccttttactgattccaggaatataagtgctgatgaaatgtcaaagacctcatgtttggacgtcaatgatgtaccacctgttaataatgaatctgaggtacaaagtggggcaggccagtgttcagattacattgacaaggatagaagttatgctgggatgcataacggggagagaaccggtggtgccttatgggatattttccgaagagaagattctgacaagatacaagattatcttaggaaacatgccacggaattccggcacatcttttgcaatcctgtgaagcaggttattcacccaattcacgatcagactttctacttaaccgaggagcataagagaaagctcaaggaagaatatggtgttgaaccctggacgtttgagcagaagcttggtgaagcggttttcattcctgctggatgtcctcaccaagtgaggaacttgaagtcttgcattaaggttgcgatggactttgtctccccagaaagcgtcaacgagtgcatgaaactgactggagagtttaggcggcttccacctgatcacagggctaaagaggataagctggagatcaagaagattgctcttcatgctctgaaccaagtagtaaatttcttggatccttcctcggagtggtcgaagagttggtttgcccaactcaagaacaaaaaaaaggctggagctgaagaacaggagaagcctaaaaggaagcgtggccgcccatgtcgcaagtccaacgatgaagctgctggcgataggcacagaaagaagggcggccgccaaagaggtcggaagaggggatacggcaagtccaaagatggcgctggcgctgttgatgtgaagcctcctaaaaggcagcgcaatctcctgaaaggctctggcaatcgtgtaggtggttgattgtttcactgctgactgggaagatggaaggcgtaagggctgtaccgacccaaccttgacgtggttattttggtaccaggttgtaagtgtagactctagattgtagaatagaccaggcatttcgtcacccctgggcgccattatggcgtcttgcttttgttcatatgtggcgattgccggttgacaccgttttggaagaataatatgctagatgctcgttgtaccagactcttcatgtagcgggctatggtgaattgctgttcagcatgtctgatgctgatgttggtaattgacctgaatagatgtggtcatttgaactctctggattctgattttacatatccaatccattggctgaggctgagcattcttagttgaaaaacg

SEQ ID NO: 4558 - DNA, 3424 bp, Zea Mays
ctcctcctatccatttctccagtcgtttctctcccctcgcgctgcccatggccatcccggaggacctagaggggacctcgggcgatggcggggtgacgaatcgcgggagtagagggcggcgaaaaggcgcggcgaaggggcgcgggaggggcaggccgcggagcgccgacagatcctttccgccgccggcgatggctggggtggcggtcggggacagggtgctcagggagaggaggcacacgaccaacgttttctgcgagcgcgacacggatgttgacgatgaggatgatgttgagacagttaggtccaaggactcaaggagtggcgatgttttacagactgcaaaaaagaggaagaagggaggtgcagggaaggtttctgtcacaaaaaggtcgaaaagagagggtgaagaacaaaagaaggcatcaccctccaaggataaagattgtgctgaaactaatgggaaaaggaagatgttgactggggataatgccctgatgtgccaccagtgccagaggaatgataaagggagggtggtctggtgtaattcatgcagaaataagcgcttctgtgtgccatgcattgaaagatggtatcctaacttgtcagaagacgaatttgctgcaaaatgcccatattgtcgcaagaactgtaattgcaaaggatgccttagaatgagaggggttgaagagcctccaaagaaggaaatttctgaagaaaatcaaatctcttatgcttgcaatgttgtgcgcttgttgcttccctggttgagaaaactgcgacaggagcagatggaggagaagaaattggaggctaaaataaaaggtgttttggtgaatgagatgaagttggaacaagctgaatataatctagatgagcgtgtctactgcaataattgcaaaacttctatagttgattttcacagaagctgcaagtactgcttttatgatctgtgccttgactgctgtgtggagatccgcagaggtgagattcctggaggagaagagataatgagagtaaagcctgaagatagaggccgagcatatctttttggtactactaactcaaaggatgggagtaaaaggttctccatgaggaggcacagctcatccctggagaatgagccttccaatgtagtaggttctagtgagggggcaaataactctctggagctgtggaaagcagaaagtgatggtagcataccttgcccaccaaaggagctaggaggctgtggcggttcgattttggatctcaagtgtttttttccagaaaagatgctttcaaatttagaagaacgagctgacagaattatgaggagcgaagtatttgcaaaagcagtagccaaaagaagtgaccagtgcccttgttatgaccattcaggaaacataagaactcaggacgtgcgagagactgcaaatacgaaaggctcaagtgataaccatctctactgcccagttgccactgctatcaaggaggatgacttggcgcactttcagatgcactggacaaaaggcgaaccagttattgtttctgatgttctgcatttgacttctggtctaagttgggaaccattagttatgtggcgggcattgcgagagaaaaagactaatggtgacgtagaagatgagcactttgctgtcagggcattagattgccttgattggtgtgaggtggaaattaacatacacatgttttttgtgggatatatgaaaggcagaacgcatcacatgacacactggcctgagatgcttaagctaaaggactggccgccatctagttcttttgatcagagattgcctcgccatggtgctgagtttatcagtgcattgccatttcctgagtacactgatcctcgatatggtccgctgaatcttacagtcaagctacctgatggtgcattgaagccagatcttggaccaaaaacttacatcgcttatggattttaccaagagttaggcaggggtgattctgtgaccaagcttcactgtgacatgtctgatgcggtaaatatattgacacacacagcacaagtgccctatgcgcgttatcaacttgagaagatagaggaaaccagaaagaaaatgaaagaacaagatcttcaggaactttatggtgtttcagaactaaacctatcatcaccttttactgattccaggaatataagtgctgatgaaatgtcaaagacctcatgtaactatggtttggacgtcaatgatgtaccacctgttaataatgaatctgaggtacaaagtggggcaggccagtgttcagattacattgacaaggatagaagttatgctgggatgcataacggggagagaaccggtggtgccttatgggatattttccgaagagaagattctgacaagatacaagattatcttaggaaacatgccacggaattccggcacatcttttgcaatcctgtgaagttattcacccaattcacgatcagactttctacttaaccgaggagcataagagaaagctcaaggaagaatatggtgttgaaccctggacgtttgagcagaagcttggtgaagcggttttcattcctgctggatgtcctcaccaagtgaggaacttgaagtcttgcattaaggttgcgatggactttgtctccccagaaagcgtcaacgagtgcatgaaactgactggagagtttaggcggcttccacctgatcacagggctaaagaggataagctggagatcaagaagattgctcttcatgctctgaaccaagtagtaaatttcttggatccttcctcggagtggtcgaagagttggtttgcccaactcaagaacaaaaaaaaggctggagctgaagaacaggagaagcctaaaaggaagcgtggccgcccatgtcgcaagtccaacgatgaagctgctggcgataggcacagaaagaagggcggccgccaaagaggtcggaagaggggatacggcaagtccaaagatggcgctggcgctgttgatgtgaagcctcctaaaaggcagcgcaatctcctgaaaggctctggcaatcgtgtaggtggttgattgtttcactgctgactgggaagatggaaggcgtaagggctgtaccgacccaaccttgacgtggttattttggtaccaggttgtaagtgtagactctagattgtagaatagaccaggcatttcgtcacccctgggcgccattatggcgtcttgcttttgttcatatgtggcgattgccggttgacaccgttttggaagaataatatgctagatgctcgttgtaccagactcttcatgtagcgggctatggtgaattgctgttcagcatgtctgatgctgatgttggtaattgacctgaatagatgtggtcatttgaactctctggattctgattttacatatccaatccattggctgaggctgagcattcttagttgaaaaacg

SEQ ID NO: 4559 - DNA, 3428 bp, Zea Mays
ctcctatccatttctccagtcgtttctctcccctcgcgctgcccatggccatcccggaggacctagaggggacctcgggcgatggcggggtgacgaatcgcgggagtagagggcggcgaaaaggcgcggcgaaggggcgcgggaggggcaggccgcggagcgccgacagatcctttccgccgccggcgatggctggggtggcggtcggggacagggtgctcagggagaggaggcacacgaccaacgttttctgcgagcgcgacacggatgttgacgatgaggatgatgttgagacagttaggtccaaggactcaaggagtggcgatgttttacagactgcaaaaaagaggaagaagggaggtgcagggaaggtttctgtcacaaaaaggtcgaaaagagagggtgaagaacaaaagaaggcatcaccctccaaggataaagattgtgctgaaactaatgggaaaaggaagatgttgactggggataatgccctgatgtgccaccagtgccagaggaatgataaagggagggtggtctggtgtaattcatgcagaaataagcgcttctgtgtgccatgcattgaaagatggtatcctaacttgtcagaagacgaatttgctgcaaaatgcccatattgtcgcaagaactgtaattgcaaaggatgccttagaatgagaggggttgaagagcagcctccaaagaaggaaatttctgaagaaaatcaaatctcttatgcttgcaatgttgtgcgcttgttgcttccctggttgagaaaactgcgacaggagcagatggaggagaagaaattggaggctaaaataaaaggtgttttggtgaatgagatgaagttggaacaagctgaatataatctagatgagcgtgtctactgcaataattgcaaaacttctatagttgattttcacagaagctgcaagtactgcttttatgatctgtgccttgactgctgtgtggagatccgcagaggtgagattcctggaggagaagagataatgagagtaaagcctgaagatagaggccgagcatatctttttggtactactaactcaaaggatgggagtaaaaggttctccatgaggaggcacagctcatccctggagaatgagccttccaatgtagtaggttctagtgagggggcaaataactctctggagctgtggaaagcagaaagtgatggtagcataccttgcccaccaaaggagctaggaggctgtggcggttcgattttggatctcaagtgtttttttccagaaaagatgctttcaaatttagaagaacgagctgacagaattatgaggagcgaagtatttgcaaaagcagtagccaaaagaagtgaccagtgcccttgttatgaccattcaggaaacataagaactcaggacgtgcgagagactgcaaatacgaaaggctcaagtgataaccatctctactgcccagttgccactgctatcaaggaggatgacttggcgcactttcagatgcactggacaaaaggcgaaccagttattgtttctgatgttctgcatttgacttctggtctaagttgggaaccattagttatgtggcgggcattgcgagagaaaaagactaatggtgacgtagaagatgagcactttgctgtcagggcattagattgccttgattggtgtgaggtggaaattaacatacacatgttttttgtgggatatatgaaaggcagaacgcatcacatgacacactggcctgagatgcttaagctaaaggactggccgccatctagttcttttgatcagagattgcctcgccatggtgctgagtttatcagtgcattgccatttcctgagtacactgatcctcgatatggtccgctgaatcttacagtcaagctacctgatggtgcattgaagccagatcttggaccaaaaacttacatcgcttatggattttaccaagagttaggcaggggtgattctgtgaccaagcttcactgtgacatgtctgatgcggtaaatatattgacacacacagcacaagtgccctatgcgcgttatcaacttgagaagatagaggaaaccagaaagaaaatgaaagaacaagatcttcaggaactttatggtgtttcagaactaaacctatcatcaccttttactgattccaggaatataagtgctgatgaaatgtcaaagacctcatgtaactatggtttggacgtcaatgatgtaccacctgttaataatgaatctgaggtacaaagtggggcaggccagtgttcagattacattgacaaggatagaagttatgctgggatgcataacggggagagaaccggtggtgccttatgggatattttccgaagagaagattctgacaagatacaagattatcttaggaaacatgccacggaattccggcacatcttttgcaatcctgtgaagcaggttattcacccaattcacgatcagactttctacttaaccgaggagcataagagaaagctcaaggaagaatatggtgttgaaccctggacgtttgagcagaagcttggtgaagcggttttcattcctgctggatgtcctcaccaagtgaggaacttgaagtcttgcattaaggttgcgatggactttgtctccccagaaagcgtcaacgagtgcatgaaactgactggagagtttaggcggcttccacctgatcacagggctaaagaggataagctggagatcaagaagattgctcttcatgctctgaaccaagtagtaaatttcttggatccttcctcggagtggtcgaagagttggtttgcccaactcaagaacaaaaaaaaggctggagctgaagaacaggagaagcctaaaaggaagcgtggccgcccatgtcgcaagtccaacgatgaagctgctggcgataggcacagaaagaagggcggccgccaaagaggtcggaagaggggatacggcaagtccaaagatggcgctggcgctgttgatgtgaagcctcctaaaaggcagcgcaatctcctgaaaggctctggcaatcgtgtaggtggttgattgtttcactgctgactgggaagatggaaggcgtaagggctgtaccgacccaaccttgacgtggttattttggtaccaggttgtaagtgtagactctagattgtagaatagaccaggcatttcgtcacccctgggcgccattatggcgtcttgcttttgttcatatgtggcgattgccggttgacaccgttttggaagaataatatgctagatgctcgttgtaccagactcttcatgtagcgggctatggtgaattgctgttcagcatgtctgatgctgatgttggtaattgacctgaatagatgtggtcatttgaactctctggattctgattttacatatccaatccattggctgaggctgagcattcttagttgaaaaacg

SEQ ID NO: 4560 - DNA, 3399 bp, Zea Mays
atggccatcccggaggacctagaggggacctcgggcgatggcggggtgacgaatcgcgggagtagagggcggcgaaaaggcgcggcgaaggggcgcgggaggggcaggccgcggagcgccgacagatcctttccgccgccggcgatggctggggtggcggtcggggacagggtgctcagggagaggaggcacacgaccaacgttttctgcgagcgcgacacggatgttgacgatgagtccatttattttcaggatgatgttgagacagttaggtccaaggactcaaggagtggcgatgttttacagactgcaaaaaagaggaagaagggaggtgcagggaaggtttctgtcacaaaaaggtcgaaaagagagggtgaagaacaaaagaaggcatcaccctccaaggataaagattgtgctgaaactaatgggaaaaggaagatgttgactggggataatgccctgatgtgccaccagtgccagaggaatgataaagggagggtggtctggtgtaattcatgcagaaataagcgcttctgtgtgccatgcattgaaagatggtatcctaacttgtcagaagacgaatttgctgcaaaatgcccatattgtcgcaagaactgtaattgcaaaggatgccttagaatgagaggggttgaagagcagcctccaaagaaggaaatttctgaagaaaatcaaatctcttatgcttgcaatgttgtgcgcttgttgcttccctggttgagaaaactgcgacaggagcagatggaggagaagaaattggaggctaaaataaaaggtgttttggtgaatgagatgaagttggaacaagctgaatataatctagatgagcgtgtctactgcaataattgcaaaacttctatagttgattttcacagaagctgcaagtactgcttttatgatctgtgccttgactgctgtgtggagatccgcagaggtgagattcctggaggagaagagataatgagagtaaagcctgaagatagaggccgagcatatctttttggtactactaactcaaaggatgggagtaaaaggttctccatgaggaggcacagctcatccctggagaatgagccttccaatgtagtaggttctagtgagggggcaaataactctctggagctgtggaaagcagaaagtgatggtagcataccttgcccaccaaaggagctaggaggctgtggcggttcgattttggatctcaagtgtttttttccagaaaagatgctttcaaatttagaagaacgagctgacagaattatgaggagcgaagtatttgcaaaagcagtagccaaaagaagtgaccagtgcccttgttatgaccattcaggaaacataagaactcaggacgtgcgagagactgcaaatacgaaaggctcaagtgataaccatctctactgcccagttgccactgctatcaaggaggatgacttggcgcactttcagatgcactggacaaaaggcgaaccagttattgtttctgatgttctgcatttgacttctggtctaagttgggaaccattagttatgtggcgggcattgcgagagaaaaagactaatggtgacgtagaagatgagcactttgctgtcagggcattagattgccttgattggtgtgaggtggaaattaacatacacatgttttttgtgggatatatgaaaggcagaacgcatcacatgacacactggcctgagatgcttaagctaaaggactggccgccatctagttcttttgatcagagattgcctcgccatggtgctgagtttatcagtgcattgccatttcctgagtacactgatcctcgatatggtccgctgaatcttacagtcaagctacctgatggtgcattgaagccagatcttggaccaaaaacttacatcgcttatggattttaccaagagttaggcaggggtgattctgtgaccaagcttcactgtgacatgtctgatgcggtaaatatattgacacacacagcacaagtgccctatgcgcgttatcaacttgagaagatagaggaaaccagaaagaaaatgaaagaacaagatcttcaggaactttatggtgtttcagaactaaacctatcatcaccttttactgattccaggaatataagtgctgatgaaatgtcaaagacctcatgtaactatggtttggacgtcaatgatgtaccacctgttaataatgaatctgaggtacaaagtggggcaggccagtgttcagattacattgacaaggatagaagttatgctgggatgcataacggggagagaaccggtggtgccttatgggatattttccgaagagaagattctgacaagatacaagattatcttaggaaacatgccacggaattccggcacatcttttgcaatcctgtgaagcaggttattcacccaattcacgatcagactttctacttaaccgaggagcataagagaaagctcaaggaagaatatggtgttgaaccctggacgtttgagcagaagcttggtgaagcggttttcattcctgctggatgtcctcaccaagtgaggaacttgaagtcttgcattaaggttgcgatggactttgtctccccagaaagcgtcaacgagtgcatgaaactgactggagagtttaggcggcttccacctgatcacagggctaaagaggataagctggagatcaagaagattgctcttcatgctctgaaccaagtagtaaatttcttggatccttcctcggagtggtcgaagagttggtttgcccaactcaagaacaaaaaaaaggctggagctgaagaacaggagaagcctaaaaggaagcgtggccgcccatgtcgcaagtccaacgatgaagctgctggcgataggcacagaaagaagggcggccgccaaagaggtcggaagaggggatacggcaagtccaaagatggcgctggcgctgttgatgtgaagcctcctaaaaggcagcgcaatctcctgaaaggctctggcaatcgtgtaggtggttgattgtttcactgctgactgggaagatggaaggcgtaagggctgtaccgacccaaccttgacgtggttattttggtaccaggttgtaagtgtagactctagattgtagaatagaccaggcatttcgtcacccctgggcgccattatggcgtcttgcttttgttcatatgtggcgattgccggttgacaccgttttggaagaataatatgctagatgctcgttgtaccagactcttcatgtagcgggctatggtgaattgctgttcagcatgtctgatgctgatgttggtaattgacctgaatagatgtggtcatttgaactctctggattctgattttacatatccaatccattggctgaggctgagcattcttagttgaaaaacg

SEQ ID NO: 4561 - DNA, 276 bp, Zea Mays
ggtcatcagagagcccagaatcagctgcagagtgaggttcagcaataaagtccaacagctttgacacaatatcttcctatatgagttaatcaaactacattagaatgtaatgtatcgaattaaccaaaatataattccaagaacaaggcagtaaaacaaaacctttctaatgtttgcttttggagttggaatgccaagggtccaacaaaggtccaacagcgtttcttttacacacttgtcaagcttttcttttgccttgactctgtgcttttccta

SEQ ID NO: 4562 - DNA, 491 bp, Zea Mays
actgcttagctattggcattttcacacgcaggtatgtgaaggtatccgcgaagtgctgcagctgcctgcggagaaagagttatcgcccaggaatacgtggtagaatttggttctatgttttggacatctgtgtactgtagagtatagtcaacttgcagaagaggatatggaaggatcgtcaacaatggatcaagttgtaaagaacacacaagagaacatgtcctggctttctatttggtggcaacaatttgttgatgcttcaatgaagcaagtgacacaggtgcatgcttttgcttgctgtcgcagatgcccctgatggcaagcttcagcaatggtcaagtacaaagacatcctcccgtgagaaccaagttaaggtttggcagtttcacatctggtttggattcggaacaagtatctgccccgaccccacaagacactgagcaaccagaacatacaccctattaaggagtggaagccaaaatcgacaaaga

SEQ ID NO: 4563 - DNA, 381 bp, Zea Mays
gaaagagttatcgcccaggaatacgtggtagaatttggttctatgttttggacatctgtgtactgtagagtatagtcaacttgcagaagaggatatggaaggatcgtcaacaatggatcaagttgtaaagaacacacaagagaacatgtcctggctttctatttggtggcaacaatttgttgatgcttcaatgatgcccctgatggcaagcttcagcaatggtcaagtacaaagacatcctcccgtgagaaccaagttaaggtttggcagtttcacatctggtttggattcggaacaagtatctgccccgaccccacaagacactgagcaaccagaacacagtacaccctattaaggagtggaagccaaaatcgacaaaga

SEQ ID NO: 4564 - DNA, 780 bp, Zea Mays
cgcgcggcgcgctcgtggcgttaaacgacgggggtagatgctcgggagctgttcgacggaatgcccaaccggcaccaaatactacggcttactaacggaccggcccgcacttcaggctgctagctatcggaggagaagagcaaaatgcaatcgaagaacgaaggagaagatgcggctgttcaggactccaccagaggccacacacaacagaatctgcaaagctaggccccaagactggtcaagattaaatggcaaactgagccatcagcagcaaggcaactagtaggatcggagccgattgctcttatatatggtgctatcagctacgccgaggcaagcgagagcgagtcgatgtcatgtggctgacgcagtatgagccgctcactggacactggtgagtctgacgaggctccaacgttgatagctagcgactgcacgaaggctaaggacaaaacgagatgaagagcagagctgcagaggcgtcgttcagaggttgccatcgccgcttgtgtactgacaagtttggatccccgtagttgcggttgggttgccttgcctgccggcgacatattcctaaatccctaccttctactgtcgtggctgctagtaatacatgctttgcggcattgtttatgtcagttggtgcatttggagtcgcgtttgtgtgtgtcttatacatacgagcatctactttatttgcgataatcttgtattttctgctagtttggataagctttaaaaatataaggtccagtttgtttcgttggaattgaattctat

SEQ ID NO: 4565 - DNA, 2116 bp, Zea Mays
caacaactccctcctccacctcccctttttcccctcacccccaccctacccgggcacccggttgctgccaggaaaggagggccgggtccggaccaccacccctctcttccccagccacctactgttcttctccctgtcctttctctctctactagtactaggtctagggtcgcctggccgccagccaacccacgcgcgcacacgccccgtccggccgtacccgctcttcattccccactgcacacaaatactactgtgactccgtgagggagcaacaggaggaagaagcaggggggagaggggaggggaggggaggcattcgtgctccttttttccttcctactgtacgagtacaggactgcgctgcctgtctctcctcgcctgctgccgacttcgcggcctcgtcgccctgccatgtccaccatggacgaaggctacgggcctacttgggacagcgacgacgaatacgacaacttcatacgcaagatgaacccgccaaggatcgtcatcgacaacgagtcctcggcggaggccacaattgtaaggatagcgcgaatgaatacgggatattgctggaagtgatccaggtcatgattgatctcaaccttgtcataggcaaggcatatataacctcggatggtggatggttcatggatgtcttcaatgtgaccgataaggaagggaagaagatcaaagatgaggcaaccctcacacagatcgaagactacatcagaaagtccttgggcgcagattcaagatacattccttcccgccggagatcggtagacgtcgccgccgcagctgaccacaacatcatcgaactgacagggacagacaggccaggactgctctctgaggtcagcgctgtgctcaccagcctcaagtgcaacgtggtcagcgccgagatctggacccacaacacccgagccgcggccgtgatgcgggtcactgacgaggacactgggctggcggtcacggacgccgagaggctggagaggatcagggagaagctgtcgtacctgttccgtggaggcaatctctctcgaggtgccacagtgtcgtcgaggactgccaccacgcacaccgagagaaggctgcaccagatgatgctcgacgatggcgactacgagcagctccagcggcaagctccaggacagtctcagaggcctaacgtcaccgtgaggaactggaacgacaaggactactcggtggtgaccatcagatgcaaggacaggtccaagcttctgttcgacacggtctgcactctgacggacttgcagtacgttgttttccacgcgaacatcgatgccaaggacaatcaggcttaccaggaattctatgtaaggcatgtgaatggatcgccaatgaacactgaaaccgagaggttgcgagtcatccaatgcctggaagcagccatcgaacggagggtatctgagggtgtgaagcttgagctgtgcaccaacgacaaggtcgggctgctatccgaggtcacccgcatcttccgcgagaacagcctgacggttacgagggcggaggtgaccacgcggggcaggatggccgtgaacacgttctacgtgcgcggctccgcgggagaggccgtcgaccagaaggcgatcgactccatcagggaggccataggccacagcctccaggtgaaaggccaggccgagccaccggagccgcagaagaaagagtcccccacgtggttcctcttcgccaacctgtttcgcccgaggtcgctctacagctttgggttcatgcgctgatcgagccgtcgcttccaagaaccgctgcccgtgcagtaagttcaccaccgttcacgaagcaatccaggacatggggggatcttcttcagaaggtggaaaagccttcgttgtgtcctagcagtgcaggtttggcatgtaggtagagcatggcatgggtggtgttcatatatatatctgccgtcgtcgtcatcagcatcatcatctgtgtcatcatcatcagcgtctgtaaatatgacagcatttgaccatttgtacatataacgtgtaaactaaaggacgtaaatataagctgtacagaatatagttaaattccagatttgttgcgacgtcgtaaaagccggcgccttttt

SEQ ID NO: 4566 - DNA, 1878 bp, Zea Mays
ccttccctccctccctctctcttgatggaatgtcccctggagtatttctaccttcctgtggtgccgtactgccgtgcctatgccggctgctgcttcgtcttccctgccgccgtccgtgaacggttgcggcgccacacctcgtcgccgtctcctcctccgtgacctttcttctcggcgatgctgctacgaaggctacgggcctacttgggacagcgacgacgaatacgacaacttcatacgcaagatgaacccgccaaggatcgtcatcgacaacgagtcctcggcggaggccacaattgtaagggtagatagcgcgaatgaatacgggatattgctggaagtgatccaggtcatgattgatctcaaccttgtcataggcaaggcatatataacctcggatggtggatggttcatggatgtcttcaatgtgaccgataaggaagggaagaagatcaaagatgaggcaaccctcacacagatcgaagactacatcagaaagtccttgggcgcagattcaagatacattccttcccgccggagatcggtagacgtcgccgccgcagctgaccacaacatcatcgaactgacagggacagacaggccaggactgctctctgaggtcagcgctgtgctcaccagcctcaagtgcaacgtggtcagcgccgagatctggacccacaacacccgagccgcggccgtgatgcgggtcactgacgaggacactgggctggcggtcacggacgccgagaggctggagaggatcagggagaagctgtcgtacctgttccgtggaggcaatctctctcgaggtgccacagtgtcgtcgaggactgccaccacgcacaccgagagaaggctgcaccagatgatgctcgacgatggcgactacgagcagctccagcggcaagctccaggacagtctcagaggcctaacgtcaccgtgaggaactggaacgacaaggactactcggtggtgaccatcagatgcaaggacaggtccaagcttctgttcgacacggtctgcactctgacggacttgcagtacgttgttttccacgcgaacatcgatgccaaggacaatcaggcttaccaggaattctatgtaaggcatgtgaatggatcgccaatgaacactgaaaccgagaggttgcgagtcatccaatgcctggaagcagccatcgaacggagggtatctgagggtgtgaagcttgagctgtgcaccaacgacaaggtcgggctgctatccgaggtcacccgcatcttccgcgagaacagcctgacggttacgagggcggaggtgaccacgcggggcaggatggccgtgaacacgttctacgtgcgcggctccgcgggagaggccgtcgaccagaaggcgatcgactccatcagggaggccataggccacagcctccaggtgaaaggccaggccgagccaccggagccgcagaagaaagagtcccccacgtggttcctcttcgccaacctgtttcgcccgaggtcgctctacagctttgggttcatgcgctgatcgagccgtcgcttccaagaaccgctgcccgtgcagtaagttcaccaccgttcacgaagcaatccaggacatggggggatcttcttcagaaggtggaaaagccttcgttgtgtcctagcagtgcaggtttggcatgtaggtagagcatggcatgggtggtgttcatatatatatctgccgtcgtcgtcatcagcatcatcatctgtgtcatcatcatcagcgtctgtaaatatgacagcatttgaccatttgtacatataacgtgtaaactaaaggacgtaaatataagctgtacagaatatagttaaattccagatttgttgcgacgtcgtaaaagccggcgccttttt

SEQ ID NO: 4567 - DNA, 1202 bp, Zea Mays
attggcttttcgttttccgttctgatccgcagcttccttatatgccgaaggccgctctggtcgaacaggactccgactcgttcgggctattccatctctgctctctccctatatacgactaggctaccgccgccgccagatgcgcaggtcttcgtcggctccttctacttctcaggcaacgagcacccggcagtaccgatcgggtgttcttcactgggtccgctcctgcgtgctagaactagaagaatcctctgctcggctcgaacttggaaggggggaggcgagggatggggtccctgctttgctgcatggggtgctcggaggacgtctcggcagcgccgcccgtgagctgcttgtgcctactatggcctttccattattaccacaatttgaactcgtaactgcactcttccaatttcttccttcccagggctctgctgcttgtcacagatgtgatacacgggtggcacctgatggtggaaggagtcctcctgcaaatcaagtggattcattggatactttgggtctccctccaaggcctttgccttacgatgatcctcaatccagccctcgcatggtgcaacacccacttgtatcaggacacgacaaagcaccaacgcatgtccagaaactaggacagcctgcagaaactaagaatacccatactgggtcaacttgcacagctcataaggtttctgcgtcctcaccaaaacagcactcagaaggttcaagaatggatgatggagtacaattctgtgattcctctgacagtgaggatgactgtccagtatgcctggaagaatatgattatgagaatccgaagattgcactgcaatgcaaacataatttccaccttagctgcatttacgagtggatggaaaggagccaggcttgcccggtctgtgcaaagactatgttgttcaatgaggatgaatgaccccgccgatggaagtcttcccagacggcaagtggaagacccaagctaaatcctgcgtgttgtgtacatagcgctgatcgtttgctgaaacttacagcattgcgaaaatttatttttatagattttttcttgatgttaatgtccgcaggggtgcttacaataggttttcatgctgaaatctcaggttctgaaaaccacagctttcggttgaaatcaaatcaaatatacagactggcctctatttacaggacataacccatgttcc

SEQ ID NO: 4568 - DNA, 1643 bp, Zea Mays
gaacaggactccgactcgttcgggctattccatctctgctctctccctatatacgactaggctaccgccgccgccagatgcgcaggtcttcgtcggctccttctacttctcaggcaacgagcacccggcagtaccgatcgggtgttcttcactgggtccgctcctgcgtgctagaactagaagaatcctctgctcggctcgaacttggaaggggggaggcgagggatggggtccctgctttgctgcatggggtgctcggaggacgtctcggcagcgccgcccgtgagctgcttgtgcctactatggcctttccattattaccacaatttgaactcgggctctgctgcttgtcacagatgtgatacacgggtggcacctgatggtggaaggagtcctcctgcaaatcaagtggattcattggatactttgggtctccctccaaggcctttgccttacgatgatcctcaatccagccctcgcatggtgcaacacccacttgtatcaggacacgacaaagcaccaacgcatgtccagaaactaggacagcctgcagaaactaagaatacccatactgggtcaacttgcacagctcataaggtttctgcgtcctcaccaaaacagcactcagaaggttcaagaatggatgatggagtacaattctgtgattcctctgacagtgaggatgactgtccagtatgcctggaagaatatgattatgagaatccgaagattgcactgcaatgcaaacataatttccaccttagctgcatttacgagtggatggaaaggagccaggcttgcccggtctgtgcaaagactatgttgttcaatgaggatgaatgaccccgccgatggaagtcttcccagacgctggattcatgggctactcgtcagaaaaagaaggagcaaaaaatggtggttctaggaagcaagctaatccgaaagacggcaagtgaggcattcggccgggcctttgggtggtgccctttagataggcgcatttctggttgatatggaagctggaacttggaagatggtgatgaagtttgtttgtctcttgatggttggcttgttcagttccttttgtggcttctgcctgtctgattgggttgtaaataagaaagtcttatgtagttaatcgtaggccaaactttctctgctatcttaggctcttcactaatctagtttgatagtgtttagagtctagatagggttctggccgtgttcgatcttttgggatgatgtgccgcgtggttgtggatgtttcaaactttcctatttcttaatgaaatagggggcttcgccccttcgtaaaaaaaaaaccaagagacaagggcatatgctccctttccagaatggaagcgtatcttaatcggttcattctataaccacctcatccataatactaatatgctggttcatggttcatccacctaaactcaacagtttaatcccatgatttggccaagatggccatatccaaaacttatttcaaccagtgttatcgagaaaagattttttttactagacaaaacaataatatatttcctaattatgatcaaattgtcgttctaccgaaacaaataaaaaatgcggtagccctacccctccatgatgaatcaacttgccctcaaataattgcg

SEQ ID NO: 4569 - DNA, 2854 bp, Zea Mays
gttctttcctcgtgtaattcgtggaaggatggagaagcagtcgccgaatttggtcggtaggcgttggtggtctcggttcacgctccagacccgtgctctcagcaacctgctaacctcccctggacccggttcacgctaggcacgtgacgtgatcacgtgagccgctttgtctctctgccgtccctgtgtggctcgtgtggctggctgtgtcctccatcctttcaaggacctcgggaatccagaaaattccggtggtcggtgcccacggacaggcgtgtgcgccacgagcccgacgaacaagggaacgaggccatttccaccggtcaaactaggagaagcaagcaaagctccccgccattagtagaatccgcccgaagtctgccccgctcttcggcctcgtcccttctctccagggccatggatgtagatgatgtgctcagtaacttgcgtgttgttggtgtgccaacaaagagtgcaatttacatatggggttataaccacagtggccagactgcccgaaagggcaaggaatgccacttgaggatccccaagagcctccctcccaaactattcaaattggggaatgggaagagcctcaggtggaccgatattgcatgtggccgtgagcataccgctgcagttgcttccgatggatcactgttcacctggggtgctaatgagtttggccagttgggagatgggacagaggacagcgcgaaagagcccaagaaggtcaagtcattggagactgagtttgtaaaatcagtatcctgtggcgcacattgtacagctgccgtcgctgagcctcgagaaaacgatggcacggtatcgaaaagcaggctttgggtttggggacaaaatcagggttcagattaccctcgtctattttggggagctttcacaccaaacacggtgattaagcaagtttcttgtggagctgttcatgtcatggctctatccgaggatggtctactgcaagcatggggctacaatgagtatggtcagcttggcagaggtcgcacttctcaaggacttcagggagctcgtgtgttaaatgcttatgcaaggttccttgatgacgcccccgagcaagtgaagattgttagagtgtcatgtggagagtaccatacagcagctatatctgaaaatggggaggtgtaagtccattagtcatcccaagggagctgttctctgctgccagtgactgttgtatggtttctcacatgacaacatagaagcatttggaatattgaagactaaccacgactaactatagggctaactgcaaagaaaggaagtaaatacatttatattatagatctcatattgatcaactaatctcaatatggcgtcagggttactctaaatagctttctgctatttaagatctttgtgcacatagatcgaagtgggccttctcttgagcatcctagtgtcttagtgaatgcaaagaaatgtgaagaattaaatggatgttgttatatcattattatagttgaataacttgtcaatcatttgctgaatctatcgatttgctagcttatatacgacaggaaaaaaaaaagattgttataatttcactttcaacatttgtagtcaaaatcattccgatttcatacttttcgcttttttgatgattgaaaacctattccaagtagggacttgattatttgtaattataatatctttggtttttgcaggtatacttggggactgggaagcatggggcagcttgggcattgctccctccaatctggagataatgagctgatccctaggcgagttgtggcccttgatggtatagtagttggggacgtttcttgtggaggtgtccactcttgtgctgtaactgaagggggagctctatatgcctggggcggaggacatgtgggtcagctgggagtcgggcctcagggtggcttcttctcttgctcccttaatggatccgacatgctgctccgaaacatcccagtcctggtgataccctcaggtgttcgtcttgctacctgtgggcactcccacacacttgtgtctatgaaagatggccgcatatatgggtggggctataatagttacggtcaagcgacgaacgagaaatctacttatgcttggtttccctctccggtcgattggtgtgttggtgaagtgagacgactcgccgctggaggtggccattctgctgttctgactgatgcatgttcgctgaaagagctgtgcgaattcaagctcgcagagaccgtgaacctttcaaatgctcagctaatagaagatgttgcatcgcggactggtgcggatgccttggcacgcttgtgcgagaaagtaagggagcatttggataaggaaggagaatgtgaattcctggaaaagcaagtggcagaagaggtcaacactataggcagttaggccactagcaaaacagttcaagcagtctgaggctgaagccagtctgggattaaacagggagtcatctacaattgatagcttgacctcccagtaaagttactgattcggacattaattgttgtggtgatcatggaaaatatgtgactcgtcaattgattctgattggtctgtagacctccattggtggtgagcctctcagctgcatcggggaggcgcagaggctctatatgtgtcatgatcttgttccgaactgtcaggttgctgtaatgtagccaaatggaaacctttgtatccctggaacttgaaaggcatgtacctggtatctgcagccagtaagtttggcaatctgaattcgatgccaattcctgggcgtattcgaacgtcctacgtccatgtatttatttcagttcatgtgcatctaaacaatattggtatagcatgaaatttaagt

SEQ ID NO: 4570 - DNA, 1893 bp, Zea Mays
ccgctttgtctctctgccgtccctgtgtggctcgtgtggctggctgtgtcctccatcctttcaaggacctcgggaatccagaaaattccggtggtcggtgcccacggacaggcgtgtgcgccacgagcccgacgaacaagggaacgaggccatttccaccggtcaaactaggagaagcaagcaaagctccccgccattagtagaatccgcccgaagtctgccccgctcttcggcctcgtcccttctctccaggtgctaatgagtttggccagttgggagatgggacagaggacagcgcgaaagagcccaagaaggtcaagtcattggagactgagtttgtaaaatcagtatcctgtggcgcacattgtacagctgccgtcgctgagcctcgagaaaacgatggcacggtatcgaaaagcaggctttgggtttggggacaaaatcagggttcagattaccctcgtctattttggggagctttcacaccaaacacggtgattaagcaagtttcttgtggagctgttcatgtcatggctctatccgaggatggtctactgcaagcatggggctacaatgagtatggtcagcttggcagaggtcgcacttctcaaggacttcagggagctcgtgtgttaaatgcttatgcaaggttccttgatgacgcccccgagcaagtgaagattgttagagtgtcatgtggagagtaccatacagcagctatatctgaaaatggggaggtgtatacttggggactgggaagcatggggcagcttgggcattgctccctccaatctggagataatgagctgatccctaggcgagttgtggcccttgatggtatagtagttggggacgtttcttgtggaggtgtccactcttgtgctgtaactgaagggggagctctatatgcctggggcggaggacatgtgggtcagctgggagtcgggcctcagggtggcttcttctcttgctcccttaatggatccgacatgctgctccgaaacatcccagtcctggtgataccctcaggtgttcgtcttgctacctgtgggcactcccacacacttgtgtctatgaaagatggccgcatatatgggtggggctataatagttacggtcaagcgacgaacgagaaatctacttatgcttggtttccctctccggtcgattggtgtgttggtgaagtgagacgactcgccgctggaggtggccattctgctgttctgactgatgcatgttcgctgaaagagctgtgcgaattcaagctcgcagagaccgtgaacctttcaaatgctcagctaatagaagatgttgcatcgcggactggtgcggatgccttggcacgcttgtgcgagaaagtaagggagcatttggataaggaaggagaatgtgaattcctggaaaagcaagtggcagaagaggtcaacactataggcagttaggccactagcaaaacagttcaagcagtctgaggctgaagccagtctgggattaaacagggagtcatctacaattgatagcttgacctcccagtaaagttactgattcggacattaattgttgtggtgatcatggaaaatatgtgactcgtcaattgattctgattggtctgtagacctccattggtggtgagcctctcagctgcatcggggaggcgcagaggctctatatgtgtcatgatcttgttccgaactgtcaggttgctgtaatgtagccaaatggaaacctttgtatccctggaacttgaaaggcatgtacctggtatctgcagccagtaagtttggcaatctgaattcgatgccaattcctgggcgtattcgaacgtcctacgtccatgtatttatttcagttcatgtgcatctaaacaatattggtatagcatgaaatttaagt

SEQ ID NO: 4571 - DNA, 2909 bp, Zea Mays
ctcgtgtggctggctgtgtcctccatcctttcaaggacctcgggaatccagaaaattccggtggtcggtgcccacggacaggcgtgtgcgccacgagcccgacgaacaagggaacgaggccatttccaccggtcaaactaggagaagcaagcaaagctccccgccattagtagaatccgcccgaagtctgccccgctcttcggcctcgtcccttctctccagggccatggatgtagatgatgtgctcagtaacttgcgtgttgttggtgtgccaacaaagagtgcaatttacatatggggttataaccacagtggccagactgcccgaaagggcaaggaatgccacttgaggatccccaagagcctccctcccaaactattcaaattggggaatgggaagagcctcaggtggaccgatattgcatgtggccgtgagcataccgctgcagttgcttccgatggatcactgttcacctggggtgctaatgagtttggccagttgggagatgggacagaggacagcgcgaaagagcccaagaaggtcaagtcattggagactgagtttgtaaaatcagtatcctgtggcgcacattgtacagctgccgtcgctgagcctcgagaaaacgatggcacggtatcgaaaagcaggctttgggtttggggacaaaatcagggttcagattaccctcgtctattttggggagctttcacaccaaacacggtgattaagcaagtttcttgtggagctgttcatgtcatggctctatccgaggatggtctactgcaagcatggggtactgtgcaaccttattcatgatttttaaagcaatgtactggcctgttgttctttactgacttggtgcaaaccttgtcaatcagaagtggtagaacttattgtttgggtatgaagatagcttgttgagagttgtgactgaaaatccttcttttttaaaaaaaccaacaacaggatgcacggccacttgatttcaaaatttatatttctgactattgatgggacgtgctattttcttactaaccaggctacaatgagtatggtcagcttggcagaggtcgcacttctcaaggacttcagggagctcgtgtgttaaatgcttatgcaaggttccttgatgacgcccccgagcaagtgaagattgttagagtgtcatgtggagagtaccatacagcagctatatctgaaaatggggaggtgtaagtccattagtcatcccaagggagctgttctctgctgccagtgactgttgtatggtttctcacatgacaacatagaagcatttggaatattgaagactaaccacgactaactatagggctaactgcaaagaaaggaagtaaatacatttatattatagatctcatattgatcaactaatctcaatatggcgtcagggttactctaaatagctttctgctatttaagatctttgtgcacatagatcgaagtgggccttctcttgagcatcctagtgtcttagtgaatgcaaagaaatgtgaagaattaaatggatgttgttatatcattattatagttgaataacttgtcaatcatttgctgaatctatcgatttgctagcttatatacgacaggaaaaaaaaaagattgttataatttcactttcaacatttgtagtcaaaatcattccgatttcatacttttcgcttttttgatgattgaaaacctattccaagtagggacttgattatttgtaattataatatctttggtttttgcaggtatacttggggactgggaagcatggggcagcttgggcattgctccctccaatctggagataatgagctgatccctaggcgagttgtggcccttgatggtatagtagttggggacgtttcttgtggaggtgtccactcttgtgctgtaactgaagggggagctctatatgcctggggcggaggacatgtgggtcagctgggagtcgggcctcagggtggcttcttctcttgctcccttaatggatccgacatgctgctccgaaacatcccagtcctggtgataccctcaggtgttcgtcttgctacctgtgggcactcccacacacttgtgtctatgaaagatggccgcatatatgggtggggctataatagttacggtcaagcgacgaacgagaaatctacttatgcttggtttccctctccggtcgattggtgtgttggtgaagtgagacgactcgccgctggaggtggccattctgctgttctgactgatgcatgttcgctgaaagagctgtgcgaattcaagctcgcagagaccgtgaacctttcaaatgctcagctaatagaagatgttgcatcgcggactggtgcggatgccttggcacgcttgtgcgagaaagtaagggagcatttggataaggaaggagaatgtgaattcctggaaaagcaagtggcagaagaggtcaacactataggcagttaggccactagcaaaacagttcaagcagtctgaggctgaagccagtctgggattaaacagggagtcatctacaattgatagcttgacctcccagtaaagttactgattcggacattaattgttgtggtgatcatggaaaatatgtgactcgtcaattgattctgattggtctgtagacctccattggtggtgagcctctcagctgcatcggggaggcgcagaggctctatatgtgtcatgatcttgttccgaactgtcaggttgctgtaatgtagccaaatggaaacctttgtatccctggaacttgaaaggcatgtacctggtatctgcagccagtaagtttggcaatctgaattcgatgccaattcctgggcgtattcgaacgtcctacgtccatgtatttatttcagttcatgtgcatctaaacaatattggtatagcatgaaatttaagt

SEQ ID NO: 4572 - DNA, 2223 bp, Zea Mays
gtggctggctgtgtcctccatcctttcaaggacctcgggaatccagaaaattccggtggtcggtgcccacggacaggcgtgtgcgccacgagcccgacgaacaagggaacgaggccatttccaccggtcaaactaggagaagcaagcaaagctccccgccattagtagaatccgcccgaagtctgccccgctcttcggcctcgtcccttctctccagggccatggatgtagatgatgtgctcagtaacttgcgtgttgttggtgtgccaacaaagagtgcaatttacatatggggttataaccacagtggccagactgcccgaaagggcaaggaatgccacttgaggatccccaagagcctccctcccaaactattcaaattggggaatgggaagagcctcaggtggaccgatattgcatgtggccgtgagcataccgctgcagttgcttccgatggatcactgttcacctggggtgctaatgagtttggccagttgggagatgggacagaggacagcgcgaaagagcccaagaaggtcaagtcattggagactgagtttgtaaaatcagtatcctgtggcgcacattgtacagctgccgtcgctgagcctcgagaaaacgatggcacggtatcgaaaagcaggctttgggtttggggacaaaatcagggttcagattaccctcgtctattttggggagctttcacaccaaacacggtgattaagcaagtttcttgtggagctgttcatgtcatggctctatccgaggatggtctactgcaagcatggggtactgtgcaaccttattcatgatttttaaagcaatgtactggcctgttgttctttactgacttggtgcaaaccttgtcaatcagaagtggtagaacttattgtttgggctacaatgagtatggtcagcttggcagaggtcgcacttctcaaggacttcagggagctcgtgtgttaaatgcttatgcaaggttccttgatgacgcccccgagcaagtgaagattgttagagtgtcatgtggagagtaccatacagcagctatatctgaaaatggggaggtgtatacttggggactgggaagcatggggcagcttgggcattgctccctccaatctggagataatgagctgatccctaggcgagttgtggcccttgatggtatagtagttggggacgtttcttgtggaggtgtccactcttgtgctgtaactgaagggggagctctatatgcctggggcggaggacatgtgggtcagctgggagtcgggcctcagggtggcttcttctcttgctcccttaatggatccgacatgctgctccgaaacatcccagtcctggtgataccctcaggtgttcgtcttgctacctgtgggcactcccacacacttgtgtctatgaaagatggccgcatatatgggtggggctataatagttacggtcaagcgacgaacgagaaatctacttatgcttggtttccctctccggtcgattggtgtgttggtgaagtgagacgactcgccgctggaggtggccattctgctgttctgactgatgcatgttcgctgaaagagctgtgcgaattcaagctcgcagagaccgtgaacctttcaaatgctcagctaatagaagatgttgcatcgcggactggtgcggatgccttggcacgcttgtgcgagaaagtaagggagcatttggataaggaaggagaatgtgaattcctggaaaagcaagtggcagaagaggtcaacactataggcagttaggccactagcaaaacagttcaagcagtctgaggctgaagccagtctgggattaaacagggagtcatctacaattgatagcttgacctcccagtaaagttactgattcggacattaattgttgtggtgatcatggaaaatatgtgactcgtcaattgattctgattggtctgtagacctccattggtggtgagcctctcagctgcatcggggaggcgcagaggctctatatgtgtcatgatcttgttccgaactgtcaggttgctgtaatgtagccaaatggaaacctttgtatccctggaacttgaaaggcatgtacctggtatctgcagccagtaagtttggcaatctgaattcgatgccaattcctgggcgtattcgaacgtcctacgtccatgtatttatttcagttcatgtgcatctaaacaatattggtatagcatgaaatttaagt

SEQ ID NO: 4573 - DNA, 1686 bp, Zea Mays
gtggctggctgtgtcctccatcctttcaaggacctcgggaatccagaaaattccggtggtcggtgcccacggacaggcgtgtgcgccacgagcccgacgaacaagggaacgaggccatttccaccggtcaaactaggagaagcaagcaaagctccccgccattagtagaatccgcccgaagtctgccccgctcttcggcctcgtcccttctctccaggtgctaatgagtttggccagttgggagatgggacagaggacagcgcgaaagagcccaagaaggtcaagtcattggagactgagtttgtaaaatcagtatcctgtggcgcacattgtacagctgccgtcgctgagcctcgagaaaacgatggcacggtatcgaaaagcaggctttgggtttggggacaaaatcagggttcagattaccctcgtctattttggggagctttcacaccaaacacggtgattaagcaagtttcttgtggagctgttcatgtcatggctctatccgaggatggtctactgcaagcatggggtatacttggggactgggaagcatggggcagcttgggcattgctccctccaatctggagataatgagctgatccctaggcgagttgtggcccttgatggtatagtagttggggacgtttcttgtggaggtgtccactcttgtgctgtaactgaagggggagctctatatgcctggggcggaggacatgtgggtcagctgggagtcgggcctcagggtggcttcttctcttgctcccttaatggatccgacatgctgctccgaaacatcccagtcctggtgataccctcaggtgttcgtcttgctacctgtgggcactcccacacacttgtgtctatgaaagatggccgcatatatgggtggggctataatagttacggtcaagcgacgaacgagaaatctacttatgcttggtttccctctccggtcgattggtgtgttggtgaagtgagacgactcgccgctggaggtggccattctgctgttctgactgatgcatgttcgctgaaagagctgtgcgaattcaagctcgcagagaccgtgaacctttcaaatgctcagctaatagaagatgttgcatcgcggactggtgcggatgccttggcacgcttgtgcgagaaagtaagggagcatttggataaggaaggagaatgtgaattcctggaaaagcaagtggcagaagaggtcaacactataggcagttaggccactagcaaaacagttcaagcagtctgaggctgaagccagtctgggattaaacagggagtcatctacaattgatagcttgacctcccagtaaagttactgattcggacattaattgttgtggtgatcatggaaaatatgtgactcgtcaattgattctgattggtctgtagacctccattggtggtgagcctctcagctgcatcggggaggcgcagaggctctatatgtgtcatgatcttgttccgaactgtcaggttgctgtaatgtagccaaatggaaacctttgtatccctggaacttgaaaggcatgtacctggtatctgcagccagtaagtttggcaatctgaattcgatgccaattcctgggcgtattcgaacgtcctacgtccatgtatttatttcagttcatgtgcatctaaacaatattggtatagcatgaaatttaagt

SEQ ID NO: 4574 - DNA, 2025 bp, Zea Mays
gtggctggctgtgtcctccatcctttcaaggacctcgggaatccagaaaattccggtggtcggtgcccacggacaggcgtgtgcgccacgagcccgacgaacaagggaacgaggccatttccaccggtcaaactaggagaagcaagcaaagctccccgccattagtagaatccgcccgaagtctgccccgctcttcggcctcgtcccttctctccagggccatggatgtagatgatgtgctcagtaacttgcgtgttgttggtgtgccaacaaagagtgcaatttacatatggggttataaccacagtggccagactgcccgaaagggcaaggaatgccacttgaggatccccaagagcctccctcccaaactattcaaattggggaatgggaagagcctcaggtggaccgatattgcatgtggccgtgagcataccgctgcagttgcttccgatggatcactgttcacctggggtgctaatgagtttggccagttgggagatgggacagaggacagcgcgaaagagcccaagaaggtcaagtcattggagactgagtttgtaaaatcagtatcctgtggcgcacattgtacagctgccgtcgctgagcctcgagaaaacgatggcacggtatcgaaaagcaggctttgggtttggggacaaaatcagggttcagattaccctcgtctattttggggagctttcacaccaaacacggtgattaagcaagtttcttgtggagctgttcatgtcatggctctatccgaggatggtctactgcaagcatggggctacaatgagtatggtcagcttggcagaggtcgcacttctcaaggacttcagggagctcgtgtgttaaatgcttatgcaaggtatacttggggactgggaagcatggggcagcttgggcattgctccctccaatctggagataatgagctgatccctaggcgagttgtggcccttgatggtatagtagttggggacgtttcttgtggaggtgtccactcttgtgctgtaactgaagggggagctctatatgcctggggcggaggacatgtgggtcagctgggagtcgggcctcagggtggcttcttctcttgctcccttaatggatccgacatgctgctccgaaacatcccagtcctggtgataccctcaggtgttcgtcttgctacctgtgggcactcccacacacttgtgtctatgaaagatggccgcatatatgggtggggctataatagttacggtcaagcgacgaacgagaaatctacttatgcttggtttccctctccggtcgattggtgtgttggtgaagtgagacgactcgccgctggaggtggccattctgctgttctgactgatgcatgttcgctgaaagagctgtgcgaattcaagctcgcagagaccgtgaacctttcaaatgctcagctaatagaagatgttgcatcgcggactggtgcggatgccttggcacgcttgtgcgagaaagtaagggagcatttggataaggaaggagaatgtgaattcctggaaaagcaagtggcagaagaggtcaacactataggcagttaggccactagcaaaacagttcaagcagtctgaggctgaagccagtctgggattaaacagggagtcatctacaattgatagcttgacctcccagtaaagttactgattcggacattaattgttgtggtgatcatggaaaatatgtgactcgtcaattgattctgattggtctgtagacctccattggtggtgagcctctcagctgcatcggggaggcgcagaggctctatatgtgtcatgatcttgttccgaactgtcaggttgctgtaatgtagccaaatggaaacctttgtatccctggaacttgaaaggcatgtacctggtatctgcagccagtaagtttggcaatctgaattcgatgccaattcctgggcgtattcgaacgtcctacgtccatgtatttatttcagttcatgtgcatctaaacaatattggtatagcatgaaatttaagt

SEQ ID NO: 4575 - DNA, 2516 bp, Zea Mays
gtggctggctgtgtcctccatcctttcaaggacctcgggaatccagaaaattccggtggtcggtgcccacggacaggcgtgtgcgccacgagcccgacgaacaagggaacgaggccatttccaccggtcaaactaggagaagcaagcaaagctccccgccattagtagaatccgcccgaagtctgccccgctcttcggcctcgtcccttctctccagggccatggatgtagatgatgtgctcagtaacttgcgtgttgttggtgtgccaacaaagagtgcaatttacatatggggttataaccacagtggccagactgcccgaaagggcaaggaatgccacttgaggatccccaagagcctccctcccaaactattcaaattggggaatgggaagagcctcaggtggaccgatattgcatgtggccgtgagcataccgctgcagttgcttccgatggatcactgttcacctggggtgctaatgagtttggccagttgggagatgggacagaggacagcgcgaaagagcccaagaaggtcaagtcattggagactgagtttgtaaaatcagtatcctgtggcgcacattgtacagctgccgtcgctgagcctcgagaaaacgatggcacggtatcgaaaagcaggctttgggtttggggacaaaatcagggttcagattaccctcgtctattttggggagctttcacaccaaacacggtgattaagcaagtttcttgtggagctgttcatgtcatggctctatccgaggatggtctactgcaagcatggggctacaatgagtatggtcagcttggcagaggtcgcacttctcaaggacttcagggagctcgtgtgttaaatgcttatgcaaggttccttgatgacgcccccgagcaagtgaagattgttagagtgtcatgtggagagtaccatacagcagctatatctgaaaatggggaggtgtaagtccattagtcatcccaagggagctgttctctgctgccagtgactgttgtatggtttctcacatgacaacatagaagcatttggaatattgaagactaaccacgactaactatagggctaactgcaaagaaaggaagtaaatacatttatattatagatctcatattgatcaactaatctcaatatggcgtcagggttactctaaatagctttctgctatttaagatctttgtgcacatagatcgaagtgggccttctcttgagcatcctagtgtcttagtgaatgcaaagaaatgtgaagaattaaatggatgttgttatatcattattatagttgaataacttgtcaatcatttgctgaatctatcgatttgctagcttatatacgacaggaaaaaaaaaagattgttataatttcactttcaacatttgtagtcaaaatcattccgatttcatacttttcgcttttttgatgattgaaaacctattccaagtagggacttgattatttgtaattataatatctttggtttttgcaggtatacttggggactgggaagcatggggcagcttgggcattgctccctccaatctggagataatgagctgatccctaggcgagttgtggcccttgatggtatagtagttggggacgtttcttgtggaggtgtccactcttgtgctgtaactgaagggggagctctatatgcctggggcggaggacatgtgggtcagctgggagtcgggcctcagggtggcttcttctcttgctcccttaatggatccgacatgctgctccgaaacatcccagtcctggtgataccctcaggtgtgttggtgaagtgagacgactcgccgctggaggtggccattctgctgttctgactgatgcatgttcgctgaaagagctgtgcgaattcaagctcgcagagaccgtgaacctttcaaatgctcagctaatagaagatgttgcatcgcggactggtgcggatgccttggcacgcttgtgcgagaaagtaagggagcatttggataaggaaggagaatgtgaattcctggaaaagcaagtggcagaagaggtcaacactataggcagttaggccactagcaaaacagttcaagcagtctgaggctgaagccagtctgggattaaacagggagtcatctacaattgatagcttgacctcccagtaaagttactgattcggacattaattgttgtggtgatcatggaaaatatgtgactcgtcaattgattctgattggtctgtagacctccattggtggtgagcctctcagctgcatcggggaggcgcagaggctctatatgtgtcatgatcttgttccgaactgtcaggttgctgtaatgtagccaaatggaaacctttgtatccctggaacttgaaaggcatgtacctggtatctgcagccagtaagtttggcaatctgaattcgatgccaattcctgggcgtattcgaacgtcctacgtccatgtatttatttcagttcatgtgcatctaaacaatattggtatagcatgaaatttaagt

SEQ ID NO: 4576 - DNA, 2167 bp, Zea Mays
gtggctggctgtgtcctccatcctttcaaggacctcgggaatccagaaaattccggtggtcggtgcccacggacaggcgtgtgcgccacgagcccgacgaacaagggaacgaggccatttccaccggtcaaactaggagaagcaagcaaagctccccgccattagtagaatccgcccgaagtctgccccgctcttcggcctcgtcccttctctccagggccatggatgtagatgatgtgctcagtaacttgcgtgttgttggtgtgccaacaaagagtgcaatttacatatggggttataaccacagtggccagactgcccgaaagggcaaggaatgccacttgaggatccccaagagcctccctcccaaactattcaaattggggaatgggaagagcctcaggtggaccgatattgcatgtggccgtgagcataccgctgcagttgcttccgatggatcactgttcacctggggtgctaatgagtttggccagttgggagatgggacagaggacagcgcgaaagagcccaagaaggtcaagtcattggagactgagtttgtaaaatcagtatcctgtggcgcacattgtacagctgccgtcgctgagcctcgagaaaacgatggcacggtatcgaaaagcaggctttgggtttggggacaaaatcagggttcagattaccctcgtctattttggggagctttcacaccaaacacggtgattaagcaagtttcttgtggagctgttcatgtcatggctctatccgaggatggtctactgcaagcatggggctacaatgagtatggtcagcttggcagaggtcgcacttctcaaggacttcagggagctcgtgtgttaaatgcttatgcaaggttccttgatgacgcccccgagcaagtgaagattgttagagtgtcatgtggagagtaccatacagcagctatatctgaaaatggggaggtgtaagtccattagtcatcccaagggagctgttctctgctgccagtgactgttgtatacttggggactgggaagcatggggcagcttgggcattgctccctccaatctggagataatgagctgatccctaggcgagttgtggcccttgatggtatagtagttggggacgtttcttgtggaggtgtccactcttgtgctgtaactgaagggggagctctatatgcctggggcggaggacatgtgggtcagctgggagtcgggcctcagggtggcttcttctcttgctcccttaatggatccgacatgctgctccgaaacatcccagtcctggtgataccctcaggtgttcgtcttgctacctgtgggcactcccacacacttgtgtctatgaaagatggccgcatatatgggtggggctataatagttacggtcaagcgacgaacgagaaatctacttatgcttggtttccctctccggtcgattggtgtgttggtgaagtgagacgactcgccgctggaggtggccattctgctgttctgactgatgcatgttcgctgaaagagctgtgcgaattcaagctcgcagagaccgtgaacctttcaaatgctcagctaatagaagatgttgcatcgcggactggtgcggatgccttggcacgcttgtgcgagaaagtaagggagcatttggataaggaaggagaatgtgaattcctggaaaagcaagtggcagaagaggtcaacactataggcagttaggccactagcaaaacagttcaagcagtctgaggctgaagccagtctgggattaaacagggagtcatctacaattgatagcttgacctcccagtaaagttactgattcggacattaattgttgtggtgatcatggaaaatatgtgactcgtcaattgattctgattggtctgtagacctccattggtggtgagcctctcagctgcatcggggaggcgcagaggctctatatgtgtcatgatcttgttccgaactgtcaggttgctgtaatgtagccaaatggaaacctttgtatccctggaacttgaaaggcatgtacctggtatctgcagccagtaagtttggcaatctgaattcgatgccaattcctgggcgtattcgaacgtcctacgtccatgtatttatttcagttcatgtgcatctaaacaatattggtatagcatgaaatttaagt

SEQ ID NO: 4577 - DNA, 1963 bp, Zea Mays
gtggctggctgtgtcctccatcctttcaaggacctcgggaatccagaaaattccggtggtcggtgcccacggacaggcgtgtgcgccacgagcccgacgaacaagggaacgaggccatttccaccggtcaaactaggagaagcaagcaaagctccccgccattagtagaatccgcccgaagtctgccccgctcttcggcctcgtcccttctctccagggccatggatgtagatgatgtgctcagtaacttgcgtgttgttggtgtgccaacaaagagtgcaatttacatatggggttataaccacagtggccagactgcccgaaagggcaaggaatgccacttgaggatccccaagagcctccctcccaaactattcaaattggggaatgggaagagcctcaggtggaccgatattgcatgtggccgtgagcataccgctgcagttgcttccgatggatcactgttcacctgggctcaacttgaatgcaatcaggtgctaatgagtttggccagttgggagatgggacagaggacagcgcgaaagagcccaagaaggtcaagtcattggagactgagtttgtaaaatcagtatcctgtggcgcacattgtacagctgccgtcgctgagcctcgagaaaacgatggcacggtatcgaaaagcaggctttgggtttggggacaaaatcagggttcagattaccctcgtctattttggggagctttcacaccaaacacggtgattaagcaagtttcttgtggagctgttcatgtcatggctctatccgaggatggtctactgcaagcatggggtatacttggggactgggaagcatggggcagcttgggcattgctccctccaatctggagataatgagctgatccctaggcgagttgtggcccttgatggtatagtagttggggacgtttcttgtggaggtgtccactcttgtgctgtaactgaagggggagctctatatgcctggggcggaggacatgtgggtcagctgggagtcgggcctcagggtggcttcttctcttgctcccttaatggatccgacatgctgctccgaaacatcccagtcctggtgataccctcaggtgttcgtcttgctacctgtgggcactcccacacacttgtgtctatgaaagatggccgcatatatgggtggggctataatagttacggtcaagcgacgaacgagaaatctacttatgcttggtttccctctccggtcgattggtgtgttggtgaagtgagacgactcgccgctggaggtggccattctgctgttctgactgatgcatgttcgctgaaagagctgtgcgaattcaagctcgcagagaccgtgaacctttcaaatgctcagctaatagaagatgttgcatcgcggactggtgcggatgccttggcacgcttgtgcgagaaagtaagggagcatttggataaggaaggagaatgtgaattcctggaaaagcaagtggcagaagaggtcaacactataggcagttaggccactagcaaaacagttcaagcagtctgaggctgaagccagtctgggattaaacagggagtcatctacaattgatagcttgacctcccagtaaagttactgattcggacattaattgttgtggtgatcatggaaaatatgtgactcgtcaattgattctgattggtctgtagacctccattggtggtgagcctctcagctgcatcggggaggcgcagaggctctatatgtgtcatgatcttgttccgaactgtcaggttgctgtaatgtagccaaatggaaacctttgtatccctggaacttgaaaggcatgtacctggtatctgcagccagtaagtttggcaatctgaattcgatgccaattcctgggcgtattcgaacgtcctacgtccatgtatttatttcagttcatgtgcatctaaacaatattggtatagcatgaaatttaagt

SEQ ID NO: 4578 - DNA, 1973 bp, Zea Mays
gtggctggctgtgtcctccatcctttcaaggacctcgggaatccagaaaattccggtggtcggtgcccacggacaggcgtgtgcgccacgagcccgacgaacaagggaacgaggccatttccaccggtcaaactaggagaagcaagcaaagctccccgccattagtagaatccgcccgaagtctgccccgctcttcggcctcgtcccttctctccagggccatggatgtagatgatgtgctcagtaacttgcgtgttgttggtgtgccaacaaagagtgcaatttacatatggggttataaccacagtggccagactgcccgaaagggcaaggaatgccacttgaggatccccaagagcctccctcccaaactattcaaattggggaatgggaagagcctcaggtggaccgatattgcatgtggccgtgagcataccgctgcagttgcttccgatggatcactgttcacctggggtgctaatgagtttggccagttgggagatgggacagaggacagcgcgaaagagcccaagaaggtcaagtcattggagactgagtttgtaaaatcagtatcctgtggcgcacattgtacagctgccgtcgctgagcctcgagaaaacgatggcacggtatcgaaaagcaggctttgggtttggggacaaaatcagggttcagattaccctcgtctattttggggagctttcacaccaaacacggtgattaagcaagtttcttgtggagctgttcatgtcatggctctatccgaggatggtctactgcaagcatggggctacaatgagtatggtcagcttggcagaggtcgcacttctcaaggacttcagggagctcgtgtgttaaatgcttatgcaaggttccttgatgacgcccccgagcaagtgaagattgttagagtgtcatgtggagagtaccatacagcagctatatctgaaaatggggaggtgtatacttggggactgggaagcatggggcagcttgggcattgctccctccaatctggagataatgagctgatccctaggcgagttgtggcccttgatggtatagtagttggggacgtttcttgtggaggtgtccactcttgtgctgtaactgaagggggagctctatatgcctggggcggaggacatgtgggtcagctgggagtcgggcctcagggtggcttcttctcttgctcccttaatggatccgacatgctgctccgaaacatcccagtcctggtgataccctcaggtgtgttggtgaagtgagacgactcgccgctggaggtggccattctgctgttctgactgatgcatgttcgctgaaagagctgtgcgaattcaagctcgcagagaccgtgaacctttcaaatgctcagctaatagaagatgttgcatcgcggactggtgcggatgccttggcacgcttgtgcgagaaagtaagggagcatttggataaggaaggagaatgtgaattcctggaaaagcaagtggcagaagaggtcaacactataggcagttaggccactagcaaaacagttcaagcagtctgaggctgaagccagtctgggattaaacagggagtcatctacaattgatagcttgacctcccagtaaagttactgattcggacattaattgttgtggtgatcatggaaaatatgtgactcgtcaattgattctgattggtctgtagacctccattggtggtgagcctctcagctgcatcggggaggcgcagaggctctatatgtgtcatgatcttgttccgaactgtcaggttgctgtaatgtagccaaatggaaacctttgtatccctggaacttgaaaggcatgtacctggtatctgcagccagtaagtttggcaatctgaattcgatgccaattcctgggcgtattcgaacgtcctacgtccatgtatttatttcagttcatgtgcatctaaacaatattggtatagcatgaaatttaagt

SEQ ID NO: 4579 - DNA, 1511 bp, Zea Mays
gtggctggctgtgtcctccatcctttcaaggacctcgggaatccagaaaattccggtggtcggtgcccacggacaggcgtgtgcgccacgagcccgacgaacaagggaacgaggccatttccaccggtcaaactaggagaagcaagcaaagctccccgccattagtagaatccgcccgaagtctgccccgctcttcggcctcgtcccttctctccagggccatggatgtagatgatgtgctcagtaacttgcgtgttgttggtgtgccaacaaagagtgcaatttacatatggggttataaccacagtggccagactgcccgaaagggcaaggaatgccacttgaggatccccaagagcctccctcccaaactattcaaattggggaatgggaagagcctcaggtggaccgatattgcatgtggccgtgagcataccgctgcagttgcttccgatggatcactgttcacctggggtgctaatgagtttggccagttgggagatgggacagaggacagcgcgaaagagcccaagaaggtcaagtcattggagactgagtttgtaaaatcagtatcctgtggcgcacattgtacagctgccgtcgctgagcctcgagaaaacgatggcacggtatcgaaaagcaggctttgggtttggggacaaaatcagggttcagattaccctcgtctattttggggagctttcacaccaaacacggtgattaagcaagtttcttgtggagctgttcatgtcatggctctatccgaggatggtctactgcaagcatggggtgtgttggtgaagtgagacgactcgccgctggaggtggccattctgctgttctgactgatgcatgttcgctgaaagagctgtgcgaattcaagctcgcagagaccgtgaacctttcaaatgctcagctaatagaagatgttgcatcgcggactggtgcggatgccttggcacgcttgtgcgagaaagtaagggagcatttggataaggaaggagaatgtgaattcctggaaaagcaagtggcagaagaggtcaacactataggcagttaggccactagcaaaacagttcaagcagtctgaggctgaagccagtctgggattaaacagggagtcatctacaattgatagcttgacctcccagtaaagttactgattcggacattaattgttgtggtgatcatggaaaatatgtgactcgtcaattgattctgattggtctgtagacctccattggtggtgagcctctcagctgcatcggggaggcgcagaggctctatatgtgtcatgatcttgttccgaactgtcaggttgctgtaatgtagccaaatggaaacctttgtatccctggaacttgaaaggcatgtacctggtatctgcagccagtaagtttggcaatctgaattcgatgccaattcctgggcgtattcgaacgtcctacgtccatgtatttatttcagttcatgtgcatctaaacaatattggtatagcatgaaatttaagt

SEQ ID NO: 4580 - DNA, 2401 bp, Zea Mays
gtggctggctgtgtcctccatcctttcaaggacctcgggaatccagaaaattccggtggtcggtgcccacggacaggcgtgtgcgccacgagcccgacgaacaagggaacgaggccatttccaccggtcaaactaggagaagcaagcaaagctccccgccattagtagaatccgcccgaagtctgccccgctcttcggcctcgtcccttctctccaggtgctaatgagtttggccagttgggagatgggacagaggacagcgcgaaagagcccaagaaggtcaagtcattggagactgagtttgtaaaatcagtatcctgtggcgcacattgtacagctgccgtcgctgagcctcgagaaaacgatggcacggtatcgaaaagcaggctttgggtttggggacaaaatcagggttcagattaccctcgtctattttggggagctttcacaccaaacacggtgattaagcaagtttcttgtggagctgttcatgtcatggctctatccgaggatggtctactgcaagcatggggctacaatgagtatggtcagcttggcagaggtcgcacttctcaaggacttcagggagctcgtgtgttaaatgcttatgcaaggttccttgatgacgcccccgagcaagtgaagattgttagagtgtcatgtggagagtaccatacagcagctatatctgaaaatggggaggtgtaagtccattagtcatcccaagggagctgttctctgctgccagtgactgttgtatggtttctcacatgacaacatagaagcatttggaatattgaagactaaccacgactaactatagggctaactgcaaagaaaggaagtaaatacatttatattatagatctcatattgatcaactaatctcaatatggcgtcagggttactctaaatagctttctgctatttaagatctttgtgcacatagatcgaagtgggccttctcttgagcatcctagtgtcttagtgaatgcaaagaaatgtgaagaattaaatggatgttgttatatcattattatagttgaataacttgtcaatcatttgctgaatctatcgatttgctagcttatatacgacaggaaaaaaaaaagattgttataatttcactttcaacatttgtagtcaaaatcattccgatttcatacttttcgcttttttgatgattgaaaacctattccaagtagggacttgattatttgtaattataatatctttggtttttgcaggtatacttggggactgggaagcatggggcagcttgggcattgctccctccaatctggagataatgagctgatccctaggcgagttgtggcccttgatggtatagtagttggggacgtttcttgtggaggtgtccactcttgtgctgtaactgaagggggagctctatatgcctggggcggaggacatgtgggtcagctgggagtcgggcctcagggtggcttcttctcttgctcccttaatggatccgacatgctgctccgaaacatcccagtcctggtgataccctcaggtgttcgtcttgctacctgtgggcactcccacacacttgtgtctatgaaagatggccgcatatatgggtggggctataatagttacggtcaagcgacgaacgagaaatctacttatgcttggtttccctctccggtcgattggtgtgttggtgaagtgagacgactcgccgctggaggtggccattctgctgttctgactgatgcatgttcgctgaaagagctgtgcgaattcaagctcgcagagaccgtgaacctttcaaatgctcagctaatagaagatgttgcatcgcggactggtgcggatgccttggcacgcttgtgcgagaaagtaagggagcatttggataaggaaggagaatgtgaattcctggaaaagcaagtggcagaagaggtcaacactataggcagttaggccactagcaaaacagttcaagcagtctgaggctgaagccagtctgggattaaacagggagtcatctacaattgatagcttgacctcccagtaaagttactgattcggacattaattgttgtggtgatcatggaaaatatgtgactcgtcaattgattctgattggtctgtagacctccattggtggtgagcctctcagctgcatcggggaggcgcagaggctctatatgtgtcatgatcttgttccgaactgtcaggttgctgtaatgtagccaaatggaaacctttgtatccctggaacttgaaaggcatgtacctggtatctgcagccagtaagtttggcaatctgaattcgatgccaattcctgggcgtattcgaacgtcctacgtccatgtatttatttcagttcatgtgcatctaaacaatattggtatagcatgaaatttaagt

SEQ ID NO: 4581 - DNA, 1801 bp, Zea Mays
gtggctggctgtgtcctccatcctttcaaggacctcgggaatccagaaaattccggtggtcggtgcccacggacaggcgtgtgcgccacgagcccgacgaacaagggaacgaggccatttccaccggtcaaactaggagaagcaagcaaagctccccgccattagtagaatccgcccgaagtctgccccgctcttcggcctcgtcccttctctccagggccatggatgtagatgatgtgctcagtaacttgcgtgttgttggtgtgccaacaaagagtgcaatttacatatggggttataaccacagtggccagactgcccgaaagggcaaggaatgccacttgaggatccccaagagcctccctcccaaactattcaaattggggaatgggaagagcctcaggtggaccgatattgcatgtggccgtgagcataccgctgcagttgcttccgatggatcactgttcacctggggtgctaatgagtttggccagttgggagatgggacagaggacagcgcgaaagagcccaagaaggtcaagtcattggagactgagtttgtaaaatcagtatcctgtggcgcacattgtacagctgccgtcgctgagcctcgagaaaacgatggcacggtatcgaaaagcaggctttgggtttggggacaaaatcagggttcagattaccctcgtctattttggggagctttcacaccaaacacggtgattaagcaagtttcttgtggagctgttcatgtcatggctctatccgaggatggtctactgcaagcatggggtatacttggggactgggaagcatggggcagcttgggcattgctccctccaatctggagataatgagctgatccctaggcgagttgtggcccttgatggtatagtagttggggacgtttcttgtggaggtgtccactcttgtgctgtaactgaagggggagctctatatgcctggggcggaggacatgtgggtcagctgggagtcgggcctcagggtggcttcttctcttgctcccttaatggatccgacatgctgctccgaaacatcccagtcctggtgataccctcaggtgtgttggtgaagtgagacgactcgccgctggaggtggccattctgctgttctgactgatgcatgttcgctgaaagagctgtgcgaattcaagctcgcagagaccgtgaacctttcaaatgctcagctaatagaagatgttgcatcgcggactggtgcggatgccttggcacgcttgtgcgagaaagtaagggagcatttggataaggaaggagaatgtgaattcctggaaaagcaagtggcagaagaggtcaacactataggcagttaggccactagcaaaacagttcaagcagtctgaggctgaagccagtctgggattaaacagggagtcatctacaattgatagcttgacctcccagtaaagttactgattcggacattaattgttgtggtgatcatggaaaatatgtgactcgtcaattgattctgattggtctgtagacctccattggtggtgagcctctcagctgcatcggggaggcgcagaggctctatatgtgtcatgatcttgttccgaactgtcaggttgctgtaatgtagccaaatggaaacctttgtatccctggaacttgaaaggcatgtacctggtatctgcagccagtaagtttggcaatctgaattcgatgccaattcctgggcgtattcgaacgtcctacgtccatgtatttatttcagttcatgtgcatctaaacaatattggtatagcatgaaatttaagt

SEQ ID NO: 4582 - DNA, 5262 bp, Zea Mays
ccccgccggcgctgccgcgccgagggcccgagacccgagctcctccctgccccgcgcccccacggccgccctgccgagctccggccagggccgctcagccgctggccgagctccacccgcgcgttcgcggctctgcgcccccgccaggccgagcttcgcccgttcgccgtccgcgcctgcggcttccgcagtccgcacagctgacagcagtccattcgccgtccgcgcctccggtctccggacagcagtgagcgttagcaacaccttcattttggcgcgtcctccgccactggcgcgagcgcgtggcgacagcagctgagcggcggtgccagcgtgagcaaccgagcaggcgcgggcagccgagcgaggcagcagctgctgcgctaatggcacggccgttctcgtcgctggtggactcctcgtatcgccgcaggatcatcgagtgcaaagcggcggcttactccttgcggctcccttcctgcgctaggccgcccgcacgcccccgtttcgctgccagctccgacaacactccagcgcatggaattgatagtagcatcattaccattcagactatgacgcggtgggagaccctgaatcacatggcttacaaatttgggagccttggctcaaatgcattcacaagcaatgtcagtgttgaagcatcttgctgtgacgggcttctcctgcactgctatttttacctccctcttgcggaccatttcacgttttgatcccaccaaccatgtcgtttttgaactccttgtcaaagcatatgtcaaggaaagaaaagtgctagatgcagctgtggcagttctctttatggatgattgcggctttaaggcttcacctgtttcttgcaataccatcctcaatgctcttgttgaggaaggggaatcaaagcatgtttggttgttcttgagagagagtttggcccgtaagtttcctttgggtgttaccacttgcaatattcttctgaattccctatgcaccaatggagaatttagaaaggctgaagatatgcttcagaagatgaagagctgtcacatatctaattctgtcacatataatacaatcctacattggtatgttaagaagggaagatttaaggctgccctgtgtgttctagaagatatggagagggatagtgtacaggcagatgtatatacatacaacatcatgatagataaattatgtagaataaagaggagtacacgtgctttccttttgctcaaaagaatgaggaaagatgacttaacacctgatgaatgtacctacaatactttgattaatggtttttttcgtgaaggtaagataaatcatgctcgctatgtcttcaatcatatgctgagacaaaatttggttccaagtgtagctacttacactacaatgattgatgggtattgccgaaacaggagaattgataaggccctaagtattctatcggaaatgcaaattactggtgtcatgccaagtgaactaacttatagtgctttgttgaatggttactgcaaagtttccatgctgggacctgctatatatcttatggaagatctgaaatcaagaggtataaccatcaataagacgatgcgtactattctcattgatgggttctgtcaagtgggtgagatttccaaggctaaacaaattttgaagagtatgtttgaggatggaattgatccagatgtcatcacttattcagcattgatcaatggtatgtgcaggatggctaagatgcatgaaacaaaagaaattttgtcaaggatgcagaaaagtggaattttacctaatgatgtcctatatacaactctgatttgttactattgtaaggcagggtatgtcaaggaagcactaaagcattttgtggacatttatcgaagggggctagttgccaatccagttatccataatgcattattacatgctttctatagagagggaatgattacagaggctgaacacttcagacaatacatgtctaggatgaatatatcatttgattctgtctcctttaaccgcataattgatagttattgccacagaggtaacatagttggggcattttcagtttatgatgatatggttagatatggctattctccaaatgtttgcacatatcagaatttgcttagaggattatgtcaaggaggccacttggtacaagcaaggcaatttatgtcctgtcttcttgacataccttttgctattgatgagaaaactttcaatgcactacttcttgggatttgcagatatggaaccctagatgaagctttggatctatgcgagaaaatgataaaaaacaactgtttacctgatatccatacctacaccattcttctcagtggtttttgcaggaaaggtaagattttgcctgcgttagtcatcttgcagatgatgttggagaaaggagtagtccctgatactgttgcgtatacctgcttgctgaatgggttgatcaatgaaggccaagtgaaagctgcttcttacgttttccatgagatcatatgcaaggaaggcctgtatgcagattgtattgcctataattcgttgatgaatgggtacctcaagagtcgaaatgtgaataccataaaaaggatgatgtctgatatgtatcagaatgaggtttatccaaactctgctagctataacatacttatgcatgggtatgtcaagaggggacaattttcaaagtcattatatctgtacaaatatatggtgaggaaaggaatcaggccagacaatgttacatatcgtttgctcattcttgggctttctgagtgtgggttgattgacattgcagttaagtttttggagaagatggtcttagaaggcattttccctgatcggttagttttcgatatattgattacagctttcagtgagaaatccaagatgcataatgcactacaagttttcaattgtatgaagtggttacatatgtcacccagcagtaaaacttttagtgccatgataaatggattgatcagaaaaggttacttggaccatagtcacaaagttttacatgagatgttacaagtagggcttcaaccaaaccatacacactatattgcattggtcaatgcaaaatgtcgggttggtgagattgatagagcgtttaggctaaaagaagaaatgaaagctattggcattgtgcctgctgaagttgcggagagttcaattattcgaggactttgtagatgtggaaaacttgaggaggcagtcatagttttcagtagtatgatgcgttcaggaatggtgccaactgttgctaccttcactactctaatgcacagtctttgcaaagaatccaagattgctgatgctttgcacttgaagaggctgatggagttgtgtagattgagggttgatgttgtcagttataatgttttaattactggtttatgcaaagacaaacatatctctgacgcactagatctttatggagagatgaaatctaagggtctttggccgaatattactacctatatcacactcactggagctatgtattcaacagggagagtgcagaatggagaggaactactggaggatatagaagaaaggggacttattccggcatataagcagcctgaaaatcttgaaagacggatggaggatgcaattattaggctgaacatgataagaaactgcagaaaggaagtgccttttagaggggttgagctactacctctagaccctaaacccgtgtgtagtgctgctagtgattgtaaccccactgaaactcggcaacacaaaggaatttgagcatttgaccaatatggttggtacaaaactattggtatcttttctgagtagtgcttgtgatgccttacattgttgtgttcctccactgagggatccatggatccatctctagatatgttgaatatgtgattttccttaaaaagctaattcagaaatacaaaattacctagggaggaagaggaccctcacatatttcagtggatcctgggggcaggtaaaaagggattatgagtgctgatgcgtgatgttaggtatgatatgcataagttacagcaggcattcgaaggcatcaaaatgcgcaacattctactcaacatttttatgatcacttagtgcccttatgtcattaatgagttagtatctttttttttctcgaaaaaacgcaggaggactgcgttttagatatatattaagaagagagagacaaaggtctaagagaccaaaaaaacaacaacaacgcactccctatggaggccagtaacactcgtacatgaaaggatccataaaaacacccacacacactccttacaacaacctatgcagggggcagccaagaaggagagccctttggctccagcaatttcccagcctcttctttcctcatctgcatgctccataatcaaaggaaggctgggagaccctccataaaaaatgactctattacgatgcttccaaatcatccacgaccctaaaatgatgagggagtcaagaccttccctgaccagaccatttactgtctctgaaaccatctcccaccaatccataaaggaaactgcatctggctgtggggctaaactatgcagcccgaactttcttagtaggttgtaccagaaaatccttgagaagacacaattcacaagcaagtggttcagagtttccccttgctggtcacataaaggacatctgatagggtgattcaatccccttcttaccaagcgatcagctgtccaacatctattttgggccaccaaccaaatgaaaaaacaacattttggtggagcccaagatctccaaacccttttatagtgcccaaaggtggtagacccaaggaaaagacccatataagctgactttgcagagtatctaccattcgaatataagctgaaaatatgtctatcctcagtgttaggctgcagcacaaaatctgcgagaatattccagaggtgtagataatctacaatggcaccaactgtaagagcccctttgatgtctgcaatccatcgtctgttcaatagggcctgctgcacagttcttctgttaataattctttttggaataatgctgaataatcttggagcaatatcagatacccttttgccatggatccatttatctatccagaacatggtgttggtcccattccccacctcagagatcaacaccttggagaaggaatgggccgtgctaggaatttgaatggacaggctagaccatgggcgtcttgggtcagttttttgcaaccaaagccatcgcatgtggagggcccaacagagcttagga

SEQ ID NO: 4583 - DNA, 4579 bp, Zea Mays
gcggcttccgcagtccgcacagctgacagcagtccattcgccgtccgcgcctccggtctccggacagcagtgagcgttagcaacaccttcattttggcgcgtcctccgccactggcgcgagcgcgtggcgacagcagctgagcggcggtgccagcgtgagcaaccgagcaggcgcgggcagccgagcgaggcagcagctgctgcgctaatggcacggccgttctcgtcgctggtggactcctcgtatcgccgcaggatcatcgagtgcaaagcggcggcttactccttgcggctcccttcctgcgctaggccgcccgcacgcccccgtttcgctgccagctccgacaacactccagcgcatggaattgatagtagcatcattaccattcagactatgacgcggtgggagaccctgaatcacatggcttacaaatttgggagccttggctcaaatgcattcacaagcaatgtcagtgttgaagcatcttgctgtgacgggcttctcctgcactgctatttttacctccctcttgcggaccatttcacgttttgatcccaccaaccatgtcgtttttgaactccttgtcaaagcatatgtcaaggaaagaaaagtgctagatgcagctgtggcagttctctttatggatgattgcggctttaaggcttcacctgtttcttgcaataccatcctcaatgctcttgttgaggaaggggaatcaaagcatgtttggttgttcttgagagagagtttggcccgtaagtttcctttgggtgttaccacttgcaatattcttctgaattccctatgcaccaatggagaatttagaaaggctgaagatatgcttcagaagatgaagagctgtcacatatctaattctgtcacatataatacaatcctacattggtatgttaagaagggaagatttaaggctgccctgtgtgttctagaagatatggagagggatagtgtacaggcagatgtatatacatacaacatcatgatagataaattatgtagaataaagaggagtacacgtgctttccttttgctcaaaagaatgaggaaagatgacttaacacctgatgaatgtacctacaatactttgattaatggtttttttcgtgaaggtaagataaatcatgctcgctatgtcttcaatcatatgctgagacaaaatttggttccaagtgtagctacttacactacaatgattgatgggtattgccgaaacaggagaattgataaggccctaagtattctatcggaaatgcaaattactggtgtcatgccaagtgaactaacttatagtgctttgttgaatggttactgcaaagtttccatgctgggacctgctatatatcttatggaagatctgaaatcaagaggtataaccatcaataagacgatgcgtactattctcattgatgggttctgtcaagtgggtgagatttccaaggctaaacaaattttgaagagtatgtttgaggatggaattgatccagatgtcatcacttattcagcattgatcaatggtatgtgcaggatggctaagatgcatgaaacaaaagaaattttgtcaaggatgcagaaaagtggaattttacctaatgatgtcctatatacaactctgatttgttactattgtaaggcagggtatgtcaaggaagcactaaagcattttgtggacatttatcgaagggggctagttgccaatccagttatccataatgcattattacatgctttctatagagagggaatgattacagaggctgaacacttcagacaatacatgtctaggatgaatatatcatttgattctgtctcctttaaccgcataattgatagttattgccacagaggtaacatagttggggcattttcagtttatgatgatatggttagatatggctattctccaaatgtttgcacatatcagaatttgcttagaggattatgtcaaggaggccacttggtacaagcaaggcaatttatgtcctgtcttcttgacataccttttgctattgatgagaaaactttcaatgcactacttcttgggatttgcagatatggaaccctagatgaagctttggatctatgcgagaaaatgataaaaaacaactgtttacctgatatccatacctacaccattcttctcagtggtttttgcaggaaaggtaagattttgcctgcgttagtcatcttgcagatgatgttggagaaaggagtagtccctgatactgttgcgtatacctgcttgctgaatgggttgatcaatgaaggccaagtgaaagctgcttcttacgttttccatgagatcatatgcaaggaaggcctgtatgcagattgtattgcctataattcgttgatgaatgggtacctcaagagtcgaaatgtgaataccataaaaaggatgatgtctgatatgtatcagaatgaggtttatccaaactctgctagctataacatacttatgcatgggtatgtcaagaggggacaattttcaaagtcattatatctgtacaaatatatggtgaggaaaggaatcaggccagacaatgttacatatcgtttgctcattcttgggctttctgagtgtgggttgattgacattgcagttaagtttttggagaagatggtcttagaaggcattttccctgatcggttagttttcgatatattgattacagctttcagtgagaaatccaagatgcataatgcactacaagttttcaattgtatgaagtggttacatatgtcacccagcagtaaaacttttagtgccatgataaatggattgatcagaaaaggttacttggaccatagtcacaaagttttacatgagatgttacaagtagggcttcaaccaaaccatacacactatattgcattggtcaatgcaaaatgtcgggttggtgagattgatagagcgtttaggctaaaagaagaaatgaaagctattggcattgtgcctgctgaagttgcggagagttcaattattcgaggactttgtagatgtggaaaacttgaggaggcagtcatagttttcagtagtatgatgcgttcaggaatggtgccaactgttgctaccttcactactctaatgcacagtctttgcaaagaatccaagattgctgatgctttgcacttgaagaggctgatggagttgtgtagattgagggttgatgttgtcagttataatgttttaattactggtttatgcaaagacaaacatatctctgacgcactagatctttatggagagatgaaatctaagggtctttggccgaatattactacctatatcacactcactggagctatgtattcaacagggagagtgcagaatggagaggaactactggaggatatagaagaaaggggacttattccggcatataagcagcctgaaaatcttgaaagacggatggaggatgcaattattaggctgaacatgataagaaactgcagaaaggaagtgccttttagaggggttgagctactacctctagaccctaaacccgtgtgtagtgctgctagtgattgtaaccccactgaaactcggcaacacaaaggaatttgagcatttgaccaatatggttggtacaaaactattggtatcttttctgagtagtgcttgtgatgccttacattgttgtgttcctccactgagggatccatggatccatctctagatatgttgaatatgtgattttccttaaaaagctaattcagaaatacaaaattacctagggaggaagaggaccctcacatatttcagtggatcctgggggcaggtaaaaagggattatgagtgctgatgcgtgatgttaggtatgatatgcataagttacagcaggcattcgaaggtaagaagtgttactatggcaattgttgtatctacatttatgtgccttttgaccccttcttttagttagtattgctaacatctttgcatggaatctcagtggatcttttatcttcaatggttggctagagtgaggaatattaatgaccatatttccttaacatccaactatagctgctgtcctgcacctgcagagttagaagcatcttttttgttgatcgtgcttgagcactttttgtgtttgtatcttcactagtagacaattgacatgcatgtgtgacacacacatgttatgaaaatcatttcatacacaaaaggtaaatattaatgaaaatttattcaaataaactaatatatattatatagcaaatattaatcgatctctgaatgatacagtagggtacggcaacatatctacctataattttggtttgtaccaaaatttgctttcatttattaaggacaatataaatatttaggtgggtatgatgtattgctgagttcatatcaccttccagcattttatctacaaagaaaaccattcaaaatttgctgccagacatgcttgccgttcggtaggtgcactaataggaggaagatggtgctgtagacgcactgtagctagggtttactagtactgtagccgcatccgcactgtagctagggtttctgtaccagcagacattctcacatggtatcaaagccttgac

SEQ ID NO: 4584 - DNA, 5010 bp, Zea Mays
gccagcgtgagcaaccgagcaggcgcgggcagccgagcgaggcagcagctgctgcgctaatggcacggccgttctcgtcgctggtggactcctcgtatcgccgcaggatcatcgagtgcaaagcggcggcttactccttgcggctcccttcctgcgctaggccgcccgcacgcccccgtttcgctgccagctccgacaacactccagactatgacgcggtgggagaccctgaatcacatggcttacaaatttgggagccttggtaagtctgatggaaaactggccttgaagatactgagttctattgtggagcgttcaggtttagaccgaattacctacgtttactgtatggctgttccaattctcatccaggctcaaatgcattcacaagcaatgtcagtgttgaagcatcttgctgtgacgggcttctcctgcactgctatttttacctccctcttgcggaccatttcacgttttgatcccaccaaccatgtcgtttttgaactccttgtcaaagcatatgtcaaggaaagaaaagtgctagatgcagctgtggcagttctctttatggatgattgcggctttaaggcttcacctgtttcttgcaataccatcctcaatgctcttgttgaggaaggggaatcaaagcatgtttggttgttcttgagagagagtttggcccgtaagtttcctttgggtgttaccacttgcaatattcttctgaattccctatgcaccaatggagaatttagaaaggctgaagatatgcttcagaagatgaagagctgtcacatatctaattctgtcacatataatacaatcctacattggtatgttaagaagggaagatttaaggctgccctgtgtgttctagaagatatggagagggatagtgtacaggcagatgtatatacatacaacatcatgatagataaattatgtagaataaagaggagtacacgtgctttccttttgctcaaaagaatgaggaaagatgacttaacacctgatgaatgtacctacaatactttgattaatggtttttttcgtgaaggtaagataaatcatgctcgctatgtcttcaatcatatgctgagacaaaatttggttccaagtgtagctacttacactacaatgattgatgggtattgccgaaacaggagaattgataaggccctaagtattctatcggaaatgcaaattactggtgtcatgccaagtgaactaacttatagtgctttgttgaatggttactgcaaagtttccatgctgggacctgctatatatcttatggaagatctgaaatcaagaggtataaccatcaataagacgatgcgtactattctcattgatgggttctgtcaagtgggtgagatttccaaggctaaacaaattttgaagagtatgtttgaggatggaattgatccagatgtcatcacttattcagcattgatcaatggtatgtgcaggatggctaagatgcatgaaacaaaagaaattttgtcaaggatgcagaaaagtggaattttacctaatgatgtcctatatacaactctgatttgttactattgtaaggcagggtatgtcaaggaagcactaaagcattttgtggacatttatcgaagggggctagttgccaatccagttatccataatgcattattacatgctttctatagagagggaatgattacagaggctgaacacttcagacaatacatgtctaggatgaatatatcatttgattctgtctcctttaaccgcataattgatagttattgccacagaggtaacatagttggggcattttcagtttatgatgatatggttagatatggctattctccaaatgtttgcacatatcagaatttgcttagaggattatgtcaaggaggccacttggtacaagcaaggcaatttatgtcctgtcttcttgacataccttttgctattgatgagaaaactttcaatgcactacttcttgggatttgcagatatggaaccctagatgaagctttggatctatgcgagaaaatgataaaaaacaactgtttacctgatatccatacctacaccattcttctcagtggtttttgcaggaaaggtaagattttgcctgcgttagtcatcttgcagatgatgttggagaaaggagtagtccctgatactgttgcgtatacctgcttgctgaatgggttgatcaatgaaggccaagtgaaagctgcttcttacgttttccatgagatcatatgcaaggaaggcctgtatgcagattgtattgcctataattcgttgatgaatgggtacctcaagagtcgaaatgtgaataccataaaaaggatgatgtctgatatgtatcagaatgaggtttatccaaactctgctagctataacatacttatgcatgggtatgtcaagaggggacaattttcaaagtcattatatctgtacaaatatatggtgaggaaaggaatcaggccagacaatgttacatatcgtttgctcattcttgggctttctgagtgtgggttgattgacattgcagttaagtttttggagaagatggtcttagaaggcattttccctgatcggttagttttcgatatattgattacagctttcagtgagaaatccaagatgcataatgcactacaagttttcaattgtatgaagtggttacatatgtcacccagcagtaaaacttttagtgccatgataaatggattgatcagaaaaggttacttggaccatagtcacaaagttttacatgagatgttacaagtagggcttcaaccaaaccatacacactatattgcattggtcaatgcaaaatgtcgggttggtgagattgatagagcgtttaggctaaaagaagaaatgaaagctattggcattgtgcctgctgaagttgcggagagttcaattattcgaggactttgtagatgtggaaaacttgaggaggcagtcatagttttcagtagtatgatgcgttcaggaatggtgccaactgttgctaccttcactactctaatgcacagtctttgcaaagaatccaagattgctgatgctttgcacttgaagaggctgatggagttgtgtagattgagggttgatgttgtcagttataatgttttaattactggtttatgcaaagacaaacatatctctgacgcactagatctttatggagagatgaaatctaagggtctttggccgaatattactacctatatcacactcactggagctatgtattcaacagggagagtgcagaatggagaggaactactggaggatatagaagaaaggggacttattccggcatataagcagcctgaaaatcttgaaagacggatggaggatgcaattattaggctgaacatgataagaaactgcagaaaggaagtgccttttagaggggttgagctactacctctagaccctaaacccgtgtgtagtgctgctagtgattgtaaccccactgaaactcggcaacacaaaggaatttgagcatttgaccaatatggttggtacaaaactattggtatcttttctgagtagtgcttgtgatgccttacattgttgtgttcctccactgagggatccatggatccatctctagatatgttgaatatgtgattttccttaaaaagctaattcagaaatacaaaattacctagggaggaagaggaccctcacatatttcagtggatcctgggggcaggtaaaaagggattatgagtgctgatgcgtgatgttaggtatgatatgcataagttacagcaggcattcgaaggcatcaaaatgcgcaacattctactcaacatttttatgatcacttagtgcccttatgtcattaatgagttagtatctttttttttctcgaaaaaacgcaggaggactgcgttttagatatatattaagaagagagagacaaaggtctaagagaccaaaaaaacaacaacaacgcactccctatggaggccagtaacactcgtacatgaaaggatccataaaaacacccacacacactccttacaacaacctatgcagggggcagccaagaaggagagccctttggctccagcaatttcccagcctcttctttcctcatctgcatgctccataatcaaaggaaggctgggagaccctccataaaaaatgactctattacgatgcttccaaatcatccacgaccctaaaatgatgagggagtcaagaccttccctgaccagaccatttactgtctctgaaaccatctcccaccaatccataaaggaaactgcatctggctgtggggctaaactatgcagcccgaactttcttagtaggttgtaccagaaaatccttgagaagacacaattcacaagcaagtggttcagagtttccccttgctggtcacataaaggacatctgatagggtgattcaatccccttcttaccaagcgatcagctgtccaacatctattttgggccaccaaccaaatgaaaaaacaacattttggtggagcccaagatctccaaacccttttatagtgcccaaaggtggtagacccaaggaaaagacccatataagctgactttgcagagtatctaccattcgaatataagctgaaaatatgtctatcctcagtgttaggctgcagcacaaaatctgcgagaatattccagaggtgtagataatctacaatggcaccaactgtaagagcccctttgatgtctgcaatccatcgtctgttcaatagggcctgctgcacagttcttctgttaataattctttttggaataatgctgaataatcttggagcaatatcagatacccttttgccatggatccatttatctatccagaacatggtgttggtcccattccccacctcagagatcaacaccttggagaaggaatgggccgtgctaggaatttgaatggacaggctagaccatgggcgtcttgggtcagttttttgcaaccaaagccatcgcatgtggagggcccaacagagcttagga

SEQ ID NO: 4585 - DNA, 5060 bp, Zea Mays
gggcagccgagcgaggcagcagctgctgcgctaatggcacggccgttctcgtcgctggtggactcctcgtatcgccgcaggatcatcgagtgcaaagcggcggcttactccttgcggctcccttcctgcgctaggccgcccgcacgcccccgtttcgctgccagctccgacaacactccagcgcatggaattgatagtagcatcattaccattcagactatgacgcggtgggagaccctgaatcacatggcttacaaatttgggagccttggctcaaatgcattcacaagcaatgtcagtgttgaagcatcttgctgtgacgggcttctcctgcactgctatttttacctccctcttgcggaccatttcacgttttgatcccaccaaccatgtcgtttttgaactccttgtcaaagcatatgtcaaggaaagaaaagtgctagatgcagctgtggcagttctctttatggatgattgcggctttaaggcttcacctgtttcttgcaataccatcctcaatgctcttgttgaggaaggggaatcaaagcatgtttggttgttcttgagagagagtttggcccgtaagtttcctttgggtgttaccacttgcaatattcttctgaattccctatgcaccaatggagaatttagaaaggctgaagatatgcttcagaagatgaagagctgtcacatatctaattctgtcacatataatacaatcctacattggtatgttaagaagggaagatttaaggctgccctgtgtgttctagaagatatggagagggatagtgtacaggcagatgtatatacatacaacatcatgatagataaattatgtagaataaagaggagtacacgtgctttccttttgctcaaaagaatgaggaaagatgacttaacacctgatgaatgtacctacaatactttgattaatggtttttttcgtgaaggtaagataaatcatgctcgctatgtcttcaatcatatgctgagacaaaatttggttccaagtgtagctacttacactacaatgattgatgggtattgccgaaacaggagaattgataaggccctaagtattctatcggaaatgcaaattactggtgtcatgccaagtgaactaacttatagtgctttgttgaatggttactgcaaagtttccatgctgggacctgctatatatcttatggaagatctgaaatcaagaggtataaccatcaataagacgatgcgtactattctcattgatgggttctgtcaagtgggtgagatttccaaggctaaacaaattttgaagagtatgtttgaggatggaattgatccagatgtcatcacttattcagcattgatcaatggtatgtgcaggatggctaagatgcatgaaacaaaagaaattttgtcaaggatgcagaaaagtggaattttacctaatgatgtcctatatacaactctgatttgttactattgtaaggcagggtatgtcaaggaagcactaaagcattttgtggacatttatcgaagggggctagttgccaatccagttatccataatgcattattacatgctttctatagagagggaatgattacagaggctgaacacttcagacaatacatgtctaggatgaatatatcatttgattctgtctcctttaaccgcataattgatagttattgccacagaggtaacatagttggggcattttcagtttatgatgatatggttagatatggctattctccaaatgtttgcacatatcagaatttgcttagaggattatgtcaaggaggccacttggtacaagcaaggcaatttatgtcctgtcttcttgacataccttttgctattgatgagaaaactttcaatgcactacttcttgggatttgcagatatggaaccctagatgaagctttggatctatgcgagaaaatgataaaaaacaactgtttacctgatatccatacctacaccattcttctcagtggtttttgcaggaaaggtaagattttgcctgcgttagtcatcttgcagatgatgttggagaaaggagtagtccctgatactgttgcgtatacctgcttgctgaatgggttgatcaatgaaggccaagtgaaagctgcttcttacgttttccatgagatcatatgcaaggaaggcctgtatgcagattgtattgcctataattcgttgatgaatgggtacctcaagagtcgaaatgtgaataccataaaaaggatgatgtctgatatgtatcagaatgaggtttatccaaactctgctagctataacatacttatgcatgggtatgtcaagaggggacaattttcaaagtcattatatctgtacaaatatatggtgaggaaaggaatcaggccagacaatgttacatatcgtttgctcattcttgggctttctgagtgtgggttgattgacattgcagttaagtttttggagaagatggtcttagaaggcattttccctgatcggttagttttcgatatattgattacagctttcagtgagaaatccaagatgcataatgcactacaagttttcaattgtatgaagtggttacatatgtcacccagcagtaaaacttttagtgccatgataaatggattgatcagaaaaggttacttggaccatagtcacaaagttttacatgagatgttacaagtagggcttcaaccaaaccatacacactatattgcattggtcaatgcaaaatgtcgggttggtgagattgatagagcgtttaggctaaaagaagaaatgaaagctattggcattgtgcctgctgaagttgcggagagttcaattattcgaggactttgtagatgtggaaaacttgaggaggcagtcatagttttcagtagtatgatgcgttcaggaatggtgccaactgttgctaccttcactactctaatgcacagtctttgcaaagaatccaagattgctgatgctttgcacttgaagaggctgatggagttgtgtagattgagggttgatgttgtcagttataatgttttaattactggtttatgcaaagacaaacatatctctgacgcactagatctttatggagagatgaaatctaagggtctttggccgaatattactacctatatcacactcactggagctatgtattcaacagggagagtgcagaatggagaggaactactggaggatatagaagaaaggggacttattccggcatataagcagcctgaaaatcttgaaagacggatggaggatgcaattattaggctgaacatgataagaaactgcagaaaggaagtgccttttagaggggttgagctactacctctagaccctaaacccgtgtgtagtgctgctagtgattgtaaccccactgaaactcggcaacacaaaggaatttgagcatttgaccaatatggttggtacaaaactattggtatcttttctgagtagtgcttgtgatgccttacattgttgtgttcctccactgagggatccatggatccatctctagatatgttgaatatgtgattttccttaaaaagctaattcagaaatacaaaattacctagggaggaagaggaccctcacatatttcagtggatcctgggggcaggtaaaaagggattatgagtgctgatgcgtgatgttaggtatgatatgcataagttacagcaggcattcgaaggacaatgttgatttgaagtatcatgttagcatcaagaattctctgcgatacgcgattcaagagatgaggagacaatcaacactgctacatacaattaattctatctgttctagtatcccagaagttgaggggggcaagatagggaaggttgttggccacctggaccatgtctgcaagatgctagagaagacttctattgtttgcgaacaagatttggataataagtgtcctagttgggacctatttgaccccccttcggatgttgaagatcaccctgatgttgatgaactacttgaaggatacaactcagaagatccggagctgtgggaaatggcgtttgaggaccggaagtgggaggagaataaagtggcagtctccttggctgagcattgtcgtattatgggttacaattacgaagagatttatgatcgtactgtttgagtcgacaaggggcagcataggaacaaagcaacggctggcattgagtctggcagtggaggcaacaaaggatactggtatcagtgcttgcagctacatcttcagacaactgatgttcttgaagacgaagatttatatgcaaacctgggtgcctccacaaaagtctaaacccttatacatcttgttatatttcctctccaaatgatgctgtggtgttcagacctcacaaaggctgcaggcttggcgtagagatggatttctaagaaaagaaaaaaaatggtgcttcctgcttacaatttattagttatcaaccacaaacactgtgagcttttgcagacagaaattgccttatttatatttacagaaacagatcacactggttgcaacctgcactgcatgatgaaaatgatgtctacgagagaaggggggaaacagaagaagaatctgaagatttagtgaaaccaaaacagaaaggtacataaggtctgatagagattgagaatccaaacctggtgaaattaaagaatataaaggtcaaggacattgatgtggtaatgtattgtggaatcctgttttacaacttcaaccattgattccagtgaagctaatgccatggaatggaattctcaccacgtttgctggctgtacgagtacacaaatctgatgaatggattcagctaaaatgtcatagaatggacccggaatttatgctctttttttgtgctctctcagcatgtgctagctggttaagtactagcattgctattgggcgctattttgtatgcttgttctgctgtcttttggatgtaaacgaacaagtttgcatgcttgttctgctattggataagaagtattagcattgctatttgcatgcttgttctgctggttaagaagttaagaagtattagcatgtgacttgtggagatg

SEQ ID NO: 4586 - DNA, 2958 bp, Zea Mays
atggcacggccgttctcgtcgctggtggactcctcgtatcgccgcaggatcatcgagtgcaaagcggcggcttactccttgcggctcccttcctgcgctaggccgcccgcacgcccccgtttcgctgccagctccgacaacactccagcgcatggaattgatagtagcatcattaccattcagactatgacgcggtgggagaccctgaatcacatggcttacaaatttgggagccttggtaagtctgatggaaaactggccttgaagatactgagttctattgtggagcgttcaggtttagaccgaattacctacgtttactgtatggctgttccaattctcatccaggctcaaatgcattcacaagcaatgtcagtgttgaagcatcttgctgtgacgggcttctcctgcactgctatttttacctccctcttgcggaccatttcacgttttgatcccaccaaccatgtcgtttttgaactccttgtcaaagcatatgtcaaggaaagaaaagtgctagatgcagctgtggcagttctctttatggatgattgcggctttaaggcttcacctgtttcttgcaataccatcctcaatgctcttgttgaggaaggggaatcaaagcatgtttggttgttcttgagagagagtttggcccgtaagtttcctttgggtgttaccacttgcaatattcttctgaattccctatgcaccaatggagaatttagaaaggctgaagatatgcttcagaagatgaagagctgtcacatatctaattctgtcacatataatacaatcctacattggtatgttaagaagggaagatttaaggctgccctgtgtgttctagaagatatggagagggatagtgtacaggcagatgtatatacatacaacatcatgatagataaattatgtagaataaagaggagtacacgtgctttccttttgctcaaaagaatgaggaaagatgacttaacacctgatgaatgtacctacaatactttgattaatggtttttttcgtgaaggtaagataaatcatgctcgctatgtcttcaatcatatgctgagacaaaatttggttccaagtgtagctacttacactacaatgattgatgggtattgccgaaacaggagaattgataaggccctaagtattctatcggaaatgcaaattactggtgtcatgccaagtgaactaacttatagtgctttgttgaatggttactgcaaagtttccatgctgggacctgctatatatcttatggaagatctgaaatcaagaggtataaccatcaataagacgatgcgtactattctcattgatgggttctgtcaagtgggtgagatttccaaggctaaacaaattttgaagagtatgtttgaggatggaattgatccagatgtcatcacttattcagcattgatcaatggtatgtgcaggatggctaagatgcatgaaacaaaagaaattttgtcaaggatgcagaaaagtggaattttacctaatgatgtcctatatacaactctgatttgttactattgtaaggcagggtatgtcaaggaagcactaaagcattttgtggacatttatcgaagggggctagttgccaatccagttatccataatgcattattacatgctttctatagagagggaatgattacagaggctgaacacttcagacaatacatgtctaggatgaatatatcatttgattctgtctcctttaaccgcataattgatagttattgccacagaggtaacatagttggggcattttcagtttatgatgatatggttagatatggctattctccaaatgtttgcacatatcagaatttgcttagaggattatgtcaaggaggccacttggtacaagcaaggcaatttatgtcctgtcttcttgacataccttttgctattgatgagaaaactttcaatgcactacttcttgggatttgcagatatggaaccctagatgaagctttggatctatgcgagaaaatgataaaaaacaactgtttacctgatatccatacctacaccattcttctcagtggtttttgcaggaaaggtaagattttgcctgcgttagtcatcttgcagatgatgttggagaaaggagtagtccctgatactgttgcgtatacctgcttgctgaatgggttgatcaatgaaggccaagtgaaagctgcttcttacgttttccatgagatcatatgcaaggaaggcctgtatgcagattgtattgcctataattcgttgatgaatgggtacctcaagagtcgaaatgtgaataccataaaaaggatgatgtctgatatgtatcagaatgaggtttatccaaactctgctagctataacatacttatgcatgggtatgtcaagaggggacaattttcaaagtcattatatctgtacaaatatatggtgaggaaaggaatcaggccagacaatgttacatatcgtttgctcattcttgggctttctgagtgtgggttgattgacattgcagttaagtttttggagaagatggtcttagaaggcattttccctgatcgggagagtgcagaatggagaggaactactggaggatatagaagaaaggggacttattccggcatataagcagcctgaaaatcttgaaagacggatggaggatgcaattattaggctgaacatgataagaaactgcagaaaggaagtgccttttagaggggttgagctactacctctagaccctaaacccgtgtgtagtgctgctagtgattgtaaccccactgaaactcggcaacacaaaggaatttgagcatttgaccaatatggttggtacaaaactattggtatcttttctgagtagtgcttgtgatgccttacattgttgtgttcctccactgagggatccatggatccatctctagatatgttgaatatgtgattttccttaaaaag

SEQ ID NO: 4587 - DNA, 1285 bp, Zea Mays
atggcacggccgttctcgtcgctggtggactcctcgtatcgccgcaggatcatcgagtgcaaagcggcggcttactccttgcggctcccttcctgcgctaggccgcccgcacgcccccgtttcgctgccagctccgacaacactccagaaatacaaaattacctagggaggaagaggaccctcacatatttcagtggatcctgggggcaggtaaaaagggattatgagtgctgatgcgtgatgttaggtatgatatgcataagttacagcaggcattcgaagcataggaacaaagcaacggctggcattgagtctggcagtggaggcaacaaaggatactggtatcagtgcttgcagctacatcttcagacaactgatgttcttgaagacgaagatttatatgcaaacctgggtgcctccacaaaagtctaaacccttatacatcttgttatatttcctctccaaatgaggtagtagaatgttagaggtttgattcaactgtcaactgctgtgtccctaaagcatgattaccctgttggaaatccatttggcgacggcgacgatgctgtggtgttcagacctcacaaaggctgcaggcttggcgtagagatggatttctaagaaaagaaaaaaaatggtgcttcctgcttacaatttattagttatcaaccacaaacactgtgagcttttgcagacagaaattgccttatttatatttacagaaacagatcacactggttgcaacctgcactgcatgatgaaaatgatgtctacgagagaaggggggaaacagaagaagaatctgaagatttagtgaaaccaaaacagaaaggtacataaggtctgatagagattgagaatccaaacctggtgaaattaaagaatataaaggtcaaggacattgatgtggtaatgtattgtggaatcctgttttacaacttcaaccattgattccagtgaagctaatgccatggaatggaattctcaccacgtttgctggctgtacgagtacacaaatctgatgaatggattcagctaaaatgtcatagaatggacccggaatttatgctctttttttgtgctctctcagcatgtgctagctggttaagtactagcattgctattgggcgctattttgtatgcttgttctgctgtcttttggatgtaaacgaacaagtttgcatgcttgttctgctattggataagaagtattagcattgctatttgcatgcttgttctgctggttaagaagttaagaagtattagcatgtgacttgtggagatg

SEQ ID NO: 4588 - DNA, 1972 bp, Zea Mays
ctttgagtgtgctgcttgagttggcaatacagaggaatgaggagataccggccttggtctatgaggccaggccggtggatccccgccatggccgaaattggcgttgtggatggggaagggatgcaagatttggatgccagttgcacggttgaggtgattggggagttctctcttccagcaggagaaaccctagccgccgcctcttcaatggaccgggttcctccggttgaagctgtagccgacgcgtacaacgccgcacgagcagctgccgttgctgcagtagaagcgcattcggcggccatcattgcggaggaggcaatcgctgctgtgaagtatgctgcaattgctcgcgaaaagtttgaaggagctgttgattcagtgaagaactcaacctttgtctatgctaatgccactgttgaggctttggtaatatttctgcacactgtttattttctagagatcgaccccgtttatgctgccgggtcacccgaaacaagatcgaccccgtaatgcctggtcacccgaatcaaaacttgtttattgtctagaaggcaccgtgttgtttgtattccattgtagctggtacttgtttcttggttgtttacaggacaatgttgatttgaagtatcatgttagcatcaagaattctctgcgatacgcgattcaagagatgaggagacaatcaacactgctacatacaattaattctatctgttctagtatcccagaagttgaggggggcaagatagggaaggttgttggccacctggaccatgtctgcaagatgctagagaagacttctattgtttgcgaacaagatttggataataagtgtcctagttgggacctatttgaccccccttcggatgttgaagatcaccctgatgttgatgaactacttgaaggatacaactcagaagatccggagctgtgggaaatggcgtttgaggaccggaagtgggaggagaataaagtggcagtctccttggctgagcattgtcgtattatgggttacaattacgaagagatttatgatcgtactgtttgagtcgacaaggggcagcataggaacaaagcaacggctggcattgagtctggcagtggaggcaacaaaggatactggtatcagtgcttgcagctacatcttcagacaactgatgttcttgaagacgaagatttatatgcaaacctgggtgcctccacaaaagtctaaacccttatacatcttgttatatttcctctccaaatgatgctgtggtgttcagacctcacaaaggctgcaggcttggcgtagagatggatttctaagaaaagaaaaaaaatggtgcttcctgcttacaatttattagttatcaaccacaaacactgtgagcttttgcagacagaaattgccttatttatatttacagaaacagatcacactggttgcaacctgcactgcatgatgaaaatgatgtctacgagagaaggggggaaacagaagaagaatctgaagatttagtgaaaccaaaacagaaaggtacataaggtctgatagagattgagaatccaaacctggtgaaattaaagaatataaaggtcaaggacattgatgtggtaatgtattgtggaatcctgttttacaacttcaaccattgattccagtgaagctaatgccatggaatggaattctcaccacgtttgctggctgtacgagtacacaaatctgatgaatggattcagctaaaatgtcatagaatggacccggaatttatgctctttttttgtgctctctcagcatgtgctagctggttaagtactagcattgctattgggcgctattttgtatgcttgttctgctgtcttttggatgtaaacgaacaagtttgcatgcttgttctgctattggataagaagtattagcattgctatttgcatgcttgttctgctggttaagaagttaagaagtattagcatgtgacttgtggagatg

SEQ ID NO: 4589 - DNA, 2170 bp, Zea Mays
ccgccatggccgaaattggcgttgtggatggggaagggatgcaagatttggatgccagttgcacggttgaggtgattggggaggtatcggagaggaaccttcaacccaactctagaaactgttttttccctcgaatgcgcaagagaggagatttttgccattataaaacacggcacgttcagcttcatcgaaacggaggcgttggggagggattcgacgatatggaaaaacacaggacgcgcagccgacgaaatagactcaaaatctcttttatgcgtagcgacgggccattaagctcctgcatctgacgccgtgaccttgctgtgacttgcctccatcctttctcttctctcttccaccgagttctctcttccagcaggagaaaccctagccgccgcctcttcaatggaccgggttcctccggttgaagctgtagccgacgcgtacaacgccgcacgagcagctgccgttgctgcagtagaagcgcattcggcggccatcattgcggaggaggcaatcgctgctgtgaagtatgctgcaattgctcgcgaaaagtttgaaggagctgttgattcagtgaagaactcaacctttgtctatgctaatgccactgttgaggctttggtaatatttctgcacactgtttattttctagagatcgaccccgtttatgctgccgggtcacccgaaacaagatcgaccccgtaatgcctggtcacccgaatcaaaacttgtttattgtctagaaggcaccgtgttgtttgtattccattgtagctggtacttgtttcttggttgtttacaggacaatgttgatttgaagtatcatgttagcatcaagaattctctgcgatacgcgattcaagagatgaggagacaatcaacactgctacatacaattaattctatctgttctagtatcccagaagttgaggggggcaagatagggaaggttgttggccacctggaccatgtctgcaagatgctagagaagacttctattgtttgcgaacaagatttggataataagtgtcctagttgggacctatttgaccccccttcggatgttgaagatcaccctgatgttgatgaactacttgaaggatacaactcagaagatccggagctgtgggaaatggcgtttgaggaccggaagtgggaggagaataaagtggcagtctccttggctgagcattgtcgtattatgggttacaattacgaagagatttatgatcgtactgtttgagtcgacaaggggcagcataggaacaaagcaacggctggcattgagtctggcagtggaggcaacaaaggatactggtatcagtgcttgcagctacatcttcagacaactgatgttcttgaagacgaagatttatatgcaaacctgggtgcctccacaaaagtctaaacccttatacatcttgttatatttcctctccaaatgatgctgtggtgttcagacctcacaaaggctgcaggcttggcgtagagatggatttctaagaaaagaaaaaaaatggtgcttcctgcttacaatttattagttatcaaccacaaacactgtgagcttttgcagacagaaattgccttatttatatttacagaaacagatcacactggttgcaacctgcactgcatgatgaaaatgatgtctacgagagaaggggggaaacagaagaagaatctgaagatttagtgaaaccaaaacagaaaggtacataaggtctgatagagattgagaatccaaacctggtgaaattaaagaatataaaggtcaaggacattgatgtggtaatgtattgtggaatcctgttttacaacttcaaccattgattccagtgaagctaatgccatggaatggaattctcaccacgtttgctggctgtacgagtacacaaatctgatgaatggattcagctaaaatgtcatagaatggacccggaatttatgctctttttttgtgctctctcagcatgtgctagctggttaagtactagcattgctattgggcgctattttgtatgcttgttctgctgtcttttggatgtaaacgaacaagtttgcatgcttgttctgctattggataagaagtattagcattgctatttgcatgcttgttctgctggttaagaagttaagaagtattagcatgtgacttgtggagatg

SEQ ID NO: 4590 - DNA, 1880 bp, Zea Mays
atggccgaaattggcgttgtggatggggaagggatgcaagatttggatgccagttgcacggttgaggtgattggggagttctctcttccagcaggagaaaccctagccgccgcctcttcaatggaccgggttcctccggttgaagctgtagccgacgcgtacaacgccgcacgagcagctgccgttgctgcagtagaagcgcattcggcggccatcattgcggaggaggcaatcgctgctgtgaagtatgctgcaattgctcgcgaaaagtttgaaggagctgttgattcagtgaagaactcaacctttgtctatgctaatgccactgttgaggctttggtaatatttctgcacactgtttattttctagagatcgaccccgtttatgctgccgggtcacccgaaacaagatcgaccccgtaatgcctggtcacccgaatcaaaacttgtttattgtctagaaggcaccgtgttgtttgtattccattgtagctggtacttgtttcttggttgtttacaggacaatgttgatttgaagtatcatgttagcatcaagaattctctgcgatacgcgattcaagagatgaggagacaatcaacactgctacatacaattaattctatctgttctagtatcccagaagttgaggggggcaagatagggaaggttgttggccacctggaccatgtctgcaagatgctagagaagacttctattgtttgcgaacaagatttggataataagtgtcctagttgggacctatttgaccccccttcggatgttgaagatcaccctgatgttgatgaactacttgaaggatacaactcagaagatccggagctgtgggaaatggcgtttgaggaccggaagtgggaggagaataaagtggcagtctccttggctgagcattgtcgtattatgggttacaattacgaagagatttatgatcgtactgtttgagtcgacaaggggcaggaacaaagcaacggctggcattgagtctggcagtggaggcaacaaaggatactggtatcagtgcttgcagctacatcttcagacaactgatgttcttgaagacgaagatttatatgcaaacctgggtgcctccacaaaagtctaaacccttatacatcttgttatatttcctctccaaatgatgctgtggtgttcagacctcacaaaggctgcaggcttggcgtagagatggatttctaagaaaagaaaaaaaatggtgcttcctgcttacaatttattagttatcaaccacaaacactgtgagcttttgcagacagaaattgccttatttatatttacagaaacagatcacactggttgcaacctgcactgcatgatgaaaatgatgtctacgagagaaggggggaaacagaagaagaatctgaagatttagtgaaaccaaaacagaaaggtacataaggtctgatagagattgagaatccaaacctggtgaaattaaagaatataaaggtcaaggacattgatgtggtaatgtattgtggaatcctgttttacaacttcaaccattgattccagtgaagctaatgccatggaatggaattctcaccacgtttgctggctgtacgagtacacaaatctgatgaatggattcagctaaaatgtcatagaatggacccggaatttatgctctttttttgtgctctctcagcatgtgctagctggttaagtactagcattgctattgggcgctattttgtatgcttgttctgctgtcttttggatgtaaacgaacaagtttgcatgcttgttctgctattggataagaagtattagcattgctatttgcatgcttgttctgctggttaagaagttaagaagtattagcatgtgacttgtggagatg

SEQ ID NO: 4591 - DNA, 2160 bp, Zea Mays
atggccgaaattggcgttgtggatggggaagggatgcaagatttggatgccagttgcacggttgaggtgattggggaggtatcggagaggaaccttcaacccaactctagaaactgttttttccctcgaatgcgcaagagaggagatttttgccattataaaacacggcacgttcagcttcatcgaaacggaggcgttggggagggattcgacgatatggaaaaacacaggacgcgcagccgacgaaatagactcaaaatctcttttatgcgtagcgacgggccattaagctcctgcatctgacgccgtgaccttgctgtgacttgcctccatcctttctcttctctcttccaccgagttctctcttccagcaggagaaaccctagccgccgcctcttcaatggaccgggttcctccggttgaagctgtagccgacgcgtacaacgccgcacgagcagctgccgttgctgcagtagaagcgcattcggcggccatcattgcggaggaggcaatcgctgctgtgaagtatgctgcaattgctcgcgaaaagtttgaaggagctgttgattcagtgaagaactcaacctttgtctatgctaatgccactgttgaggctttggtaatatttctgcacactgtttattttctagagatcgaccccgtttatgctgccgggtcacccgaaacaagatcgaccccgtaatgcctggtcacccgaatcaaaacttgtttattgtctagaaggcaccgtgttgtttgtattccattgtagctggtacttgtttcttggttgtttacaggacaatgttgatttgaagtatcatgttagcatcaagaattctctgcgatacgcgattcaagagatgaggagacaatcaacactgctacatacaattaattctatctgttctagtatcccagaagttgaggggggcaagatagggaaggttgttggccacctggaccatgtctgcaagatgctagagaagacttctattgtttgcgaacaagatttggataataagtgtcctagttgggacctatttgaccccccttcggatgttgaagatcaccctgatgttgatgaactacttgaaggatacaactcagaagatccggagctgtgggaaatggcgtttgaggaccggaagtgggaggagaataaagtggcagtctccttggctgagcattgtcgtattatgggttacaattacgaagagatttatgatcgtactgtttgagtcgacaaggggcaggaacaaagcaacggctggcattgagtctggcagtggaggcaacaaaggatactggtatcagtgcttgcagctacatcttcagacaactgatgttcttgaagacgaagatttatatgcaaacctgggtgcctccacaaaagtctaaacccttatacatcttgttatatttcctctccaaatgatgctgtggtgttcagacctcacaaaggctgcaggcttggcgtagagatggatttctaagaaaagaaaaaaaatggtgcttcctgcttacaatttattagttatcaaccacaaacactgtgagcttttgcagacagaaattgccttatttatatttacagaaacagatcacactggttgcaacctgcactgcatgatgaaaatgatgtctacgagagaaggggggaaacagaagaagaatctgaagatttagtgaaaccaaaacagaaaggtacataaggtctgatagagattgagaatccaaacctggtgaaattaaagaatataaaggtcaaggacattgatgtggtaatgtattgtggaatcctgttttacaacttcaaccattgattccagtgaagctaatgccatggaatggaattctcaccacgtttgctggctgtacgagtacacaaatctgatgaatggattcagctaaaatgtcatagaatggacccggaatttatgctctttttttgtgctctctcagcatgtgctagctggttaagtactagcattgctattgggcgctattttgtatgcttgttctgctgtcttttggatgtaaacgaacaagtttgcatgcttgttctgctattggataagaagtattagcattgctatttgcatgcttgttctgctggttaagaagttaagaagtattagcatgtgacttgtggagatg

SEQ ID NO: 4592 - DNA, 2325 bp, Zea Mays
atggccgaaattggcgttgtggatggggaagggatgcaagatttggatgccagttgcacggttgaggtgattggggaggtatcggagaggaaccttcaacccaactctagaaactgttttttccctcgaatgcgcaagagaggagatttttgccattataaaacacggcacgttcagcttcatcgaaacggaggcgttggggagggattcgacgatatggaaaaacacaggacgcgcagccgacgaaatagactcaaaatctcttttatgcgtagcgacgggccattaagctcctgcatctgacgccgtgaccttgctgtgacttgcctccatcctttctcttctctcttccaccgagttctctcttccagcaggagaaaccctagccgccgcctcttcaatggaccgggttcctccggttgaagctgtagccgacgcgtacaacgccgcacgagcagctgccgttgctgcagtagaagcgcattcggcggccatcattgcggaggaggcaatcgctgctgtgaagtatgctgcaattgctcgcgaaaagtttgaaggagctgttgattcagtgaagaactcaacctttgtctatgctaatgccactgttgaggctttggtaatatttctgcacactgtttattttctagagatcgaccccgtttatgctgccgggtcacccgaaacaagatcgaccccgtaatgcctggtcacccgaatcaaaacttgtttattgtctagaaggcaccgtgttgtttgtattccattgtagctggtacttgtttcttggttgtttacaggacaatgttgatttgaagtatcatgttagcatcaagaattctctgcgatacgcgattcaagagatgaggagacaatcaacactgctacatacaattaattctatctgttctagtatcccagaagttgaggggggcaagatagggaaggttgttggccacctggaccatgtctgcaagatgctagagaagacttctattgtttgcgaacaagatttggataataagtgtcctagttgggacctatttgaccccccttcggatgttgaagatcaccctgatgttgatgaactacttgaaggatacaactcagaagatccggagctgtgggaaatggcgtttgaggaccggaagtgggaggagaataaagtggcagtctccttggctgagcattgtcgtattatgggttacaattacgaagagatttatgatcgtactgtttgagtcgacaaggggcagcataggaacaaagcaacggctggcattgagtctggcagtggaggcaacaaaggatactggtatcagtgcttgcagctacatcttcagacaactgatgttcttgaagacgaagatttatatgcaaacctgggtgcctccacaaaagtctaaacccttatacatcttgttatatttcctctccaaatgtagaatgttagaggtttgattcaactgtcaactgctgtgtccctaaagcatgattaccctgttggaaatccatttggcgacggcgacggtatcagctcacagtatttgataaataagttcacagtatttggttcaactgttaacatttatcttgctgcagatgctgtggtgttcagacctcacaaaggctgcaggcttggcgtagagatggatttctaagaaaagaaaaaaaatggtgcttcctgcttacaatttattagttatcaaccacaaacactgtgagcttttgcagacagaaattgccttatttatatttacagaaacagatcacactggttgcaacctgcactgcatgatgaaaatgatgtctacgagagaaggggggaaacagaagaagaatctgaagatttagtgaaaccaaaacagaaaggtacataaggtctgatagagattgagaatccaaacctggtgaaattaaagaatataaaggtcaaggacattgatgtggtaatgtattgtggaatcctgttttacaacttcaaccattgattccagtgaagctaatgccatggaatggaattctcaccacgtttgctggctgtacgagtacacaaatctgatgaatggattcagctaaaatgtcatagaatggacccggaatttatgctctttttttgtgctctctcagcatgtgctagctggttaagtactagcattgctattgggcgctattttgtatgcttgttctgctgtcttttggatgtaaacgaacaagtttgcatgcttgttctgctattggataagaagtattagcattgctatttgcatgcttgttctgctggttaagaagttaagaagtattagcatgtgacttgtggagatg

SEQ ID NO: 4593 - DNA, 2326 bp, Zea Mays
atggccgaaattggcgttgtggatggggaagggatgcaagatttggatgccagttgcacggttgaggtgattggggaggtatcggagaggaaccttcaacccaactctagaaactgttttttccctcgaatgcgcaagagaggagatttttgccattataaaacacggcacgttcagcttcatcgaaacggaggcgttggggagggattcgacgatatggaaaaacacaggacgcgcagccgacgaaatagactcaaaatctcttttatgcgtagcgacgggccattaagctcctgcatctgacgccgtgaccttgctgtgacttgcctccatcctttctcttctctcttccaccgagttctctcttccagcaggagaaaccctagccgccgcctcttcaatggaccgggttcctccggttgaagctgtagccgacgcgtacaacgccgcacgagcagctgccgttgctgcagtagaagcgcattcggcggccatcattgcggaggaggcaatcgctgctgtgaagtatgctgcaattgctcgcgaaaagtttgaaggagctgttgattcagtgaagaactcaacctttgtctatgctaatgccactgttgaggctttggtaatatttctgcacactgtttattttctagagatcgaccccgtttatgctgccgggtcacccgaaacaagatcgaccccgtaatgcctggtcacccgaatcaaaacttgtttattgtctagaaggcaccgtgttgtttgtattccattgtagctggtacttgtttcttggttgtttacaggacaatgttgatttgaagtatcatgttagcatcaagaattctctgcgatacgcgattcaagagatgaggagacaatcaacactgctacatacaattaattctatctgttctagtatcccagaagttgaggggggcaagatagggaaggttgttggccacctggaccatgtctgcaagatgctagagaagacttctattgtttgcgaacaagatttggataataagtgtcctagttgggacctatttgaccccccttcggatgttgaagatcaccctgatgttgatgaactacttgaaggatacaactcagaagatccggagctgtgggaaatggcgtttgaggaccggaagtgggaggagaataaagtggcagtctccttggctgagcattgtcgtattatgggttacaattacgaagagatttatgatcgtactgtttgagtcgacaaggggcaggaacaaagcaacggctggcattgagtctggcagtggaggcaacaaaggatactggtatcagtgcttgcagctacatcttcagacaactgatgttcttgaagacgaagatttatatgcaaacctgggtgcctccacaaaagtctaaacccttatacatcttgttatatttcctctccaaatgaggtagtagaatgttagaggtttgattcaactgtcaactgctgtgtccctaaagcatgattaccctgttggaaatccatttggcgacggcgacggtatcagctcacagtatttgataaataagttcacagtatttggttcaactgttaacatttatcttgctgcagatgctgtggtgttcagacctcacaaaggctgcaggcttggcgtagagatggatttctaagaaaagaaaaaaaatggtgcttcctgcttacaatttattagttatcaaccacaaacactgtgagcttttgcagacagaaattgccttatttatatttacagaaacagatcacactggttgcaacctgcactgcatgatgaaaatgatgtctacgagagaaggggggaaacagaagaagaatctgaagatttagtgaaaccaaaacagaaaggtacataaggtctgatagagattgagaatccaaacctggtgaaattaaagaatataaaggtcaaggacattgatgtggtaatgtattgtggaatcctgttttacaacttcaaccattgattccagtgaagctaatgccatggaatggaattctcaccacgtttgctggctgtacgagtacacaaatctgatgaatggattcagctaaaatgtcatagaatggacccggaatttatgctctttttttgtgctctctcagcatgtgctagctggttaagtactagcattgctattgggcgctattttgtatgcttgttctgctgtcttttggatgtaaacgaacaagtttgcatgcttgttctgctattggataagaagtattagcattgctatttgcatgcttgttctgctggttaagaagttaagaagtattagcatgtgacttgtggagatg

SEQ ID NO: 4594 - DNA, 1123 bp, Zea Mays
ttggggtgtgtgtgatgtaatggggttctctccccctttcttattcttctattaattcaaagatgcgcagctctcctgcgtattccagaaaaaagaactgctttggtagtccagttcaatatggggtgcctaactttctgattcctatatgcattctgctactgattccttcatggccttacatagcatcctgcatccctttctctatttgaagcataggaacaaagcaacggctggcattgagtctggcagtggaggcaacaaaggatactggtatcagtgcttgcagctacatcttcagacaactgatgttcttgaagacgaagatttatatgcaaacctgggtgcctccacaaaagtctaaacccttatacatcttgttatatttcctctccaaatgatgctgtggtgttcagacctcacaaaggctgcaggcttggcgtagagatggatttctaagaaaagaaaaaaaatggtgcttcctgcttacaatttattagttatcaaccacaaacactgtgagcttttgcagacagaaattgccttatttatatttacagaaacagatcacactggttgcaacctgcactgcatgatgaaaatgatgtctacgagagaaggggggaaacagaagaagaatctgaagatttagtgaaaccaaaacagaaaggtacataaggtctgatagagattgagaatccaaacctggtgaaattaaagaatataaaggtcaaggacattgatgtggtaatgtattgtggaatcctgttttacaacttcaaccattgattccagtgaagctaatgccatggaatggaattctcaccacgtttgctggctgtacgagtacacaaatctgatgaatggattcagctaaaatgtcatagaatggacccggaatttatgctctttttttgtgctctctcagcatgtgctagctggttaagtactagcattgctattgggcgctattttgtatgcttgttctgctgtcttttggatgtaaacgaacaagtttgcatgcttgttctgctattggataagaagtattagcattgctatttgcatgcttgttctgctggttaagaagttaagaagtattagcatgtgacttgtggagatg

SEQ ID NO: 4595 - DNA, 1860 bp, Zea Mays
gcaaccaaagcacacccctcctccttgctctgcggtgctcggagttggggagttggagcaccaccaccaccactcttcccctctcctcgctcgtcctgttggaagcagcacacgcacgagagagaaagagagacacaagagatggcgctgctgttgctcctgctggccgtgctcggcgtggtgctggcgagcagcctgctgctgcggtggaacgagctgcggtacagccgccgccggggcctgccgccgggcacaatggggtggccgctcttcggcgagaccaccgagttcctcaagcaggggcctagcttcatgaagcagaggaggctcagatggctttgctctcggctctcaggcagatcgctggcatctctgcgggcccactctccgacgccctaaaggcagagctgtacacccttgtacttggcaccttctccctgccaatcaacgtcccaggaaccaactacagcaaagggctccaggcaaggaagaagctcgtggcaatgctgcggcagatgatcgctgaccggaggtcctctggctgcgcccgagacgacatgctggacgcgctgctcagcggcaacgagggtaccagggcgaagctcagcgacgaccagatcatcgaccttctcatcaccctcatatactctgggtacgagactgtgtcgaccacctcgatgatggcggtgaagtacctgtcggacaaccccaaagctctcggacagatcaggaaagagcaccttgacatcaggaaggctaagtcaccggaggatccccttgactggaacgactacaagtccatgaccttcaccaaagctgtcatttatgagactctaaggctagctacagtagtcaacgggctgctgaggaaaactacccatgacgtagaaatgaatgggtatgttattccaaaaggctggagaatttatgtctacacaagggagataaactacgacccgttcctgtacccggaacccatggttttcaacccatggagatggatggagacgaacctggaatcacatccgcacttcatgctgttcggaggaggtgcccgcatgtgcccagggaaggaggtaggaacagttgaaatcgcaacgttccttcactatttcgtgacgcgttacagatgggaggaggagggaaacaacacaatatcgaagttccccagagtggcggctcccaatgggctacatatccgagttcaagattactgaacttcgtgaggcgttttgtgaagtttaggtagggattcagacagatagaaataacccatgcgatgctgatgctgctggcctcttcgaaaggactagaacagccattagtgcctgtaaaatgtgtccatgccgatagtaatgttattatagggaggatataggtatcataggtttattagaaatttgatgtagaaagccaacagatgctcctgtattcttttgctccatcaaaacagtggtatcatttggcttctatgcttttgaatcgaacatggtacagaacccaactatccatatgcaaacttccagcttcatgagcccattcaataaaaaaatgtcaataaccaactgatctaaaaaaaatatggatggacactggccgcaaaacgttgagcacatactaaagatatgctaaactggtatctgctattgctaatagaggaacagttttaccttattcaggatatataagataaacgcttcagtgttagaggcttccaattgcttataaaaaggcaagaatgagctcatgttcacaatgcaagttccttcaaccggttaggtaacacattgatgaaagcaaactcccttccccacgacggtccaacataattggaagaaaatattcattgctgcttcaaaa

SEQ ID NO: 4596 - DNA, 1622 bp, Zea Mays
gaatctttggctttctagaacctgtactgcactgctggataggcaaaaaaaaatttatgagccgaagaaaagggcagacagacaggggggaaagatggctttgctctcggctctcaggcagatcgctggcatctctgcgggcccactctccgacgccctaaaggcagagctgtacacccttgtacttggcaccttctccctgccaatcaacgtcccaggaaccaactacagcaaagggctccaggcaaggaagaagctcgtggcaatgctgcggcagatgatcgctgaccggaggtcctctggctgcgcccgagacgacatgctggacgcgctgctcagcggcaacgagggtaccagggcgaagctcagcgacgaccagatcatcgaccttctcatcaccctcatatactctgggtacgagactgtgtcgaccacctcgatgatggcggtgaagtacctgtcggacaaccccaaagctctcggacagatcaggaaagagcaccttgacatcaggaaggctaagtcaccggaggatccccttgactggaacgactacaagtccatgaccttcaccaaagctgtcatttatgagactctaaggctagctacagtagtcaacgggctgctgaggaaaactacccatgacgtagaaatgaatgggtatgttattccaaaaggctggagaatttatgtctacacaagggagataaactacgacccgttcctgtacccggaacccatggttttcaacccatggagatggatggagacgaacctggaatcacatccgcacttcatgctgttcggaggaggtgcccgcatgtgcccagggaaggaggtaggaacagttgaaatcgcaacgttccttcactatttcgtgacgcgttacagatgggaggaggagggaaacaacacaatatcgaagttccccagagtggcggctcccaatgggctacatatccgagttcaagattactgaacttcgtgaggcgttttgtgaagtttaggtagggattcagacagatagaaataacccatgcgatgctgatgctgctggcctcttcgaaaggactagaacagccattagtgcctgtaaaatgtgtccatgccgatagtaatgttattatagggaggatataggtatcataggtttattagaaatttgatgtagaaagccaacagatgctcctgtattcttttgctccatcaaaacagtggtatcatttggcttctatgcttttgaatcgaacatggtacagaacccaactatccatatgcaaacttccagcttcatgagcccattcaataaaaaaatgtcaataaccaactgatctaaaaaaaatatggatggacactggccgcaaaacgttgagcacatactaaagatatgctaaactggtatctgctattgctaatagaggaacagttttaccttattcaggatatataagataaacgcttcagtgttagaggcttccaattgcttataaaaaggcaagaatgagctcatgttcacaatgcaagttccttcaaccggttaggtaacacattgatgaaagcaaactcccttccccacgacggtccaacataattggaagaaaatattcattgctgcttcaaaa

SEQ ID NO: 4597 - DNA, 1641 bp, Zea Mays
cctccctctgctcctctctctctctctctacacattccaaagtgcacaatgaacactccatgcaccatcatcaccacctcacatgtctcaatgcaaaagaaacgcttggctggatggctttgctctcggctctcaggcagatcgctggcatctctgcgggcccactctccgacgccctaaaggcagagctgtacacccttgtacttggcaccttctccctgccaatcaacgtcccaggaaccaactacagcaaagggctccaggcaaggaagaagctcgtggcaatgctgcggcagatgatcgctgaccggaggtcctctggctgcgcccgagacgacatgctggacgcgctgctcagcggcaacgagggtaccagggcgaagctcagcgacgaccagatcatcgaccttctcatcaccctcatatactctgggtacgagactgtgtcgaccacctcgatgatggcggtgaagtacctgtcggacaaccccaaagctctcggacagatcaggaaagagcaccttgacatcaggaaggctaagtcaccggaggatccccttgactggaacgactacaagtccatgaccttcaccaaagctgtcatttatgagactctaaggctagctacagtagtcaacgggctgctgaggaaaactacccatgacgtagaaatgaatgggtatgttattccaaaaggctggagaatttatgtctacacaagggagataaactacgacccgttcctgtacccggaacccatggttttcaacccatggagatggatggagacgaacctggaatcacatccgcacttcatgctgttcggaggaggtgcccgcatgtgcccagggaaggaggtaggaacagttgaaatcgcaacgttccttcactatttcgtgacgcgttacagatgggaggaggagggaaacaacacaatatcgaagttccccagagtggcggctcccaatgggctacatatccgagttcaagattactgaacttcgtgaggcgttttgtgaagtttaggtagggattcagacagatagaaataacccatgcgatgctgatgctgctggcctcttcgaaaggactagaacagccattagtgcctgtaaaatgtgtccatgccgatagtaatgttattatagggaggatataggtatcataggtttattagaaatttgatgtagaaagccaacagatgctcctgtattcttttgctccatcaaaacagtggtatcatttggcttctatgcttttgaatcgaacatggtacagaacccaactatccatatgcaaacttccagcttcatgagcccattcaataaaaaaatgtcaataaccaactgatctaaaaaaaatatggatggacactggccgcaaaacgttgagcacatactaaagatatgctaaactggtatctgctattgctaatagaggaacagttttaccttattcaggatatataagataaacgcttcagtgttagaggcttccaattgcttataaaaaggcaagaatgagctcatgttcacaatgcaagttccttcaaccggttaggtaacacattgatgaaagcaaactcccttccccacgacggtccaacataattggaagaaaatattcattgctgcttcaaaa

SEQ ID NO: 4598 - DNA, 3033 bp, Zea Mays
tttatgatcaaacaaaggctctccatgaaggttcttccacagtttaaagtgcacatttcagcatattgagagaatgccaactttgcattgatccaaggatcaagagatcctagaagatccatcaaaaggagctagaaaaaaaaatgctctctcatatttccgttcgtttgatgcttatcataaaatatcacatccagatcaactggtctgggactatatcttcatcagtttggcataaatcgtaatcatgtcgtccaagcttggttgtccatcttacaacagaatatatgaacagtggttgatcaggtgctgtactgattgtgtatcatccacgttgctccctaaagcaacgacaatctcttgcccttgggagcttgcaaagacataggattccacagatgaatggtgcctcgggaaatgcacgcccgcccttgttaaggacccaacaagctcggtactgccaacatgagaggaaaattagcaaactgttttatatcagaatgagcatttgaagctaaacaatcctttgaaacggaaatctgaagtagagtagcttcatttccacatctgtagcactgtggcagtagacatgaggagaccaagagcaggggggaagataggattccaacagagcaacagtggccggtgctggaaattgaaaagtcggagccggacaagtatggcggaaccactgtgacctcgaggcgagaatacgacaggattcttttcggtaaacaacaacgacaacaataaccgctaaaactagttgggaaaaatggtggcaagcagcataggaatcaagggttctacaacaaatgtcagcatggatgtgagaagatacaactcgatgccattccattatacgggggaagaagaagagatcggtacctcccgagcgaaaaaaattggactggggaagtgcggaggaggcccgatttcatttgatttgaggcggcgcaggcacagaggagagcgctgcgccatgcgccgactggggaggaaaacaacaggttacgcgaacagaataagaaagcgaattaatggaatacgccttttctggggtcaaatacattacaagacaaacaatatggggaagaacatggctaaatctacagtgagtttgcttaaccgcagtgctaattttgcatcaaggacttcacaagatgccgtggatgggttaagcgatgaaagtgacggtgaaacctcaacaaaaaagaagagaaccccaagacgtggaagaaagaaagccaccgttgaaacatcgagagatgtaggagaagaaatcgaagtcatcactgaacaaacggccgctgaagagactaaggaagttaagaggagaggccgcaagaaagctgctacttctgcaagctcagaagaggagaaggataaggccaaggaaccgaagaagaggggacgtagaaaagttaagactgtagaggaacctattgataatgctggagagcatctgagcaaagatttgatgctctataatgaaagagaagatcagactcgtctacagaattctgccagtgttctggaaagtaaaatagcgtcagtgctacatgaggatattggagaggttgacgatttaattccgctcgtgtgctgctttggacctgccaaatactcctttattccttctggaagaccagcaaataggttgatagaccatgagattcatgatagaatgaaggacatgttttggtctccagacaaatttgtgagggcaccaggagggtcttcatccaatgttgctctagctttagcagcgattggtggaagggttgcattcatgggaaaattaggtgatgatgactacggtcaaagtttgctgtatcacttaaacatcaatggagttcaaactcgagcagtttatatggacccttcagcaccaactgctgtgtctttgatgaaggtcagaaccgaaggaagtctgaagacaaactgtgttaaaccttgtgctgaggattgtttcctgccgtctgatatcaacccggcagttctaaaagaggctaagatgttttactataattcttcagctttgcttgagcccactacagagtcatcattgttgaaagctattgatgtttcaaagaaatttggtggtacaatattctttgaccttaatcttccacttccactatggtcatccagcaaggaaaccaagtcactcattaaggaggcatgggaagctgccaatatcattgaagtcacaaaacaagaacttgagttcctttgcagcatcaaaccttctgagaaatttgacacaaatgataatgataaatccaaattcacacactatagttcagaagttattatgaaattgtggcacagtaatctcaaggtcctctttgtgacaaatggtacctccaagattcactattacacagaaacacacaatggctgggtccgtggtacagaagatgcaccgatcactcctttcaccggtgatatgtcacaatctggcgatgccattgttgcagcctcatgaggatgctggtaattaaccctcacctgatcacagacaaggtttacttgcacaaggcagtcaaacatgctattaaatgtggtgtcatcgaccagtgggtgctcgcgcgagaacggggcttccttcccaaagagagagcagatccaaccagcgagcagtacgaagtgaagtccatcacagagagggaataccgcacacttcctgatgccatgcaatcagaaaacacgtcaaccagtgaacttgcttatgtggagtgaaaggacaggccattggtgtctgtacactggattcctctatttatttatggaaactgactggtgctgcagttggtattcagaagaattagtttaaacatgcagattttaggtttgtcgagtgtaggttaatagcccccaaagtaagactaacatattgataacatagagacaatgcaaatgtggctgatgccaggaatttttcctacaatgcaatatttgttcattcttgatttctctgcaacaccactatcaattgtgggatggaggtcatttgatcttatcggttat

SEQ ID NO: 4599 - DNA, 3139 bp, Zea Mays
tttatgatcaaacaaaggctctccatgaaggttcttccacagtttaaagtgcacatttcagcatattgagagaatgccaactttgcattgatccaaggatcaagagatcctagaagatccatcaaaaggagctagaaaaaaaaatgctctctcatatttccgttcgtttgatgcttatcataaaatatcacatccagatcaactggtctgggactatatcttcatcagtttggcataaatcgtaatcatgtcgtccaagcttggttgtccatcttacaacagaatatatgaacagtggttgatcaggtgctgtactgattgtgtatcatccacgttgctccctaaagcaacgacaatctcttgcccttgggagcttgcaaagacataggattccacagatgaatggtgcctcgggaaatgcacgcccgcccttgttaaggacccaacaagctcggtactgccaacatgagaggaaaattagcaaactgttttatatcagaatgagcatttgaagctaaacaatcctttgaaacggaaatctgaagtagagtagcttcatttccacatctgtagcactgtggcagtagacatgaggagaccaagagcaggggggaagataggattccaacagagcaacagtggccggtgctggaaattgaaaagtcggagccggacaagtatggcggaaccactgtgacctcgaggcgagaatacgacaggattcttttcggtaaacaacaacgacaacaataaccgctaaaactagttgggaaaaatggtggcaagcagcataggaatcaagggttctacaacaaatgtcagcatggatgtgagaagatacaactcgatgccattccattatacgggggaagaagaagagatcggtacctcccgagcgaaaaaaattggactggggaagtgcggaggaggcccgatttcatttgatttgaggcggcgcaggcacagaggagagcgctgcgccatgcgccgactggggaggaaaacaacaggttacgcgaacagaataagaaagcgaattaatggaatacgccttttctgtgattggaggggctaccgggatttttgctacttgcctccattgatggcttatcttcttctccatcctcagttcacttgctcccagcccccttctcatcgattgaggggtcaaatacattacaagacaaacaatatggggaagaacatggctaaatctacagtgagtttgcttaaccgcagtgctaattttgcatcaaggacttcacaagatgccgtggatgggttaagcgatgaaagtgacggtgaaacctcaacaaaaaagaagagaaccccaagacgtggaagaaagaaagccaccgttgaaacatcgagagatgtaggagaagaaatcgaagtcatcactgaacaaacggccgctgaagagactaaggaagttaagaggagaggccgcaagaaagctgctacttctgcaagctcagaagaggagaaggataaggccaaggaaccgaagaagaggggacgtagaaaagttaagactgtagaggaacctattgataatgctggagagcatctgagcaaagatttgatgctctataatgaaagagaagatcagactcgtctacagaattctgccagtgttctggaaagtaaaatagcgtcagtgctacatgaggatattggagaggttgacgatttaattccgctcgtgtgctgctttggacctgccaaatactcctttattccttctggaagaccagcaaataggttgatagaccatgagattcatgatagaatgaaggacatgttttggtctccagacaaatttgtgagggcaccaggagggtcttcatccaatgttgctctagctttagcagcgattggtggaagggttgcattcatgggaaaattaggtgatgatgactacggtcaaagtttgctgtatcacttaaacatcaatggagttcaaactcgagcagtttatatggacccttcagcaccaactgctgtgtctttgatgaaggtcagaaccgaaggaagtctgaagacaaactgtgttaaaccttgtgctgaggattgtttcctgccgtctgatatcaacccggcagttctaaaagaggctaagatgttttactataattcttcagctttgcttgagcccactacagagtcatcattgttgaaagctattgatgtttcaaagaaatttggtggtacaatattctttgaccttaatcttccacttccactatggtcatccagcaaggaaaccaagtcactcattaaggaggcatgggaagctgccaatatcattgaagtcacaaaacaagaacttgagttcctttgcagcatcaaaccttctgagaaatttgacacaaatgataatgataaatccaaattcacacactatagttcagaagttattatgaaattgtggcacagtaatctcaaggtcctctttgtgacaaatggtacctccaagattcactattacacagaaacacacaatggctgggtccgtggtacagaagatgcaccgatcactcctttcaccggtgatatgtcacaatctggcgatgccattgttgcagccctcatgaggatgctggtaattaaccctcacctgatcacagacaaggtttacttgcacaaggcagtcaaacatgctattaaatgtggtgtcatcgaccagtgggtgctcgcgcgagaacggggcttccttcccaaagagagagcagatccaaccagcgagcagtacgaagtgaagtccatcacagagagggaataccgcacacttcctgatgccatgcaatcagaaaacacgtcaaccagtgaacttgcttatgtggagtgaaaggacaggccattggtgtctgtacactggattcctctatttatttatggaaactgactggtgctgcagttggtattcagaagaattagtttaaacatgcagattttaggtttgtcgagtgtaggttaatagcccccaaagtaagactaacatattgataacatagagacaatgcaaatgtggctgatgccaggaatttttcctacaatgcaatatttgttcattcttgatttctctgcaacaccactatcaattgtgggatggaggtcatttgatcttatcggttat

SEQ ID NO: 4600 - DNA, 2014 bp, Zea Mays
ggttttgctgttcctcgttgctgagcagtgattggaggggctaccgggatttttgctacttgcctccattgatggcttatcttcttctccatcctcagttcacttgctcccagcccccttctcatcgattgaggacttcacaagatgccgtggatgggttaagcgatgaaagtgacggtgaaacctcaacaaaaaagaagagaaccccaagacgtggaagaaagaaagccaccgttgaaacatcgagagatgtaggagaagaaatcgaagtcatcactgaacaaacggccgctgaagagactaaggaagttaagaggagaggccgcaagaaagctgctacttctgcaagctcagaagaggagaaggataaggccaaggaaccgaagaagaggggacgtagaaaagttaagactgtagaggaacctattgataatgctggagagcatctgagcaaagatttgatgctctataatgaaagagaagatcagactcgtctacagaattctgccagtgttctggaaagtaaaatagcgtcagtgctacatgaggatattggagaggttgacgatttaattccgctcgtgtgctgctttggacctgccaaatactcctttattccttctggaagaccagcaaataggttgatagaccatgagattcatgatagaatgaaggacatgttttggtctccagacaaatttgtgagggcaccaggagggtcttcatccaatgttgctctagctttagcagcgattggtggaagggttgcattcatgggaaaattaggtgatgatgactacggtcaaagtttgctgtatcacttaaacatcaatggagttcaaactcgagcagtttatatggacccttcagcaccaactgctgtgtctttgatgaaggtcagaaccgaaggaagtctgaagacaaactgtgttaaaccttgtgctgaggattgtttcctgccgtctgatatcaacccggcagttctaaaagaggctaagatgttttactataattcttcagctttgcttgagcccactacagagtcatcattgttgaaagctattgatgtttcaaagaaatttggtggtacaatattctttgaccttaatcttccacttccactatggtcatccagcaaggaaaccaagtcactcattaaggaggcatgggaagctgccaatatcattgaagtcacaaaacaagaacttgagttcctttgcagcatcaaaccttctgagaaatttgacacaaatgataatgataaatccaaattcacacactatagttcagaagttattatgaaattgtggcacagtaatctcaaggtcctctttgtgacaaatggtacctccaagattcactattacacagaaacacacaatggctgggtccgtggtacagaagatgcaccgatcactcctttcaccggtgatatgtcacaatctggcgatgccattgttgcagcctcatgaggatgctggtaattaaccctcacctgatcacagacaaggtttacttgcacaaggcagtcaaacatgctattaaatgtggtgtcatcgaccagtgggtgctcgcgcgagaacggggcttccttcccaaagagagagcagatccaaccagcgagcagtacgaagtgaagtccatcacagagagggaataccgcacacttcctgatgccatgcaatcagaaaacacgtcaaccagtgaacttgcttatgtggagtgaaaggacaggccattggtgtctgtacactggattcctctatttatttatggaaactgactggtgctgcagttggtattcagaagaattagtttaaacatgcagattttaggtttgtcgagtgtaggttaatagcccccaaagtaagactaacatattgataacatagagacaatgcaaatgtggctgatgccaggaatttttcctacaatgcaatatttgttcattcttgatttctctgcaacaccactatcaattgtgggatggaggtcatttgatcttatcggttat

SEQ ID NO: 4601 - DNA, 1922 bp, Zea Mays
ctcagttcacttgctcccagcccccttctcatcgattgaggacttcacaagatgccgtggatgggttaagcgatgaaagtgacggtgaaacctcaacaaaaaagaagagaaccccaagacgtggaagaaagaaagccaccgttgaaacatcgagagatgtaggagaagaaatcgaagtcatcactgaacaaacggccgctgaagagactaaggaagttaagaggagaggccgcaagaaagctgctacttctgcaagctcagaagaggagaaggataaggccaaggaaccgaagaagaggggacgtagaaaagttaagactgtagaggaacctattgataatgctggagagcatctgagcaaagatttgatgctctataatgaaagagaagatcagactcgtctacagaattctgccagtgttctggaaagtaaaatagcgtcagtgctacatgaggatattggagaggttgacgatttaattccgctcgtgtgctgctttggacctgccaaatactcctttattccttctggaagaccagcaaataggttgatagaccatgagattcatgatagaatgaaggacatgttttggtctccagacaaatttgtgagggcaccaggagggtcttcatccaatgttgctctagctttagcagcgattggtggaagggttgcattcatgggaaaattaggtgatgatgactacggtcaaagtttgctgtatcacttaaacatcaatggagttcaaactcgagcagtttatatggacccttcagcaccaactgctgtgtctttgatgaaggtcagaaccgaaggaagtctgaagacaaactgtgttaaaccttgtgctgaggattgtttcctgccgtctgatatcaacccggcagttctaaaagaggctaagatgttttactataattcttcagctttgcttgagcccactacagagtcatcattgttgaaagctattgatgtttcaaagaaatttggtggtacaatattctttgaccttaatcttccacttccactatggtcatccagcaaggaaaccaagtcactcattaaggaggcatgggaagctgccaatatcattgaagtcacaaaacaagaacttgagttcctttgcagcatcaaaccttctgagaaatttgacacaaatgataatgataaatccaaattcacacactatagttcagaagttattatgaaattgtggcacagtaatctcaaggtcctctttgtgacaaatggtacctccaagattcactattacacagaaacacacaatggctgggtccgtggtacagaagatgcaccgatcactcctttcaccggtgatatgtcacaatctggcgatgccattgttgcagccctcatgaggatgctggtaattaaccctcacctgatcacagacaaggtttacttgcacaaggcagtcaaacatgctattaaatgtggtgtcatcgaccagtgggtgctcgcgcgagaacggggcttccttcccaaagagagagcagatccaaccagcgagcagtacgaagtgaagtccatcacagagagggaataccgcacacttcctgatgccatgcaatcagaaaacacgtcaaccagtgaacttgcttatgtggagtgaaaggacaggccattggtgtctgtacactggattcctctatttatttatggaaactgactggtgctgcagttggtattcagaagaattagtttaaacatgcagattttaggtttgtcgagtgtaggttaatagcccccaaagtaagactaacatattgataacatagagacaatgcaaatgtggctgatgccaggaatttttcctacaatgcaatatttgttcattcttgatttctctgcaacaccactatcaattgtgggatggaggtcatttgatcttatcggttat

SEQ ID NO: 4602 - DNA, 751 bp, Zea Mays
cgcagattcagcaacatcccaccctgccatgtgggctaggcaccgcgccgtctcctccgcatcgccagcccgcccgaccaaccatgccatacgcagcgctcgtattctacagcttatcgagccgccatgccaacgccatgctcccgccttgccatcctctctgcctcgccatccagccgtgcaatcgcggtatggccggttgtggaggatccctcgcgtcccctagcccgaccagccatcaacccccttcgtttccccttccgcgctacatagaacacgcatcggccaggccgccagggtcccagatttggcatacttccattccccccaacattcccgcttgatctggcaatttatagcaaaatacttggataaataaaaattgtttttgttatgttatggcttagaaaaaaacgatgttgaacattgtaaatcttttgatgagttatttatcttgctttgattctgaaataaagaccaatgttgcataatgttccccagtatcatcaggaagtattaacttgaatggtaaactcattgtcgaagctagaagacctggtggcgagactgtcatgtctaacatacttcacttagttgaagaaacccagacaagggtggtccctgttcaacgattggcggacagtgtatagtatgtgaactgattcctatatttatgaaagtttagaggtatgatattcaaagcattacatctttgtcctgttactatctcaaccatctctgtgtgattgga

SEQ ID NO: 4603 - DNA, 710 bp, Zea Mays
attagctctacaaacgagcatatagtcatcttattattaatagaagctgctgaaggctgctggtctgtttgcgggatccatcttcctgatgcggaacttcggtgatctgatggccatttagtaggcttatcagcgttgtttacttggatcctatgagtgttgttttgatgttccaataattcctgctatgaatatgaaaggctattttgctccgaagaggactagatctgtgccgatagtgcttgatcttagactttgtagccatagagattagaccctttaatattcggcatgtaccgtggatattttggaacgatggtatcagtctgcacccataataatttttgatgggtcattaatattttaagagaagatgttgcaccgcagggcagggtctaagatgtcttaagatgcacaaaagtgtgctattaaaaatgagggcagtggtttttactggatgagtactgttcatcgtatgtccatggccagcatatattcacatgggattatgtgtcattgagcagagtaccaggatgggaatctgcttgctgaaaccctgttgcagccttgtgatggacacttgcatcagtttgcacaagaccgttaaagaaaagaggacaaaggggtgaagaacgatgataacagactgctgattggaggaagggagagaccgagagagcggatcctcccctgaaaaaactggtagacag

SEQ ID NO: 4604 - DNA, 1787 bp, Zea Mays
caaacgctacctcgattgctagggagatatgctattcgagtgagcgggtatgaacacaggtttcagacgtgtcttggccctttggctcagctcaggtcacaagtcacaccccggtgcagaaaggagctccagatcacaagtcggtcaaacgatctccggggaatattttattccgtgggattccgatgcggccagtcctcctcccctctctcctgtttcttctagtagtacaaataaagaagaagaagctgagctgctcgaggcacggcgagggagacacaaggcgagtgtccctactccgagggcagtctcggtgtgcaagcgcatagcatagcaggagccacaagaaaaaaggcccatggcttccttctcaccgagtggccggatgacacggacggcggcatcttctctggcagcgcgcgtggtcctcgcgctcctcctcctcatcggggtatccggttccggagccacccaggcagcgtctccccacacccaccacagtcggcagctggatgtgaaccacaagaagccagtgcagacgtttcggcccatcaacattgcccaccgagggtcaaatggcgaactgcccgaagagacagcggccgcctacctgagggcgatcgaagaaggcgcggacttcatcgagacggacgtactcgcgtccaaggacgggcatctcgtctgcttccacgatgtgacgctggacgcgaccaccgacgtcgcggaccacgcggagttcgctggcaggaagaggacctacgaggtccaaggagaagatgtcaccggatggttcatcgtggacttcactcttgaagagctcagatcactgagggtgaagcagcggttcagtttcagggaccagcggtacaacggaccgtcgggatctacccggagatcaagaaccccgtgttcatcaaccagcacgtgaagtggtcggacggaaagcgattcgaggacaagttcgtggagacgctgctcaggtacggctacggaggcgagtacatgtccgatggctggctccggcagccgctgttcatccagtccttcgcgccgacctcgctcatctacgtctccaacatgacggactcccccaagctgctcctgatcgacgacacgacggtcccgacgcaggacaccaaccagtcgtaccacgagataacctcggacgcctacctcgcgttcatcgggagctacgtggtggggatcgggccgtggaaggacacgctggtgcctccggacccgacagacaaccgcctgggacgccccgccgacctcgtcgcgcgagcgcacgctctgcgtctccaggtgcacccgtacaccttcaggaacgagaaccagtacctgcacttcgacttccggcaggacccctacgccgagtacgcgtactggctcgacgaggtcgccgtcgacgggctgttcaccgatttcactggtagtctgcacaagtaccaggagtggactaggccgtaccggaaggagcaggagaagacgagcccggaggcactcttgcgcgagatcgcgggcatgctcaagaacgacggctatgactgatgacttaggttgccttcagttttccccgtctgtcactctctctgtaatggttaactaaataataaagcgacggtttcatggatgcatcatctggacgtgggtgtatcattaccagacactgaattttcagtaacgctctttaaaacatcagtggagtatctcgtttccttgggaacgggggatgttgccaattttttttcccaatattttttatctcttcacaaaagttatagaaa

SEQ ID NO: 4605 - DNA, 1924 bp, Zea Mays
tgaacacaggtttcagacgtgtcttggccctttggctcagctcaggtcacaagtcacaccccggtgcagaaaggagctccagatcacaagtcggtcaaacgatctccggggaatattttattccgtgggattccgatgcggccagtcctcctcccctctctcctgtttcttctagtagtacaaataaagaagaagaagctgagctgctcgaggcacggcgagggagacacaaggcgagtgtccctactccgagggcagtctcggtgtgcaagcgcatagcatagcaggagccacaagaaaaaaggcccatggcttccttctcaccgagtggccggatgacacggacggcggcatcttctctggcagcgcgcgtggtcctcgcgctcctcctcctcatcggggtatccggttccggagccacccaggcagcgtctccccacacccaccacagtcggcagctggatgtgaaccacaagaagccagtgcagacgtttcggcccatcaacattgcccaccgagggtcaaatggcgaactgcccgaagagacagcggccgcctacctggtagagctaaattcttcctgttttttttgttctgaacaaatcatacgcgtacgtacgtactgtatcgccttggagttgcacaaacaaaaggctaaaacaaatcgagagagagagaaaaaaaacatttaattttgcagagggcgatcgaagaaggcgcggacttcatcgagacggacgtactcgcgtccaaggacgggcatctcgtctgcttccacgatgtgacgctggacgcgaccaccgacgtcgcggaccacgcggagttcgctggcaggaagaggacctacgaggtccaaggagaagatgtcaccggatggttcatcgtggacttcactcttgaagagctcagatcactgagggtgaagcagcggttcagtttcagggaccagcggcaagtaccagatcattacgttcgaagagtacatcctgatcgcgctctacgctgacaggaccgtcgggatctacccggagatcaagaaccccgtgttcatcaaccagcacgtgaagtggtcggacggaaagcgattcgaggacaagttcgtggagacgctgctcaggtacggctacggaggcgagtacatgtccgatggctggctccggcagccgctgttcatccagtccttcgcgccgacctcgctcatctacgtctccaacatgacggactcccccaagctgctcctgatcgacgacacgacggtcccgacgcaggacaccaaccagtcgtaccacgagataacctcggacgcctacctcgcgttcatcgggagctacgtggtggggatcgggccgtggaaggacacgctggtgcctccggacccgacagacaaccgcctgggacgccccgccgacctcgtcgcgcgagcgcacgctctgcgtctccaggtgcacccgtacaccttcaggaacgagaaccagtacctgcacttcgacttccggcaggacccctacgccgagtacgcgtactggctcgacgaggtcgccgtcgacgggctgttcaccgatttcactggtagtctgcacaagtaccaggagtggactaggccgtaccggaaggagcaggagaagacgagcccggaggcactcttgcgcgagatcgcgggcatgctcaagaacgacggctatgactgatgacttaggttgccttcagttttccccgtctgtcactctctctgtaatggttaactaaataataaagcgacggtttcatggatgcatcatctggacgtgggtgtatcattaccagacactgaattttcagtaacgctctttaaaacatcagtggagtatctcgtttccttgggaacgggggatgttgccaattttttttcccaatattttttatctcttcacaaaagttatagaaa

SEQ ID NO: 4606 - DNA, 1861 bp, Zea Mays
gccctttggctcagctcaggtcacaagtcacaccccggtgcagaaaggagctccagatcacaagtcggtcaaacgatctccggggaatattttattccgtgggattccgatgcggccagtcctcctcccctctctcctgtttcttctagtagtacaaataaagaagaagaagctgagctgctcgaggcacggcgagggagacacaaggcgagtgtccctactccgagggcagtctcggtgtgcaagcgcatagcatagcaggagccacaagaaaaaaggcccatggcttccttctcgcgcgtggtcctcgcgctcctcctcctcatcggggtatccggttccggagccacccaggcagcgtctccccacacccaccacagtcggcagctggatgtgaaccacaagaagccagtgcagacgtttcggcccatcaacattgcccaccgagggtcaaatggcgaactgcccgaagagacagcggccgcctacctggtagagctaaattcttcctgttttttttgttctgaacaaatcatacgcgtacgtacgtactgtatcgccttggagttgcacaaacaaaaggctaaaacaaatcgagagagagagaaaaaaaacatttaattttgcagagggcgatcgaagaaggcgcggacttcatcgagacggacgtactcgcgtccaaggacgggcatctcgtctgcttccacgatgtgacgctggacgcgaccaccgacgtcgcggaccacgcggagttcgctggcaggaagaggacctacgaggtccaaggagaagatgtcaccggatggttcatcgtggacttcactcttgaagagctcagatcactgagggtgaagcagcggttcagtttcagggaccagcggtacaacggcaagtaccagatcattacgttcgaagagtacatcctgatcgcgctctacgctgacaggaccgtcgggatctacccggagatcaagaaccccgtgttcatcaaccagcacgtgaagtggtcggacggaaagcgattcgaggacaagttcgtggagacgctgctcaggtacggctacggaggcgagtacatgtccgatggctggctccggcagccgctgttcatccagtccttcgcgccgacctcgctcatctacgtctccaacatgacggactcccccaagctgctcctgatcgacgacacgacggtcccgacgcaggacaccaaccagtcgtaccacgagataacctcggacgcctacctcgcgttcatcgggagctacgtggtggggatcgggccgtggaaggacacgctggtgcctccggacccgacagacaaccgcctgggacgccccgccgacctcgtcgcgcgagcgcacgctctgcgtctccaggtgcacccgtacaccttcaggaacgagaaccagtacctgcacttcgacttccggcaggacccctacgccgagtacgcgtactggctcgacgaggtcgccgtcgacgggctgttcaccgatttcactggtagtctgcacaagtaccaggagtggactaggccgtaccggaaggagcaggagaagacgagcccggaggcactcttgcgcgagatcgcgggcatgctcaagaacgacggctatgactgatgacttaggttgccttcagttttccccgtctgtcactctctctgtaatggttaactaaataataaagcgacggtttcatggatgcatcatctggacgtgggtgtatcattaccagacactgaattttcagtaacgctctttaaaacatcagtggagtatctcgtttccttgggaacgggggatgttgccaattttttttcccaatattttttatctcttcacaaaagttatagaaa

SEQ ID NO: 4607 - DNA, 932 bp, Zea Mays
gtctgactgacctgacctctcacgaccgtcgggatctacccggagatcaagaaccccgtgttcatcaaccagcactggtcggacggaaagcgattcgaggacaagttcgtggagacgctgctcaggtacggctacggaggcgagtacatgtccgatggctggctccggcagccgctgttcatccagtccttcgcgccgacctcgctcatctacgtctccaacatgacggactcccccaagctgctcctgatcgacgacacgacggtcccgacgcaggacaccaaccagtcgtaccacgagataacctcggacgcctacctcgcgttcatcgggagctacgtggtggggatcgggccgtggaaggacacgctggtgcctccggacccgacagacaaccgcctgggacgccccgccgacctcgtcgcgcgagcgcacgctctgcgtctccaggtgcacccgtacaccttcaggaacgagaaccagtacctgcacttcgacttccggcaggacccctacgccgagtacgcgtactggctcgacgaggtcgccgtcgacgggctgttcaccgatttcactggtagtctgcacaagtaccaggagtggactaggccgtaccggaaggagcaggagaagacgagcccggaggcactcttgcgcgagatcgcgggcatgctcaagaacgacggctatgactgatgacttaggttgccttcagttttccccgtctgtcactctctctgtaatggttaactaaataataaagcgacggtttcatggatgcatcatctggacgtgggtgtatcattaccagacactgaattttcagtaacgctctttaaaacatcagtggagtatctcgtttccttgggaacgggggatgttgccaattttttttcccaatattttttatctcttcacaaaagttatagaaa

SEQ ID NO: 4608 - DNA, 1558 bp, Zea Mays
ccgagcccctacgttccaagtccaaccaacccattccccaattcagtatcaggcctttgcgaattgcgacagcgagagcgggaagaggaaactcgaaactcggcgagcgggatggcaaccggcccggagcacgtggcggcggcggtcgaggagacgccggagaagaaggcggccagcacaaccgagctccccgcaccctcaggctggacgaagaaggttgctccaactcgaggtggacgatttgaggttatttttgtttccccaactggtgaggaagttaagagcaagagacagctaacccagtacctgaaagctcatcctggaggccctgcatcctcagagttcgattggggaaccagtgatactcccagacgctcagcacgcttgagcgagaaggtcaaggcaactgagagcccagagggtgagaagacccctaaacggggaagatcaagttctaagagaggcaaaaaggaggaaaaagaagacacagaggctgcaaatgaggctggagaagatggtgcttcggaggaaggtaaaggtacagatgtggagatgaaagatgctgaaaacgctgaagacgagaagaaagaggtcccaaatgcagatgctgcagagaagactgaggaaggtgaagataagaaagaggaggcccctgctgtagatgcagcagagaagactggtgagaaagaggtggcccctgctgtagatgcaacagaggagacagaaaaaagcaccgaaggccaagcacagcctaattatgttgctgccccagaatctgagtataaaggagacggaaagccaggtgaatccgaagcagctccccttgcatttgttgatgaaacagctccccatgtaattattggtgaagagaagaaagaggaaaatactgagaatgagaacagtcaggcagccgaatctgccgtgccttccctggcatctttagagggagagaagaaagagaatggtggtgcccctgaacaaccagccctgcctgtagctgagacgaaggcagatgctcctccggcagaggcagaaaagggggctgaaaattcaggccagccgaataccggctctcaagaaccgaaggcagcaaactgcgacgaggggcagattcaacctggtgcctctgctgtgaggtgcacataagggagcttgatctcagatgggactctgttgcgttatgtctttaggacgatacctcgcatttgctttgagaattgtaatcgtggttaacctgacagcgctgtgtagcactaggctgcccagcacgtagttatcctttcgtttcttttataacggtggtgttgcagcatgggtaatgggccggcctgtgctgcctcagccaccactgcatacccagtgtaagtgtaactcgttattagcgtggtcgacattgatctgtggagaggactgcaggacagtactgtcctcgacagctgtaacgttacgttttgtgtgttcccttgtgttattgaacttatattatgatccataaataaagccataagcgtggcagggtcattccctgaccaccttcaggcatcaccatttgttggcc

SEQ ID NO: 4609 - DNA, 3191 bp, Zea Mays
aggcgcggtggtgcacgccgtgttcaacactagaactaactcatctcttcctctccattgcattttcttcttcctccaaatacgtaacaaacttctacgtgagcgccagggcagttgcgcccatgggaaggcatccgcctgtcgatgaggcgatggacttcaacggcaacggacgggacgaggcaaacccgagcggctctgaggcggggaaccacaacgagcaccgcggcgacgacccctcgcgcgttggccagagcctgcccgccgatatccgccaaaatgggcagccaaccctcggggaggagatcaccgcgccgctgtgggaggagttcgaggcgctcggcatccacgtccgccgctccgagcccgtgttcccgccgcgcccagggtacggcgccgcggggacgccgtacgtcgtcagggccaacctcttcctcggtcgcctcgtcgacgaggccctgcatcagtacaacgtaaccatttcgcccgagccgacgcccaaggccgcgtacagagagatcatgacgaagctgttgtccgagaaccagcacacggatttcgacggccgcttctccgtgtacgatgacggtgactcgctcttcacagccggtgcgctgccgttcgacaccaaggagttcgaggtccccctctctgcaggcggcgacgaaaagatggacaggaagtacaaggtgatgatcaaccatgccgcaacgattagtctgctacagctgaggatgctgttagcgggctatcccacggacatccccgcgcaggcgctcgtggtcctcgacaccgtgctgcgtgacgtcttcaacgaacgcaatgacatggaatgcgtcgtgattgacaaaaaggatcgcacactgggtgttgacgcatggaaggggctctatctgagcatcaggccaacacagaactgcttgtctctgattgcagacgtgtcctcatctgtattcgttcaacccctgctattgattgaattcgttcagaagatcctaaagatagatgccgtggataggaacttgactaaacctgagtatgacaagctcttgaaggccctcaggggtgtgaggattcaagtcacacacagagataatagacgccgagtatggtcaaagaaaaaagataatagacgccaactctctacgtacagagttgctggcttgtcagtgaatcctactaatgatttgagttttgaatcaaaggttggagtcacaacgactgtgattgattacttcagagaaatatacggcctggaactgaaatacaaatatctcccatgcgtcaatgctggcagcgagcaggatccaatctattttcctatagaggtttgcaagatagctcccaagcagtgttaccagaagaagctggaaggtagtcagttttctactccaaggaagtcagcctggatccatcctgaagccgagcaatcctgtcctcagcttaagtatgatgattctgtatcacagaaaacatggtttccactggatgggtactggaatatgaaagacaagaaagtaataaatggtgccaagatcagaaactgggcatgtcttaatttttgtgaagatttatccaaggaagatattaagaagttttgctttaagctggctgaaatgtctcgtattactggactggactttgccgatttgaagctcccaatattcactgcacgtccagatcgagttgaagatggtattcgtaggtgctatcaggaagcgaagaacaagctaagggatcagaagattgatttactgcttgctatactaccagataaaaaagacagtttatatggaaatattaaaaggatctgtgagacagatattggtcttgtgtcacagtgttgtcgaaggtcaagagtcttagtgaataataatcagatattggcaaatattgctattaagatcaatgccaaggttggaggaagaatctcagtattcgatgacgtacagaagagtttaccggttgtttcaaataagccaacaattatatttggtgctcatgtttctcacccttctgttgtagatggttctactggcccttctattgcttctgtcgttgcatcccaagactggcatgaggtgtctaagtataatggtgttgttcgtgcacaaggtcacactgaagagatcggtggccttgaagacattgtcaaggagctccttcatgcatttgcaaacgagtccaaggagaagctccagcagctgatattctacaggttcatatatctcattttgttctgtgatgccaccacatgagtgctttttctctctatgttcttttgttatgtatttggttactagggatggcataagtgagggtcaattcaatcgaattttggagaaagaaatcccagcgatagaaaaggcttggaacgcactgtatgacaatgagaagccacaaatcaccttcgttgttgtgcagaagaggcataaactgaggctgttccccgtggacgacaactataagatccgttctgctaagaagaaaattgttgagcctggcacagtggttgatagtgagatctgtcacccagcagaatttgatttcttcctttgcagccaatctggtggtatcaaaggcccaaggcgtcctgtgaggtaccttgtactgcgagatgataacaacttcacggcagatgaactgcaggctctcacaaataacctgtgctacacttattcaggcggcaatcgttcgttgtcggtcgctcctcccgcatactacgcccaaaagctcgcacatcgggcccgcgtctacctcgccaaaggctcggacaataatgcagctgctgctaatggtggtcggaagcaaattccagagataaagaatgagctgaaggggtccatgttctactgctagtcctttgcctgctgaacggacgatgcattgttctatagtgaaagacttgagtgtgctctgagtctctgactgacatctggagaaggatggcatctgcaatagtcgccgtgttctttttagtacactagaataaatggatgttttttgtggacgcccatgttgaactagttttcttttccagtaagtacttcagaatgagtgagataaatatatcattcagcgtctggtggtctggcattggaattcaaccagcatggcctgccttgttatccacctgattggttacccgcatcattttgatgctattaacattcacccaccatacgttcaaa

SEQ ID NO: 4610 - DNA, 1416 bp, Zea Mays
gaagggacgaaaagcgcagacaagagagagaaatcggaatccaagcgcaaccaaaagagaagagggcagacacgagggagcgcgtggggggagagggcatggtctctctcgtcccggcagtcccgtctcaagcaaaagctctctcctcttcttccgctcagtgcaccaatcactgcaacatactggcctgaggtcattgagttggtgaaagggaaggagggggtatcatgggcatctcatccaagtggattaaatccttggttggcataaggaagcaagaaaaagcgcagaatgcagaaaagcaagaaaaagggtggaacgctgagagcagtgaaactaaacattctttggatcccggagctgcacttgcagtcgaagaaattacagtacaaagtgaagcattgactgataacaaaagcgcacaaatggtttcaaattcatttttttcagacagtacaccgcttgatgtgcacatttctcaggctgaacatcatagtaacgaagatttggccgcaactgttgtccagtctgcgtttcgagcgttcttggctaggcgtgctttacgagctttgaaaggaatagttctacttcaagcccttattaggggccattctgttagaaggcagacagcagagacgcttcagtgtatgcaagcgctggtaaaagcaaaagctcgtgtccgagcaagacaagttcgtgttgccttagaaaatcaagtggcacggaaaaagattcctgaacaagatgatcatgagaaccatgtccgagaagtcgagggaggctggtgtggcagtattggttccatggaggaaatgcaagctaaagcactgaaaagacgagaagctgctgctaagcgtgagagggcaatggcatatgctttgactcatcagcggcaagctggttccaagcaacaaaattctttgagcctgcaaggtcttgaacttggtgagaaccactgggagtcaaattggttagacaggtggatggctgtacgtccatgggagaacaggttacttgactgtaatgccaaagagagtctgccaacgcatgaagataaggatgaggaagcaaattctcagatcacaccaaagggtaaagtgtcaacttcaaatactcctggtctgagcaagaagaaaggtgttaaccacaaaaagtcatattcagatgttagttgtacttcatttgcacgaccagcaaatgtattaccatccacatctttaggatcatccaaacagaaggcaaaggctgtgggtgaagtttttgaggaagtcagctcccagccaacagatataggttctaaggatgtgcacaattcaaaagataagcttgtgcaagtgaatggaccagccaagaagcggttatccctcccaaataatgtgcagccgtgtatgagattaggggttcgagggatttctc

SEQ ID NO: 4611 - DNA, 1745 bp, Zea Mays
ctgccaccgcgtagagtaatgactgacagaatatatgcaccaatcactgcaacatactggcctgaggtcattgagttggtgaaagggaaggagggggtatcatgggcatctcatccaagtggattaaatccttggttggcataaggaagcaagaaaaagcgcagaatgcagaaaagcaagaaaaagggtggaacgctgagagcagtgaaactaagagctctgctaatcaatcactgcacaaacggaaacattctttggatcccggagctgcacttgcagtcgaagaaattacagtacaaagtgaagcattgactgataacaaaagcgcacaaatggtttcaaattcatttttttcagacagtacaccgcttgatgtgcacatttctcaggctgaacatcatagtaacgaagatttggccgcaactgttgtccagtctgcgtttcgagcgttcttggctaggcgtgctttacgagctttgaaaggaatagttctacttcaagcccttattaggggccattctgttagaaggcagacagcagagacgcttcagtgtatgcaagcgctggtaaaagcaaaagctcgtgtccgagcaagacaagttcgtgttgccttagaaaatcaagtggcacggaaaaagattcctgaacaagatgatcatgagaaccatgtccgagaagtcgagggaggctggtgtggcagtattggttccatggaggaaatgcaagctaaagcactgaaaagacgagaagctgctgctaagcgtgagagggcaatggcatatgctttgactcatcagcggcaagctggttccaagcaacaaaattctttgagcctgcaaggtcttgaacttggtgagaaccactgggagtcaaattggttagacaggtggatggctgtacgtccatgggagaacaggttacttgactgtaatgccaaagagagtctgccaacgcatgaagataaggatgaggaagcaaattctcagatcacaccaaagggtaaagtgtcaacttcaaatactcctggtctgagcaagaagaaaggtgttaaccacaaaaagtcatattcagatgttagttgtacttcatttgcacgaccagcaaatgtattaccatccacatctttaggatcatccaaacagaaggcaaaggctgtgggtgaagtttttgaggaagtcagctcccagccaacagatataggttctaaggatgtgcacaattcaaaagataagcttgtgcaagtgaatggaccagccaagaagcggttatccctcccaaataatgttggcagagaatcagggaagggaccaacccgcaggaattcgcttaacaggtctgctccaaaagcacgggcggactctcctaaccagggtgatgagttagaggcctgataacacattcctccaatttgacgtcggcaagccatcctaaagtgtgcttctccaggttgcccataacgtaacattcccaaacgatatcatgcagctagatttgggttgtgattcatatttctgttgtgtaatgctgtggtgtgttgtgccttgtgtggccttttattccgcatcgccaattttcttatgtttccagcttccctgtaagttgttctaactgctgaaactaaaagaaggaaatgtgctgtattgtgtttatgtgttgaagtttctcgggaacttcgatcctgcttttgcagttgcagaacaccatcctctgattgtataccttcgagtgcaatcattcaggtcaaa

SEQ ID NO: 4612 - DNA, 50 bp, Zea Mays
agggtgctgcagggtccttttgtataaagtctgtgtcaggagaaaagccg

SEQ ID NO: 4613 - DNA, 1179 bp, Zea Mays
gctgaaccaaacaggctcctcctctcttgagaaactgcggtcgttcttcactggagccagcttggtcggttcgtttaccaccaaagcgccccgcaaaatctcgccgccgaccgccatggcagccgccgacgagacgcgtccgctgctcgttgctatatctctcgccgtagccgcctgctgcctcgcgcagctggcggtgggggacacgaacggcgtctacgagccgtgcagtgacgcacggatccagcgcggggacggcttcaccttcggggtggtcttcgccggatacaacgccttcttctccggcaacacacagctctccccctgcgaccgccgcctcaacctcgctgcctccgggcagctcgccgtcttccgccccaaggtcgacgagatctccctcctcaccatcaacaccactaccggattcaacccagcttcagctggtggattcatggtagcatttgccggcaggaagtatgcagctagatctattccgatatttgtatccaacacctcagtcacagtgtccagcttcacactggtacttgagttcaacaaaggcagactccaaaacttgcactggaagaaggacggctgtggcgcttgctccggcaagtcgaacttcgtctgcctcggcaaacagacatgcgccatcaggacgcagagctgcaagagccaagggcccgtcgactgcagcgtcggcatccagctggctttctctggcacggacaagcacgagtcggttctgaactcgtggtacgaggtctccaacctgaggcagtactccctctacgggctctactccaacctcaaggacaccctgagcggccagttcaacaagatcttctaggctgttttggtgctgccattgtttattctctcctgctcccatcccgatcattattaatcctgttttggtacttgtatccagattccagaccagttttaaccctgtctcagctcaaccgtatgtaccattgcccgttggtgtcgttttagtgcctaacaagatttatgaattttgtgatgagctagctactgtcctgccgatgactatgtttgcttccaaaggacacggcttatcgtcgctgatataccagatgctggtcagataccccaactagccaacaaggtatagctaaggtgcggccaacaagacatagctaaggtactccaact

SEQ ID NO: 4614 - DNA, 2511 bp, Zea Mays
aaaaatcttaccctgtacagtacagtggcgacgacagcgggcatggtaccccacttgctgccctaaacaagcaaggagccgccatggcgacttcagaaatagaaagagggcgcgcgcagagtatcttatcttgcattgcacccaagcagtgctagtggcgacctccatctttttactctttttttttcttaaactgggatgcaatggtaggggtaggggagagagagagagagatcagacgggagacgagagacttttcaaagcttagcttgcgccttgtagtctgtactctgtagctgtgcgtgcccacactaccatttgctccctctcctcgctacctatgtcctcgttcgctgcctggccgcgccagcgccacccctcctcctctagcagtcctctctctccgctcgtgtgctggtccatcgcctgcctcctcggtttgtcctgaatccttggaccgacgcacgcacacaagctcagctcagctcaggctgctgctgctggattctttggtgttccatcaggccaaggatcccgcaaagagctccggagccaagcctgctgcagccgtcgcgtcgggtgaggcaggcttcagcttcagtctcctactcgacgaggcaagcggatcggagcgggcctccgctccgccatgatgagcttcaagggccacgaggggtttggccaggtggccgccgccggtgccgggagccaggctgcctcccatggtggagcaggcccgctgccatggtgggcggggccccagctgctgttcggcgagccggcgcccccgtcaccggaggagacgcgccgggacgcccagttccaggtcgtgccgggggttcagggcacgccggatccagcgccgcccaagacagggacacctgaggtcctcaaattctctgtctttcaagggaatttggagtcgggtggtaaaggagagaaaaccccaaagaactctaccactattgctcttcagtcaccgttcccagaatacaatggccgtttcgagattggtcttggtcaatctatgctggccccttccaattatccttgtgctgaccagtgctatggcatgcttgcggcttatggaatgagatcgatggtatggtctgtttgttttcagaaaacagtgttctactttgttgcaccgtgtccttaagtatttgcgtgaacatagtactatttcctagcaagcttttgcaccaagatttttttcgcaccaaaatactcagatcacatgtattcttgctacaatcatgcatgtaaacacaaagatcacctgattaatatatatgctcgaactttaccttatactattattatatagcttcattgaataaaagagcaagtacaggttatgaagcatgatactgacagcatcgctgaaatttctaataaacgccagaactctaatggccttttgttttttcttccccacatgtaacgtagtctggtgggagaatgctgttgccactaaatgcgacagctgatgcacccatctatgtgaatccgaagcagtacgaaggcatcctccgccgtcgccgtgctcgcgccaaggcggagagcgagaacaggctcgccaaaggcagaaagccctatctccacgagtcgcgccacctccacgcgatgcgtcgggtaagaggcaccggcgggcgcttcgtcaacacgaagaaagaagggcgtggcacgggcgttgcttcgaacgggggcagcaagacggctgcagcggcaccgtcgcgcctcgccatgccccctagcttccagagtagcgtcgccagcctgtctggctccgacgtgtcaaacatgtacagcggcggcttggagcagcaccttcgggcgccgcacttcttcaccccgctgccacccatcatggaggacggcgaccacggtggtccccccacccgcatctcctcctccttcaagtgggcagccagcgacggctgctgcgagctcctcaaggcgtgaaccgacgaggaggaggggatggctactcagacgaacggccttctcgccgatggctggtcgtctgtaggcaaatcattcttggctgttccgcattggggtgcaacctcatccacatcatctacctacccagtaggccagtaccccctgttccctgaacagtgcttgggttacaggggtcctcctgtgtgtgtgatgatgtggtgtgcctcccccacatgcatttgctgtaacataatagtgtacccaaaccactgcttcggactatcattgtctgtctcggtatggattctctgttgtcacagtgtctgaataattgaggcgtcagacttcaaagttgctccggttcttggagatgggtatgtttgaagcttgcttggaggtctgaaactttgtgcttggtcactcaagaatcaagatgctgagttattgcattctgaacctgtaatttggtgccagcattcagttgttgcagttgacgcatggcttgtattttaaggtagcatcatctgtgctctggtgacgaggtgttcgttctgattatctgag

SEQ ID NO: 4615 - DNA, 1940 bp, Zea Mays
agacttttcaaagcttagcttgcgccttgtagtctgtactctgtagctgtgcgtgcccacactaccatttgctccctctcctcgctacctatgtcctcgttcgctgcctggccgcgccagcgccacccctcctcctctagcagtcctctctctccgctcgtgtgctggtccatcgcctgcctcctcggtttgtcctgaatccttggaccgacgcacgcacacaagctcagctcagctcaggctgctgctgctggattctttggtgttccatcaggccaaggatcccgcaaagagctccggagccaagcctgctgcagccgtcgcgtcgggtgaggcaggcttcagcttcagtctcctactcgacgaggcaagcggatcggagcgggcctccgctccgccatgatgagcttcaagggccacgaggggtttggccaggtggccgccgccggtgccgggagccaggctgcctcccatggtggagcaggcccgctgccatggtgggcggggccccagctgctgttcggcgagccggcgcccccgtcaccggaggagacgcgccgggacgcccagttccaggtcgtgccgggggttcagggcacgccggatccagcgccgcccaagacagggacacctgaggtcctcaaattctctgtctttcaagggaatttggagtcgggtggtaaaggagagaaaaccccaaagaactctaccactattgctcttcagtcaccgttcccagaatacaatggccgtttcgagattggtcttggtcaatctatgctggccccttccaattatccttgtgctgaccagtgctatggcatgcttgcggcttatggaatgagatcgatgtctggtgggagaatgctgttgccactaaatgcgacagctgatgcacccatctatgtgaatccgaagcagtacgaaggcatcctccgccgtcgccgtgctcgcgccaaggcggagagcgagaacaggctcgccaaaggcagaaagtggtcgctgtgctgttcatgccgcagccctatctccacgagtcgcgccacctccacgcgatgcgtcgggtaagaggcaccggcgggcgcttcgtcaacacgaagaaagaagggcgtggcacgggcgttgcttcgaacgggggcagcaagacggctgcagcggcaccgtcgcgcctcgccatgccccctagcttccagagtagcgtcgccagcctgtctggctccgacgtgtcaaacatgtacagcggcggcttggagcagcaccttcgggcgccgcacttcttcaccccgctgccacccatcatggaggacggcgaccacggtggtccccccacccgcatctcctcctccttcaagtgggcagccagcgacggctgctgcgagctcctcaaggcgtgaaccgacgaggaggaggggatggctactcagacgaacggccttctcgccgatggctggtcgtctgtaggcaaatcattcttggctgttccgcattggggtgcaacctcatccacatcatctacctacccagtaggccagtaccccctgttccctgaacagtgcttgggttacaggggtcctcctgtgtgtgtgatgatgtggtgtgcctcccccacatgcatttgctgtaacataatagtgtacccaaaccactgcttcggactatcattgtctgtctcggtatggattctctgttgtcacagtgtctgaataattgaggcgtcagacttcaaagttgctccggttcttggagatgggtatgtttgaagcttgcttggaggtctgaaactttgtgcttggtcactcaagaatcaagatgctgagttattgcattctgaacctgtaatttggtgccagcattcagttgttgcagttgacgcatggcttgtattttaaggtagcatcatctgtgctctggtgacgaggtgttcgttctgattatctgag

SEQ ID NO: 4616 - DNA, 2389 bp, Zea Mays
ccctctcctcgctacctatgtcctcgttcgctgcctggccgcgccagcgccacccctcctcctctagcagtcctctctctccgctcgtgtgctggtccatcgcctgcctcctcggtttgtcctgaatccttggaccgacgcacgcacacaagctcagctcagctcaggtaccgccgctacctttccccggcccccgcttcaaatcttttcgccctttccctgcaccgtctggggctcgatcagcgtcagttaccacgacgaccgatcttgctcgccagcgagagcgacccctcccctccctacttcccatgctgatctcggcgcgcttctcttcctcctcccccagagccgggcactgatttcccttggctgctgctgctggattctttggtgttccatcaggccaaggatcccgcaaagagctccggagccaagcctgctgcagccgtcgcgtcgggtgaggcaggcttcagcttcagtctcctactcgacgaggcaagcggatcggagcgggcctccgctccgccatgatgagcttcaagggccacgaggggtttggccaggtggccgccgccggtgccgggagccaggctgcctcccatggtggagcaggcccgctgccatggtgggcggggccccagctgctgttcggcgagccggcgcccccgtcaccggaggagacgcgccgggacgcccagttccaggtcgtgccgggggttcagggcacgccggatccagcgccgcccaagacagggacacctgaggtcctcaaattctctgtctttcaagggaatttggagtcgggtggtaaaggagagaaaaccccaaagaactctaccactattgctcttcagtcaccgttcccagaatacaatggccgtttcgagattggtcttggtcaatctatgctggccccttccaattatccttgtgctgaccagtgctatggcatgcttgcggcttatggaatgagatcgatggtatggtctgtttgttttcagaaaacagtgttctactttgttgcaccgtgtccttaagtatttgcgtgaacatagtactatttcctagcaagcttttgcaccaagatttttttcgcaccaaaatactcagatcacatgtattcttgctacaatcatgcatgtaaacacaaagatcacctgattaatatatatgctcgaactttaccttatactattattatatagcttcattgaataaaagagcaagtacaggttatgaagcatgatactgacagcatcgctgaaatttctaataaacgccagaactctaatggccttttgttttttcttccccacatgtaacgtagtctggtgggagaatgctgttgccactaaatgcgacagctgatgcacccatctatgtgaatccgaagcagtacgaaggcatcctccgccgtcgccgtgctcgcgccaaggcggagagcgagaacaggctcgccaaaggcagaaagccctatctccacgagtcgcgccacctccacgcgatgcgtcgggtaagaggcaccggcgggcgcttcgtcaacacgaagaaagaagggcgtggcacgggcgttgcttcgaacgggggcagcaagacggctgcagcggcaccgtcgcgcctcgccatgccccctagcttccagagtagcgtcgccagcctgtctggctccgacgtgtcaaacatgtacagcggcggcttggagcagcaccttcgggcgccgcacttcttcaccccgctgccacccatcatggaggacggcgaccacggtggtccccccacccgcatctcctcctccttcaagtgggcagccagcgacggctgctgcgagctcctcaaggcgtgaaccgacgaggaggaggggatggctactcagacgaacggccttctcgccgatggctggtcgtctgtaggcaaatcattcttggctgttccgcattggggtgcaacctcatccacatcatctacctacccagtaggccagtaccccctgttccctgaacagtgcttgggttacaggggtcctcctgtgtgtgtgatgatgtggtgtgcctcccccacatgcatttgctgtaacataatagtgtacccaaaccactgcttcggactatcattgtctgtctcggtatggattctctgttgtcacagtgtctgaataattgaggcgtcagacttcaaagttgctccggttcttggagatgggtatgtttgaagcttgcttggaggtctgaaactttgtgcttggtcactcaagaatcaagatgctgagttattgcattctgaacctgtaatttggtgccagcattcagttgttgcagttgacgcatggcttgtattttaaggtagcatcatctgtgctctggtgacgaggtgttcgttctgattatctgag

SEQ ID NO: 4617 - DNA, 1970 bp, Zea Mays
ccctctcctcgctacctatgtcctcgttcgctgcctggccgcgccagcgccacccctcctcctctagcagtcctctctctccgctcgtgtgctggtccatcgcctgcctcctcggtttgtcctgaatccttggaccgacgcacgcacacaagctcagctcagctcaggtaccgccgctacctttccccggcccccgcttcaaatcttttcgccctttccctgcaccgtctggggctcgatcagcgtcagttaccacgacgaccgatcttgctcgccagcgagagcgacccctcccctccctacttcccatgctgatctcggcgcgcttctcttcctcctcccccagagccgggcactgatttcccttggctgctgctgctggattctttggtgttccatcaggccaaggatcccgcaaagagctccggagccaagcctgctgcagccgtcgcgtcgggtgaggcaggcttcagcttcagtctcctactcgacgaggcaagcggatcggagcgggcctccgctccgccatgatgagcttcaagggccacgaggggtttggccaggtggccgccgccggtgccgggagccaggctgcctcccatggtggagcaggcccgctgccatggtgggcggggccccagctgctgttcggcgagccggcgcccccgtcaccggaggagacgcgccgggacgcccagttccaggtcgtgccgggggttcagggcacgccggatccagcgccgcccaagacagggacacctgaggtcctcaaattctctgtctttcaagggaatttggagtcgggtggtaaaggagagaaaaccccaaagaactctaccactattgctcttcagtcaccgttcccagaatacaatggccgtttcgagattggtcttggtcaatctatgtctggtgggagaatgctgttgccactaaatgcgacagctgatgcacccatctatgtgaatccgaagcagtacgaaggcatcctccgccgtcgccgtgctcgcgccaaggcggagagcgagaacaggctcgccaaaggcagaaagccctatctccacgagtcgcgccacctccacgcgatgcgtcgggtaagaggcaccggcgggcgcttcgtcaacacgaagaaagaagggcgtggcacgggcgttgcttcgaacgggggcagcaagacggctgcagcggcaccgtcgcgcctcgccatgccccctagcttccagagtagcgtcgccagcctgtctggctccgacgtgtcaaacatgtacagcggcggcttggagcagcaccttcgggcgccgcacttcttcaccccgctgccacccatcatggaggacggcgaccacggtggtccccccacccgcatctcctcctccttcaagtgggcagccagcgacggctgctgcgagctcctcaaggcgtgaaccgacgaggaggaggggatggctactcagacgaacggccttctcgccgatggctggtcgtctgtaggcaaatcattcttggctgttccgcattggggtgcaacctcatccacatcatctacctacccagtaggccagtaccccctgttccctgaacagtgcttgggttacaggggtcctcctgtgtgtgtgatgatgtggtgtgcctcccccacatgcatttgctgtaacataatagtgtacccaaaccactgcttcggactatcattgtctgtctcggtatggattctctgttgtcacagtgtctgaataattgaggcgtcagacttcaaagttgctccggttcttggagatgggtatgtttgaagcttgcttggaggtctgaaactttgtgcttggtcactcaagaatcaagatgctgagttattgcattctgaacctgtaatttggtgccagcattcagttgttgcagttgacgcatggcttgtattttaaggtagcatcatctgtgctctggtgacgaggtgttcgttctgattatctgag

SEQ ID NO: 4618 - DNA, 1829 bp, Zea Mays
caagagttgcggtggtctggactcggagaataagctccaggaatcaatgcagccctgctgctgtagaagtagaacttgatggggaatttggagtcgggtggtaaaggagagaaaaccccaaagaactctaccactattgctcttcagtcaccgttcccagaatacaatggccgtttcgagattggtcttggtcaatctatggtaatataagcttatccttttataccttctattctgaaattattacagtttcaaaatcatttctttgaatcccttcggtgttgatctgccaactgatttctttgcaaaaggaaataaaaaaaaatacttgaccaagtttctttccagctggccccttccaattatccttgtgctgaccagtgctatggcatgcttgcggcttatggaatgagatcgatggtatggtctgtttgttttcagaaaacagtgttctactttgttgcaccgtgtccttaagtatttgcgtgaacatagtactatttcctagcaagcttttgcaccaagatttttttcgcaccaaaatactcagatcacatgtattcttgctacaatcatgcatgtaaacacaaagatcacctgattaatatatatgctcgaactttaccttatactattattatatagcttcattgaataaaagagcaagtacaggttatgaagcatgatactgacagcatcgctgaaatttctaataaacgccagaactctaatggccttttgttttttcttccccacatgtaacgtagtctggtgggagaatgctgttgccactaaatgcgacagctgatgcacccatctatgtgaatccgaagcagtacgaaggcatcctccgccgtcgccgtgctcgcgccaaggcggagagcgagaacaggctcgccaaaggcagaaagccctatctccacgagtcgcgccacctccacgcgatgcgtcgggtaagaggcaccggcgggcgcttcgtcaacacgaagaaagaagggcgtggcacgggcgttgcttcgaacgggggcagcaagacggctgcagcggcaccgtcgcgcctcgccatgccccctagcttccagagtagcgtcgccagcctgtctggctccgacgtgtcaaacatgtacagcggcggcttggagcagcaccttcgggcgccgcacttcttcaccccgctgccacccatcatggaggacggcgaccacggtggtccccccacccgcatctcctcctccttcaagtgggcagccagcgacggctgctgcgagctcctcaaggcgtgaaccgacgaggaggaggggatggctactcagacgaacggccttctcgccgatggctggtcgtctgtaggcaaatcattcttggctgttccgcattggggtgcaacctcatccacatcatctacctacccagtaggccagtaccccctgttccctgaacagtgcttgggttacaggggtcctcctgtgtgtgtgatgatgtggtgtgcctcccccacatgcatttgctgtaacataatagtgtacccaaaccactgcttcggactatcattgtctgtctcggtatggattctctgttgtcacagtgtctgaataattgaggcgtcagacttcaaagttgctccggttcttggagatgggtatgtttgaagcttgcttggaggtctgaaactttgtgcttggtcactcaagaatcaagatgctgagttattgcattctgaacctgtaatttggtgccagcattcagttgttgcagttgacgcatggcttgtattttaaggtagcatcatctgtgctctggtgacgaggtgttcgttctgattatctgag

SEQ ID NO: 4619 - DNA, 1234 bp, Zea Mays
ataagctccaggaatcaatgcagccctgctgctgtagaagtagaacttgatggggaatttggagtcgggtggtaaaggagagaaaaccccaaagaactctaccactattgctcttcagtcaccgttcccagaatacaatggccgtttcgagattggtcttggtcaatctatgtctggtgggagaatgctgttgccactaaatgcgacagctgatgcacccatctatgtgaatccgaagcagtacgaaggcatcctccgccgtcgccgtgctcgcgccaaggcggagagcgagaacaggctcgccaaaggcagaaagccctatctccacgagtcgcgccacctccacgcgatgcgtcgggtaagaggcaccggcgggcgcttcgtcaacacgaagaaagaagggcgtggcacgggcgttgcttcgaacgggggcagcaagacggctgcagcggcaccgtcgcgcctcgccatgccccctagcttccagagtagcgtcgccagcctgtctggctccgacgtgtcaaacatgtacagcggcggcttggagcagcaccttcgggcgccgcacttcttcaccccgctgccacccatcatggaggacggcgaccacggtggtccccccacccgcatctcctcctccttcaagtgggcagccagcgacggctgctgcgagctcctcaaggcgtgaaccgacgaggaggaggggatggctactcagacgaacggccttctcgccgatggctggtcgtctgtaggcaaatcattcttggctgttccgcattggggtgcaacctcatccacatcatctacctacccagtaggccagtaccccctgttccctgaacagtgcttgggttacaggggtcctcctgtgtgtgtgatgatgtggtgtgcctcccccacatgcatttgctgtaacataatagtgtacccaaaccactgcttcggactatcattgtctgtctcggtatggattctctgttgtcacagtgtctgaataattgaggcgtcagacttcaaagttgctccggttcttggagatgggtatgtttgaagcttgcttggaggtctgaaactttgtgcttggtcactcaagaatcaagatgctgagttattgcattctgaacctgtaatttggtgccagcattcagttgttgcagttgacgcatggcttgtattttaaggtagcatcatctgtgctctggtgacgaggtgttcgttctgattatctgag

SEQ ID NO: 4620 - DNA, 3618 bp, Zea Mays
cgttcccttccttccgtcgcggcccgcctccttcactacaaccaggacaggccaacgcggaagcccgtcctccccacccccttccagatttgcagctcgcacctcgcgaatccccgaattccccactgcctcgccacgccgcgcgctgaccgcggcacccggagccccacctgctattcccgaggcggaggacccatcctgccttggcgctcgttcctccctcgtgatcggcgccgcgggcgaatcgcgctgcccggtgggggggaatctagggttccggccatgccggcctagtcgtagggcgggggtaccggcctgcgtcgccggcgcgcgtggagatctcggtgcctccgaaccctggcgggggccggggaggccgcagctgctgaggcatggacgtggactcgcgcatgacgacggagtccgactccgactccgacgcggcggccgcggccgcccgcgggggcaacgccggaggttccgggtccgggagcgagacctcctcgtcgtccgcgccctcgacgcctgggacacccgggacgcccgcggcggccccgaatccggcgccggtcggcgctgtgggtccgaggccagcacctgggtacacggccgtgaacgcggtgatcgagaagaaggaggacgggccagggtgccggtgcgggcacactcttaccgcggtgccggctgtcggggaggagggcgcgcccgggtacatcggaccgcggctgatcctgtttggtggggccacggcgctcgaaggaaactctgccacgccgccctcttcggccgggagcgcggggatccgtcttgctggtgccacagcagatgtccattgctacgatgtgtcattgaacaagtggagcaggcttaccccacttggcgagcctccttcaccaagagctgcacatgtggcaactgcggttggaaccatggtggttattcagggtggaattggtcctgctggtttatctgcagaggatcttcatgttctagaccttacacagcaacgaccacgatggcacagagtggtggttcaaggacctggtccaggtccacgatacggtcatgtgatggccttggttgggcagagatttttgttgactattggtggaaatgacgggaagcggcctctggcggatgtatgggcccttgatactgcagctaagccatatgaatggaggaaacttgaaccagaaggtgaaggaccacccccatgcatgtatgccactgcaagtgcacgctcggatggacttctcttactttgtggtgggagggatgcgaatagcgtgcccttatcaagtgcatatggtcttgcgaaacatagagatgggcgctgggagtgggcaattgcccccggtgtctctccatcacccagataccaacatgcagctgtttttgtgaatgcacgtcttcatgtgtccggaggtgctcttggaggtgggcggatggtggaagactcctcaagtgttgcagtactggacactgctgctggagtctggtgtgacacaaaatctgttgttacaactcctaggacaggaagatttagtgcagatgcagcagggggtgatgctgctgttgagcttacacgacggtgcaggcatgcagcagctgctgttaatgatctcatattcatttatggaggtttacggggcggggtacttctggatgatcttcttgtggccgaggatcttgctgctgctgaaacaacaaatgctgctaatcatgcagcagcaaatgcagctgccacaaatttgcaagcaggacgaacacctgggaagtatgcgtataatgaacaaacaagacaaacaattacagaatcaggtcctgatggggctgtagttcttgggactccagttgcacctcctgtaaatggggacatgtatactgatatcagtcctgagaatgcggtgctgcaaggacagaggagattaagcaaaggcgtggattacttggttgaagcatcagcagcagaggcggaggcaatcagtgctacattagctgctgtgaaggccaggcaggttaatggtgagatggagcagttgccagacaaggagcagtctccagactccacatcaactagcaaacattcaagcctcatcaaactggacagtgctctttctaacaacttggcagctccacctggggttcggttgcaccatagagccgtcgtggtcgctgcggaaactggaggtgctctaggtggcatggtcaggcagctttcaattgaccagtttgaaaatgaagggagaagagtcagctatggcaccccagagaacgcaactgcagcaaggaagttgctagatagacaaatgtctattaatagtgttcctaaaaaggtaattgcatctctgttgaaacctcgtggctggaagccccctgtccggaggcagttcttattggactgcaatgaaattgcagatctttgtgacagtgccgagagaatattttcaagcgaaccaagtgttttgcagcttaaagcacctgttaaaatatttggagatttacacggacaatttggagatctgatgaggttattcgatgaatatggtgctccttcgactgctggtgacattgcttacattgattatctattcttgggggattatgtagatcgtggccagcatagtttagaaactatcactcttcttctcgcattgaaggttgaatatcctcaaaatgtacacttgattcgaggaaatcatgaagctgcagatatcaatgctttgtttggtttccgaatagagtgcatagaacgaatgggtgagagagatggtatctggacatggcatcggatgaataggctatttaattggcttcctttggctgcgcttatagaaaagaaaatcgtttgtatgcatggtggcatcggtcggtcaatcaaccatgttgagcaaattgagaatcttcaaaggccaattacaatggaagctggctcggttgtcctcatggatcttctgtgagaacgacagtgttgaaggactgaggcccaatgcccggggtcctggtcttgttacatttgggcctgatcgggttatggagttctgcaacaacaatgatcttcagttaattgtacgagcacatgagtgtgtgatggatggatttgagcgctttgctcaaggtcacttgatcactccttcattaacaacaaaataaggaggtactgcaaataatgccggagcgatcttggttttgggtagagatcttgtggttgtgccaaaactaatccatcctttgccccctgcaattacgtcacgtgaggcgtcgccggatcatattgaggacacatggatgcaggagctaaatgctaacagaccaccaactccgaccagggggcgtccccaagcagtagctaatgacaagggttctcttgcctggatatagtagattgaccacacattggttggtatgattcatatgaagcctgagtggtctggatcttgttattttcatttgtgttcgggagaggggctggtcgacagccgtaccgaaacgaaagattgatgtacaggggagcataaagactataaagttggtagaagggagcttaatctattttcttctctctccaattcgtttcattgaacacgagtagcaaacgaatcaagctgattcatcaga

SEQ ID NO: 4621 - DNA, 4204 bp, Zea Mays
aagtatttgcaaggaaaagctgcgatctcacacggtagcagactttggacttccaagagagtttcttctgaacactgtatggggtagacattggatttttgcacattatttttcagaccagaggcactgccaaatagctgcaagatatcaagagtgatggagatttcatccaccgtagggtgtaagaagagggctacatcatctgcgtaaatggaaactctgtgtagctgtcttcttgctgctagctgctgcaataaacctgcctcttctgcctttataaataggtgtccaagacatccatgaccaatatgtccccgattacaagttcatttgtgccccttgagttcatttgcttttggtttaatatagtatcgatagctattgctgcttttccagtttgtctgtccccgattacaagttctcgccatttgtggtctcaatcctgtaggtgcctcttgaaggaacacctttaatgtttctagaataaaacataacagaagcatatcaaattcattgataactgattgcatttatattatacatgtgtcaaatggtagttttgatatttggatagtactataccagaaaatgtgcctttttgaattaatatggttccatttcccttttataacatgtgcacgttcactgctcaggttcaccattgttctttacaggggtaagaaataaaacaggttatggtggcttctactttgtaacgtagactgtccatccaaaatcttctgataaatataaaaaggggcagattctccgccggaggctcccacatgattggagtctgtgaaatgggtggactgaggcaagccttccccgcaaatacggagaggctgcttcgaacccgtggcctggtgactccgtgagacagctctcaccactgcaccaggcctgcctttctaaaacccttgtaacaagtattttctaccgaaattactagatgcatgatattcattgaataacatctataggagaaaacttaccatctgtttaagtgctaatacagtcattggtatgtaaaaatcatataaaagcatgtccgtttacatagtaggcttaattgcatggttggcaaagtcagaaataatatgtaattagcagtgcaattctttaacactttcctgtttaattttgtcatgtgattattcgcctgccgccataccaaagaaacaaagtacttaattaacaaaggagaaaacttaccatcagacttgagtttattatcttaccttctccaacagtatctataggcacttgcactgttgtttccatttaattgtatccttctaccatatctgttcatacttataataccatatggatttgtagttgatgaacaaaggaaaataaaaggtgttccatttggatttgtagttgctatctgaaaaaagcctataaccatggtttttaaagcggtaaggcggtccaaggcgttggagcaccgtctggacgcctaggcggcgcctaggcgaggtaggcgggcaagacgcctaggcgacgccttaagaacagagcctataactacttcaatcaaatcaagatattgtgctgatttgtattattaaacaccatatgctctgctaggtagtattgatacatcattatacatgcagcatccttccctaaaacaccatgtgtactgctggacgcttaatcagcttagctgtatattctgctgatattgagtcactggcttcatgcttcaagtactacattttcaaacctacacactaaataaacattataaatgttctttctatgtcatctttggattatgaagattttatttgtagaagtcctgatgtgcacatactattgtctttctgcagtcacttttgttttagttcttataacttgatggatgatgatgcagtgattctaatgaatcttcgtttcctagttggtatattttgcatagcagttgctttgttttgatccttcatttgcactggctaaagtgaagaataaactacttccaaactagctttagcggtcctgtttaatatctttagacacatggtatggttcagacttgagtttattatcttaccttctccaactgtatctataagcacttgcactgttgtttccatttaattgtatccttctaccatatctgttcaaacttataataccgggagcggccgagtttttttatatctgttcaaacttcacacagttttttgttgatgttgtggctgctgcgtggtggtaggcgaggggtatgcaggggagagtggaggaggagagtggcttgagaacaagaacgcagaacgtagcgaggaggtctgtcgtcgccggcggctgaaggcgccaccgtcgaagaacagcccacctctaggaggtaactgtattattcttcgatgccctcttacaaactagcagccagcctttatagtataggcggcagggaacacacccaatcaacttattactttctataatggaaataggaaactctactgtctgctatagcagaaataggaaactactgattgatatactggagataggactcgcctgatcctcttcccttgcttccaattcggctgcctgattgcttgcttcctttcctattcttccagctcttctagctcggttgccttattggtggaggttcccttcttgtgcctgcgcccataggtgttcctgtagaagaatgagtccacaacacttcccccctccccctggaacagctcgtcctcgagctgaaacaccggatattctttcttgaattcttctagtgaaatccaagaagcatcaacagctgtctgtccgtcccaatgtaccaacaattcccatactccatggttgagacgagcacgaatgaccttcaagggattaggaaccactcttccatgcacaagagatggcaactgcactggatcacctaccggaggggtacccacgaaaggcttaagaagagccacatgaaacacattatggatgcgagctgctgctggtaaacgaagacgataagctactgatccaatctgctctagcacttcataaggtccaaagtacttagggcccagcttggtggcacgagctggagtgatacccacggctgtgcggtgatgcaaacggagccaaacccagtctcctactgcaaagacaacctcccggtgcttcttatcatgctgagcacgcattacctcctgagccaacaataaccgatcacggatttcagcaaggaattcatctctatctctgagttgggcttctactgctgccacctttgccgccccctgttcaaattgcagcaaggttggtggaggccggccataaaccacctggaaaggagaaacaccaatagctgtttggaaggaagaattgtagcaaaattctgcccacggtaaccactgtagccaagaacgaggtcgatctcctgctaagcaacgaagatacatagtgataatgcgattagtgacctccgactgcccatccgtttgtgggtgaaaagctgaactgagaagcaatgtcacccctgctaaacggaataattcagtccaaaaagtgctagtaaaaaccgggtcccggtcactaacaatagaacatgggaacccatgtagccgaacaatctcatcaaagaaggctttggcaacaacggtggctgaatatggatggctgagtgggatgaaatgagcatatttggataaccggtccaccacagtcaaaataactgatttcccaccaactttgggaaagccctcaacgaagtccatagcaatatcactccaaacagaagagggaactagcaggggctgcagcagtccagctgggtgcaagtgctcagttttattgcgctgacaaactccacaacctttgacatactctctgaccaaacggctgctgtgagggttgaagaaggataaccgaagacgatagagtgtcttctgaataccctcatgtcctgctgtatgtgcattctccagtagctgtggccataggggagatgaatctggaacatatgctttgccctgaaataacagcagtccatccacctccgtccaccctgctggtgcagtgccactggctaactgggcccgaatttcttgtgctcttggatcagcaaggagttcttgacgaattgcgtcaaaaactgcaaatgatgttgtcgatagggcatgaatactgaaggcctcctcatcccgacgagataaggcatctgctgctgcattttgcttccctg

SEQ ID NO: 4622 - DNA, 1974 bp, Zea Mays
catggtcggggcacttgcctctgataccaatttgttgtggctgctgcgtggtggtaggcgaggggtatgcaggggagagtggaggaggagagtggcttgagaacaagaacgcagaacgtagcgaggaggtctgtcgtcgccggcggctgaaggcgccaccgtcgaagaacagcccacctctaggaggtaactgtattattcttcgatgccctcttacaaactagcagccagcctttatagtataggcggcagggaacacacccaatcaacttattactttctataatggaaataggaaactctactgtctgctatagcagaaataggaaactactgattgatatactggagataggactcgcctgatcctcttcccttgcttccaattcggctgcctgattgcttgcttcctttcctattcttccagctcttctagctcggttgccttattggtggaggttcccttcttgtgcctgcgcccataggtgttcctgtagaagaatgagtccacaacagttgatcttaccaattgaaagcagagatgtcatatttcaaacttcttggtggttggtacccaactccattgtttcagaactgatgctatggcggcgctgcaaattggttgtgccacttgtgcacctcttttcaggctaccttagaccatctgttggactatactccagtgttcactggcaccacctaacttgttttgacagccctttggacaaacaaattttttattgttctttctgtggtgactaacggaaacacttatgcagtcaaagataaaacacaggaagggccgcacacaaaagaaacactcatctactgacatcccattcgtctcagttctttactttgttcaattgagtcatggcatatgacaaggatttccctttaggtcaccagataccctgtcctgacttattgggtacaaccatgtgactgagcaacagaccactggggagaataagtaccaggatacgaccacagtgtcatctgcagattgaatgatggccagtgaattacatctccatgtgcaactgcctagcctataacatgaatgaactgagcaccaatgcctctgatcatagcgtgcatctctccagttcacctgtcaacagctgagattggtttcgatagggacctttctggtttgtatttgtgcacccccagaatgtgagcattgattgattcctggtcctaaaggttcaagtccaagctccaaatgtatcttcaagggttgacagaaccaccgatcagaggatacaacagaatgaaccgtttcttttgaaatttgatcatttaggtcatgacatataacgtgggtctccccttggagcaccggataccctgtctgtcctcactcgctgggcctgggcatcaccatgtgactgaccaccagactgctggtgctgtgcagtaactaccaactgatagatactatcacacagcagtgtctttggcagatagacagcgagctccatctccatgtgcagctgcctctcctctagcacggacgcagcatcaatgcctgctcagtcgctcagggcatattgccgtgtctccctacacggatacagatcaagcatgtctcgtgttcgtgtaagggtcccagcaagtatcttcgaggttaatgctgatgtcgtcaaggatctgaacatggctcatattatttctggttccaaggatccatgtccaaaggtgcctgccgtcaaggttagtagtagtattcacgtagtccggaatctgaacacgacagatactttggttctgttgggcccatgcttcgttgcgccgaaggtcttgcgtgaagaagcagcttcggctgaaatcgtcctcaggaaatggccgaaggttcctttttatagagcttcggcgttgcaaaccgacataaagatagaatgacctttttatccttagaggtctaagataatgttgtaaacttttgtaaagggcataattgtaattcgt

SEQ ID NO: 4623 - DNA, 1995 bp, Zea Mays
gtctgttcgttttttttttcaataaaaaaaagaaaaaagaagaagtgcatgtgcataaacctctgctccctccgactccgacctctctcgtccgtccctcgctctcgcaaaagctccgctctgcttgtcgcagtgtcccttgtctgtttcccctcgccggctcgccgccaccgccgcatccacttctgcgccgcggccgcccatattcctccgagcgcatcttctcctcgcattacagcaccgtaaagccgcatcatttccggatccctacctaggccgaagccgcagctcccaatggcggccgcctcgtcgttgcgtgtcacgtctttcgccgccacatgccctagagcgcgggtgggatctgccggcctcggatctgcctgatgcacggctggagctttgaagctttgctgacattggcggtggttttccctttcttcagcgcccgggggccttgctcgttgctgcggcggggcggacagatttcagtatgtctttcaagattcagctattgtcctccattgccatttttgcttttgccttgcatcttcacccttgtgtgtccactgagtttcgccgtgagctctccagctggaccactggcatagctacgtggtatggcgatgctaatggcgccggaagtgaaggtggtgcatgtgggtaccaatatgctgttgaccaaccaccgttctcgtccttgattgctgccggcagccccttcatctatgactctggcaatggatgtggctcttgctatcaggtggtatgctctagcaatcaagcttgctctggttacccggtgactgttgtcatcaccgaccagggccctggtggtggcccatgcctgagccaagcaagcgatggcatgtgcatgaatgagggagcccactttgacatgagtggaactgcatttggcgccatggcaaagcccggaatggccgatcaactccgtgctgctggcctgctacaaatccaatacactcgtgtgcagtgtgaatggcctggagttgatgtaaccttctctgttgactccggctcgaacccgaactatctggctgtgctcatcgagtacgaggactgcgagagcgatctttcagccgtcgacatcatgcagagctcagcagggcaatgggtgccgatgcagcattcgtggggtgcaatctggaggctcgactctggctctgctcttcagggcccgttccacctccgcttgacgttcagctcaggccgggtactcatagccagcaatgccatacctgcaggatggaatgcgggtgtggcgtaccgggcaggcggagtggcggtgactagggccaggcccaggagtggtggcagccaggccggtgaggctgctgctggaacatttagaggtttggtgtatcaccttctgatgtttgtggtattggcgttgtgaattatgatgcaaatgcatctttggtagtttagaggtgtaaatttaacaaatttaggactacccagggattttagatgtgcattttgatgttttcttgtagctgaggtctgagaggggggagtgatgttaacgtttttgttgtggttgagttatcagcatgcaactgatcaggttggatggtagtccttgcatgtaaatacacatttggtgaaactgtttaggttaagtctttagttcctttatggaagagatgtcttctttctagctttttatttgatttcgaggtgtttttcatggatcgaataccactagtcattgagttagtaaacaaattgtttttctgacagtattgagttgaaatttgttgtttcgagttaaaagattgagtttgtaaattacatgagtctttaaacaaatgctttgaagtacaaagtgagaatcctacttttcaatttttcatctggagagtcttaatctcaggtttcgtagtagttttttgttactgtactgtagcgcagtgcagtgagaagcgtaactacatatctgatctctgtagtctaattcaggaccaacgagtttgg

SEQ ID NO: 4624 - DNA, 1951 bp, Zea Mays
tgtgcataaacctctgctccctccgactccgacctctctcgtccgtccctcgctctcgcaaaagctccgctctgcttgtcgcagtgtcccttgtctgtttcccctcgccggctcgccgccaccgccgcatccacttctgcgccgcggccgcccatattcctccgagcgcatcttctcctcgcattacagcaccgtaaagccgcatcatttccggatccctacctaggccgaagccgcagctcccaatggcggccgcctcgtcgttgcgtgtcacgtctttcgccgccacatgccctagagcgcgggtgggatctgccggcctcggatctgcctgatgcacggctggagctttgaagctttgctgacattggcggtggttttccctttcttcagcgcccgggggccttgctcgttgctgcggcggggcggacagtgcagatttcagtatgtctttcaagattcagctattgtcctccattgccatttttgcttttgccttgcatcttcacccttgtgtgtccactgagtttcgccgtgagctctccagctggaccactggcatagctacgtggtatggcgatgctaatggcgccggaagtgaaggtggtgcatgtgggtaccaatatgctgttgaccaaccaccgttctcgtccttgattgctgccggcagccccttcatctatgactctggcaatggatgtggctcttgctatcaggtggtatgctctagcaatcaagcttgctctggttacccggtgactgttgtcatcaccgaccagggccctggtggtggcccatgcctgagccaagcaagcgatggcatgtgcatgaatgagggagcccactttgacatgagtggaactgcatttggcgccatggcaaagcccggaatggccgatcaactccgtgctgctggcctgctacaaatccaatacactcgtgtgcagtgtgaatggcctggagttgatgtaaccttctctgttgactccggctcgaacccgaactatctggctgtgctcatcgagtacgaggactgcgagagcgatctttcagccgtcgacatcatgcagagctcagcagggcaatgggtgccgatgcagcattcgtggggtgcaatctggaggctcgactctggctctgctcttcagggcccgttccacctccgcttgacgttcagctcaggccgggtactcatagccagcaatgccatacctgcaggatggaatgcgggtgtggcgtaccgggcaggcggagtggcggtgactagggccaggcccaggagtggtggcagccaggccggtgaggctgctgctggaacatttagaggtttggtgtatcaccttctgatgtttgtggtattggcgttgtgaattatgatgcaaatgcatctttggtagtttagaggtgtaaatttaacaaatttaggactacccagggattttagatgtgcattttgatgttttcttgtagctgaggtctgagaggggggagtgatgttaacgtttttgttgtggttgagttatcagcatgcaactgatcaggttggatggtagtccttgcatgtaaatacacatttggtgaaactgtttaggttaagtctttagttcctttatggaagagatgtcttctttctagctttttatttgatttcgaggtgtttttcatggatcgaataccactagtcattgagttagtaaacaaattgtttttctgacagtattgagttgaaatttgttgtttcgagttaaaagattgagtttgtaaattacatgagtctttaaacaaatgctttgaagtacaaagtgagaatcctacttttcaatttttcatctggagagtcttaatctcaggtttcgtagtagttttttgttactgtactgtagcgcagtgcagtgagaagcgtaactacatatctgatctctgtagtctaattcaggaccaacgagtttgg

SEQ ID NO: 4625 - DNA, 2148 bp, Zea Mays
ctccgacctctctcgtccgtccctcgctctcgcaaaagctccgctctgcttgtcgcagtgtcccttgtctgtttcccctcgccggctcgccgccaccgccgcatccacttctgcgccgcggccgcccatattcctccgagcgcatcttctcctcgcattacagcaccgtaaagccgcatcatttccggatccctacctaggccgaagccgcagctcccaatggcggccgcctcgtcgttgcgtgtcacgtctttcgccgccacatgccctagagcgcgggtgggatctgccggcctcggatctgcctgatgcacggctggagctttgaagctttgctgacattggcggtggttttccctttcttcagcgcccgggggccttgctcgttgctgcggcggggcggacagaaaactgcaatgtgaagtacagcgggtcgatgtcttcaaagagcaatcctgttcttttgtccttaaccgtttggttaattacatcaagtgtccctgaatatacaagtgtcccctgaatatacatcacgtacctaacaccactctactgccaccccccctctccccttgcaaattcacagtattttaggcctcatcactcatcagtcgtagcttgttgtcacagtgcagatttcagtatgtctttcaagattcagctattgtcctccattgccatttttgcttttgccttgcatcttcacccttgtgtgtccactgagtttcgccgtgagctctccagctggaccactggcatagctacgtggtatggcgatgctaatggcgccggaagtgaaggtggtgcatgtgggtaccaatatgctgttgaccaaccaccgttctcgtccttgattgctgccggcagccccttcatctatgactctggcaatggatgtggctcttgctatcaggtggtatgctctagcaatcaagcttgctctggttacccggtgactgttgtcatcaccgaccagggccctggtggtggcccatgcctgagccaagcaagcgatggcatgtgcatgaatgagggagcccactttgacatgagtggaactgcatttggcgccatggcaaagcccggaatggccgatcaactccgtgctgctggcctgctacaaatccaatacactcgtgtgcagtgtgaatggcctggagttgatgtaaccttctctgttgactccggctcgaacccgaactatctggctgtgctcatcgagtacgaggactgcgagagcgatctttcagccgtcgacatcatgcagagctcagcagggcaatgggtgccgatgcagcattcgtggggtgcaatctggaggctcgactctggctctgctcttcagggcccgttccacctccgcttgacgttcagctcaggccgggtactcatagccagcaatgccatacctgcaggatggaatgcgggtgtggcgtaccgggcaggcggagtggcggtgactagggccaggcccaggagtggtggcagccaggccggtgaggctgctgctggaacatttagaggtttggtgtatcaccttctgatgtttgtggtattggcgttgtgaattatgatgcaaatgcatctttggtagtttagaggtgtaaatttaacaaatttaggactacccagggattttagatgtgcattttgatgttttcttgtagctgaggtctgagaggggggagtgatgttaacgtttttgttgtggttgagttatcagcatgcaactgatcaggttggatggtagtccttgcatgtaaatacacatttggtgaaactgtttaggttaagtctttagttcctttatggaagagatgtcttctttctagctttttatttgatttcgaggtgtttttcatggatcgaataccactagtcattgagttagtaaacaaattgtttttctgacagtattgagttgaaatttgttgtttcgagttaaaagattgagtttgtaaattacatgagtctttaaacaaatgctttgaagtacaaagtgagaatcctacttttcaatttttcatctggagagtcttaatctcaggtttcgtagtagttttttgttactgtactgtagcgcagtgcagtgagaagcgtaactacatatctgatctctgtagtctaattcaggaccaacgagtttgg

SEQ ID NO: 4626 - DNA, 2153 bp, Zea Mays
ccgacctctctcgtccgtccctcgctctcgcaaaagctccgctctgcttgtcgcagtgtcccttgtctgtttcccctcgccggctcgccgccaccgccgcatccacttctgcgccgcggccgcccatattcctccgagcgcatcttctcctcgcattacagcaccgtaaagccgcatcatttccggatccctacctaggccgaagccgcagctcccaatggcggccgcctcgtcgttgcgtgtcacgtctttcgccgccacatgccctagagcgcgggtgggatctgccggcctcggatctgcctgatgcacggctggagctttgaagctttgctgacattggcggtggttttccctttcttcagcgcccgggggccttgctcgttgctgcggcggggcggacagaaaacagaaaactgcaatgtgaagtacagcgggtcgatgtcttcaaagagcaatcctgttcttttgtccttaaccgtttggttaattacatcaagtgtccctgaatatacaagtgtcccctgaatatacatcacgtacctaacaccactctactgccaccccccctctccccttgcaaattcacagtattttaggcctcatcactcatcagtcgtagcttgttgtcacagtgcagatttcagtatgtctttcaagattcagctattgtcctccattgccatttttgcttttgccttgcatcttcacccttgtgtgtccactgagtttcgccgtgagctctccagctggaccactggcatagctacgtggtatggcgatgctaatggcgccggaagtgaaggtggtgcatgtgggtaccaatatgctgttgaccaaccaccgttctcgtccttgattgctgccggcagccccttcatctatgactctggcaatggatgtggctcttgctatcaggtggtatgctctagcaatcaagcttgctctggttacccggtgactgttgtcatcaccgaccagggccctggtggtggcccatgcctgagccaagcaagcgatggcatgtgcatgaatgagggagcccactttgacatgagtggaactgcatttggcgccatggcaaagcccggaatggccgatcaactccgtgctgctggcctgctacaaatccaatacactcgtgtgcagtgtgaatggcctggagttgatgtaaccttctctgttgactccggctcgaacccgaactatctggctgtgctcatcgagtacgaggactgcgagagcgatctttcagccgtcgacatcatgcagagctcagcagggcaatgggtgccgatgcagcattcgtggggtgcaatctggaggctcgactctggctctgctcttcagggcccgttccacctccgcttgacgttcagctcaggccgggtactcatagccagcaatgccatacctgcaggatggaatgcgggtgtggcgtaccgggcaggcggagtggcggtgactagggccaggcccaggagtggtggcagccaggccggtgaggctgctgctggaacatttagaggtttggtgtatcaccttctgatgtttgtggtattggcgttgtgaattatgatgcaaatgcatctttggtagtttagaggtgtaaatttaacaaatttaggactacccagggattttagatgtgcattttgatgttttcttgtagctgaggtctgagaggggggagtgatgttaacgtttttgttgtggttgagttatcagcatgcaactgatcaggttggatggtagtccttgcatgtaaatacacatttggtgaaactgtttaggttaagtctttagttcctttatggaagagatgtcttctttctagctttttatttgatttcgaggtgtttttcatggatcgaataccactagtcattgagttagtaaacaaattgtttttctgacagtattgagttgaaatttgttgtttcgagttaaaagattgagtttgtaaattacatgagtctttaaacaaatgctttgaagtacaaagtgagaatcctacttttcaatttttcatctggagagtcttaatctcaggtttcgtagtagttttttgttactgtactgtagcgcagtgcagtgagaagcgtaactacatatctgatctctgtagtctaattcaggaccaacgagtttgg

SEQ ID NO: 4627 - DNA, 1809 bp, Zea Mays
ccgacctctctcgtccgtccctcgctctcgcaaaagctccgctctgcttgtcgcagtgtcccttgtctgtttcccctcgccggctcgccgccaccgccgcatccacttctgcgccgcggccgcccatattcctccgagcgcatcttctcctcgcattacagcaccgtaaagccgcatcatttccggatccctacctaggccgaagccgcagctcccaatggcggccgcctcgtcgttgcgtgtcacgtctttcgccgccacatgccctagagcgcgggtgggatctgccggcctcggatctgcctgatgcacggctggagctttgaagctttgctgacattggcggtggttttccctttcttcagcgcccgggggccttgctcgttgctgcggcggggcggacagctggaccactggcatagctacgtggtatggcgatgctaatggcgccggaagtgaaggtggtgcatgtgggtaccaatatgctgttgaccaaccaccgttctcgtccttgattgctgccggcagccccttcatctatgactctggcaatggatgtggctcttgctatcaggtggtatgctctagcaatcaagcttgctctggttacccggtgactgttgtcatcaccgaccagggccctggtggtggcccatgcctgagccaagcaagcgatggcatgtgcatgaatgagggagcccactttgacatgagtggaactgcatttggcgccatggcaaagcccggaatggccgatcaactccgtgctgctggcctgctacaaatccaatacactcgtgtgcagtgtgaatggcctggagttgatgtaaccttctctgttgactccggctcgaacccgaactatctggctgtgctcatcgagtacgaggactgcgagagcgatctttcagccgtcgacatcatgcagagctcagcagggcaatgggtgccgatgcagcattcgtggggtgcaatctggaggctcgactctggctctgctcttcagggcccgttccacctccgcttgacgttcagctcaggccgggtactcatagccagcaatgccatacctgcaggatggaatgcgggtgtggcgtaccgggcaggcggagtggcggtgactagggccaggcccaggagtggtggcagccaggccggtgaggctgctgctggaacatttagaggtttggtgtatcaccttctgatgtttgtggtattggcgttgtgaattatgatgcaaatgcatctttggtagtttagaggtgtaaatttaacaaatttaggactacccagggattttagatgtgcattttgatgttttcttgtagctgaggtctgagaggggggagtgatgttaacgtttttgttgtggttgagttatcagcatgcaactgatcaggttggatggtagtccttgcatgtaaatacacatttggtgaaactgtttaggttaagtctttagttcctttatggaagagatgtcttctttctagctttttatttgatttcgaggtgtttttcatggatcgaataccactagtcattgagttagtaaacaaattgtttttctgacagtattgagttgaaatttgttgtttcgagttaaaagattgagtttgtaaattacatgagtctttaaacaaatgctttgaagtacaaagtgagaatcctacttttcaatttttcatctggagagtcttaatctcaggtttcgtagtagttttttgttactgtactgtagcgcagtgcagtgagaagcgtaactacatatctgatctctgtagtctaattcaggaccaacgagtttgg

SEQ ID NO: 4628 - DNA, 1933 bp, Zea Mays
ctcgtccgtccctcgctctcgcaaaagctccgctctgcttgtcgcagtgtcccttgtctgtttcccctcgccggctcgccgccaccgccgcatccacttctgcgccgcggccgcccatattcctccgagcgcatcttctcctcgcattacagcaccgtaaagccgcatcatttccggatccctacctaggccgaagccgcagctcccaatggcggccgcctcgtcgttgcgtgtcacgtctttcgccgccacatgccctagagcgcgggtgggatctgccggcctcggatctgcctgatgcacggctggagctttgaagctttgctgacattggcggtggttttccctttcttcagcgcccgggggccttgctcgttgctgcggcggggcggacagtcgtagcttgttgtcacagtgcagatttcagtatgtctttcaagattcagctattgtcctccattgccatttttgcttttgccttgcatcttcacccttgtgtgtccactgagtttcgccgtgagctctccagctggaccactggcatagctacgtggtatggcgatgctaatggcgccggaagtgaaggtggtgcatgtgggtaccaatatgctgttgaccaaccaccgttctcgtccttgattgctgccggcagccccttcatctatgactctggcaatggatgtggctcttgctatcaggtggtatgctctagcaatcaagcttgctctggttacccggtgactgttgtcatcaccgaccagggccctggtggtggcccatgcctgagccaagcaagcgatggcatgtgcatgaatgagggagcccactttgacatgagtggaactgcatttggcgccatggcaaagcccggaatggccgatcaactccgtgctgctggcctgctacaaatccaatacactcgtgtgcagtgtgaatggcctggagttgatgtaaccttctctgttgactccggctcgaacccgaactatctggctgtgctcatcgagtacgaggactgcgagagcgatctttcagccgtcgacatcatgcagagctcagcagggcaatgggtgccgatgcagcattcgtggggtgcaatctggaggctcgactctggctctgctcttcagggcccgttccacctccgcttgacgttcagctcaggccgggtactcatagccagcaatgccatacctgcaggatggaatgcgggtgtggcgtaccgggcaggcggagtggcggtgactagggccaggcccaggagtggtggcagccaggccggtgaggctgctgctggaacatttagaggtttggtgtatcaccttctgatgtttgtggtattggcgttgtgaattatgatgcaaatgcatctttggtagtttagaggtgtaaatttaacaaatttaggactacccagggattttagatgtgcattttgatgttttcttgtagctgaggtctgagaggggggagtgatgttaacgtttttgttgtggttgagttatcagcatgcaactgatcaggttggatggtagtccttgcatgtaaatacacatttggtgaaactgtttaggttaagtctttagttcctttatggaagagatgtcttctttctagctttttatttgatttcgaggtgtttttcatggatcgaataccactagtcattgagttagtaaacaaattgtttttctgacagtattgagttgaaatttgttgtttcgagttaaaagattgagtttgtaaattacatgagtctttaaacaaatgctttgaagtacaaagtgagaatcctacttttcaatttttcatctggagagtcttaatctcaggtttcgtagtagttttttgttactgtactgtagcgcagtgcagtgagaagcgtaactacatatctgatctctgtagtctaattcaggaccaacgagtttgg

SEQ ID NO: 4629 - DNA, 1483 bp, Zea Mays
tccacactagtctcttctagctacgataaccccataattctccctctcagttcggatggtgacgtggccgccacgtggggtggctgatacttgactgacagtgatgggctgatggcatccatctagcaaactgcaaaccaggtcatctctgaatttccccaacaaagagcgagcataaaccccgctatacccgcttccttctctccaatctccggtgctcgcatcccgctccgcctccatgcgccgcggcagttccacgacgccagtcctctcacctctgtcctgacccaacacccgggcggctggaacccgcagaggaagacggattcacaaagcacggtgctccccaagtctagcagggtgtgttgtatggcttccacgctccagctgttgttttccattgccatcacagctttggcctttttcctccacccatgcgcatcgactgatgagttccaccgtgagctctacggttggtccaatggcatcgctacatggtatggcgcagctgatggcgctggaactgacggtggtgcgtgtggataccagaatgctgtggaccagccacctttctcatccatgattgccgctggctgctcttccatctacgactctggcaagggctgtggctcttgctatcaggctgtatgcaccggcaatgacgcttgctccggtaacccggtgactgtcgtcatcaccgacgagtgccccgattgcccgtgtcctgatgagcaggtccacttcgacatgagcgggacagcgttcggtgccttggcgaagcccgggcaggagagccagctgcgtggcgccggcgccatccaaatccagtatacccgggtgcagtgcgagtggcctggcgtggacgtgaccttctcggtggagccgggctccaacccgaactacctggccgtgctgatcgagtacgaggatagcgacagcgacctcgactccgtggacatgatgcagacgcagggcgggacgacggggcagtgggtgccgatgcagcagtcgtggggcgccgtgtggaagatcaactccggctccgtcctccagggccccttcaacatccgcctcaccttcagctctggcagggcgctcgtcgccagcaacgccatacctgcggggtggaacgccggcgtcgcgtaccggtctggcggcgtggctgtgacgagggccaggcccaggagcggtgcctgccggggctacgaggctgccgggacactggatggtttggtgcatcgtcacctcgtcgtgttgttgttactggtgttattgacgctgtgagccgagatgcgatgcaattttgctggttctgggagcgtgcgagtttgggctacatggactgagtagctctgtgtatttttcttgcatcgcatcgtagtggatggattactgcgtcgtattgtggacatgtctggtggttatcaaatgtccgtccatataatactccttccacctcaaaataaataaaatttcagaagtc

SEQ ID NO: 4630 - DNA, 1515 bp, Zea Mays
cgataaccccataattctccctctcagttcggatggtgacgtggccgccacgtggggtggctgatacttgactgacagtgatgggctgatggcatccatctagcaaactgcaaaccaggtcatctctgaatttccccaacaaagagcgagcataaaccccgctatacccgcttccttctctccaatctccggtgctcgcatcccgctccgcctccatgcgccgcggcagttccacgacgccagtcctctcacctctgtcctgacccaacacccgggcggctggaacccgcaggtctactgaaattccactattctgccgttgtatgctttgtgctgttgttgagcagaggaagacggattcacaaagcacggtgctccccaagtctagcagggtgtgttgtatggcttccacgctccagctgttgttttccattgccatcacagctttggcctttttcctccacccatgcgcatcgactgatgagttccaccgtgagctctacggttggtccaatggcatcgctacatggtatggcgcagctgatggcgctggaactgacggtggtgcgtgtggataccagaatgctgtggaccagccacctttctcatccatgattgccgctggctgctcttccatctacgactctggcaagggctgtggctcttgctatcaggctgtatgcaccggcaatgacgcttgctccggtaacccggtgactgtcgtcatcaccgacgagtgccccgattgcccgtgtcctgatgagcaggtccacttcgacatgagcgggacagcgttcggtgccttggcgaagcccgggcaggagagccagctgcgtggcgccggcgccatccaaatccagtatacccgggtgcagtgcgagtggcctggcgtggacgtgaccttctcggtggagccgggctccaacccgaactacctggccgtgctgatcgagtacgaggatagcgacagcgacctcgactccgtggacatgatgcagacgcagggcgggacgacggggcagtgggtgccgatgcagcagtcgtggggcgccgtgtggaagatcaactccggctccgtcctccagggccccttcaacatccgcctcaccttcagctctggcagggcgctcgtcgccagcaacgccatacctgcggggtggaacgccggcgtcgcgtaccggtctggcggcgtggctgtgacgagggccaggcccaggagcggtgcctgccggggctacgaggctgccgggacactggatggtttggtgcatcgtcacctcgtcgtgttgttgttactggtgttattgacgctgtgagccgagatgcgatgcaattttgctggttctgggagcgtgcgagtttgggctacatggactgagtagctctgtgtatttttcttgcatcgcatcgtagtggatggattactgcgtcgtattgtggacatgtctggtggttatcaaatgtccgtccatataatactccttccacctcaaaataaataaaatttcagaagtc

SEQ ID NO: 4631 - DNA, 380 bp, Zea Mays
ggcgttcaccttctcccagagacacgtggtcctccgcgcgcacccacgcaacggtcggacggcgtgtcgccgtcccgaagccgtatcaccccggcagtgtaggcccgggcgccgtcctccgcggacgccagcctgaggcggtaggcgtcgccggcgcggtggcggaggcggcaggagccggagcccgccggcagccggagcaccttgacggcgcaggccttctccaggtccggcgtggcgtggagccgcgcggggaggtcgatggtgaagttgccggactcgtccgtcgtcgcggccaccagcgcgaggctgtccggttcgtcgctgggaatgggatgctggctctcgcagtcgcaggtcactgctaccttagcacctga

SEQ ID NO: 4632 - DNA, 1759 bp, Zea Mays
cgacggctcagatttttttttttttttactctttgtctcttgtgatcaagacagtagatgaaaatagatagagggactataatcagctaatcaagttgaccagaacaagttttgcttggatcaggatcacgtcgtccactaacatatagtgccgatggaaggaaaaccacttcccgcccccggactggaagccaaccgaagcaagaaagaggagaaacgtagcaagaaaccaactacgaacccaacaaccagagctcaaaatccaattttttttttttaaaaaaaaaactcccagcagaagaacaaccaagaagccaagaacctgtgacgcgagccatggactctggtccggtgcccacgcgcccaacaggaggttccgcagcggtggcttcgtcgtcttcatcactcatctttctgggcaccggctgctccggcgcgctccccgacgcgcgatgcctcatccagccgtcggagcctccgtgcaccgtctgctccacggccctctccctgccgccggaccggaaccccaactacaggtgcaacacctccctcctggtagattactgccacgacgatggagctcacaggtatatcctgatcgatgtcggcaagaccttcagagagcaagtcctccggtggttcgtgcaccacgaagtcccgtccattgactcggttattctcacgcacgagcacgcagatgctgtcttaggcctcgatgatctctgggtggcactaccgagctgtcagagaaacggtagtgccaaagttccggtttttctcacccaattcacaatggacagtgtggccgcaagattccccaacttggttgaacagaagctgcagggaggtgatgacttcgccagacctgctcagctccattggacgataatcgagggtgatgttgacaagccatttgtagcatcggagcttcagttttggccgttgcccgtaagagtcatgcatggagaggactatgtctgtttaggcttcttgttcgggaggaaagcgagagttgcatacttgtctgatgtctcaagaattctacctagaactgagcacgcgatttcgaagtctggtaccgccaccggacaagggcagctagatctactcatactagaaacaaacaggttgcatggggcgggagacggtcgcagttgccatttgactctgagccagagccttgacgctgtcaagaggatacgccctaaacgagctctgctgattgggatgaaccacgagtttgaacatcacagagaaaaccagctgttagcaagatggtcatgcagggaaagaataccagtgcagctagctcatgacggcctgcgtgtcttcattgatctgtgataacgcagtgttttagcaacactttgatgccaacttagctgttcggtactagtgggaagtccaccggtgcatattaattactcagtgatcactttgacaatttgctagagtccattgaaatcaaggctgtatttgtctttatctgcggccgcaaggattgtgtaacattcagacagttgggttcagggttcttgattggctttgtacaactccacctgaaaaaggctaatattttgctctaactagggttggtaacgggctctagagtttatactatagaatttaagtatcgaataggattaggattagactctattcttgtttatttttgagctaatacctcgtttgggtgtagatattggaaattggaatgagctttactgaattatgttgtttagtttcacataaaattgac

SEQ ID NO: 4633 - DNA, 1956 bp, Zea Mays
tgtgatcaagacagtagatgaaaatagatagagggactataatcagctaatcaagttgaccagaacaagttttgcttggatcaggatcacgtcgtccactaacatatagtgccgatggaaggaaaaccacttcccgcccccggactggaagccaaccgaagcaagaaagaggagaaacgtagcaagaaaccaactacgaacccaacaaccagagctcaaaatccaattttttttttttaaaaaaaaaactcccagcagaagaacaaccaagaagccaagaacctgtgacgcgagccatggactctggtccggtgcccacgcgcccaacaggaggttccgcagcggtggcttcgtcgtcttcatcactcatctttctgggcaccggctgctccggcgcgctccccgacgcgcgatgcctcatccagccgtcggagcctccgtgcaccgtctgctccacggccctctccctgccgccggaccggaaccccaactacaggtgcaacacctccctcctggtagattactgccacgacgatggagctcacaggtatatcctgatcgatgtcggcaagaccttcagagagcaagtcctccggtggttcgtgcaccacgaagtcccgtccattgactcggttattctcacgcacgagcacgcagatgctgtcttaggcctcgatgatctctgggtggcactaccgagctgtcagagaaacggtagtgccaaagttccggtttttctcacccaattcacaatggacagtgtggccgcaagattccccaacttggttgaacagaagctgcagggaggtgatgacttcgccagacctgctcagctccattggacgataatcgagggtgatgttgacaagccatttgtagcatcggagcttcagttttggccgttgcccgtcatgcatggagaggactatgtctgtttaggcttcttgttcgggaggaaagcgagagttgcatacttgtctgatgtctcaagaattctacctagaactgagcacgcgatttcgaagtctggtaccgccaccggacaagggcagctagatctactcatactagaaacaaacaggttgcatggggcgggagacggtcgcagttgccatttgactctgagccaggttatttaatcaggacctctcagtattttctaacttggcggttaaatatgagattaattaatccatcttcataaaatcggcctagaaggctagctaggacagatcaacagaacggctcacagcctcaaaccaggaagcatttacagtcatgcctgtgaagatgcatcagagaatctattgatttctctctctctctctctcttaaacacggagtaccatgttaacgtttactggctgttgtagagccttgacgctgtcaagaggatacgccctaaacgagctctgctgattgggatgaaccacgagtttgaacatcacagagaaaaccagctgttagcaagatggtcatgcagggaaagaataccagtgcagctagctcatgacggcctgcgtgtcttcattgatctgtgataacgcagtgttttagcaacactttgatgccaacttagctgttcggtactagtgggaagtccaccggtgcatattaattactcagtgatcactttgacaatttgctagagtccattgaaatcaaggctgtatttgtctttatctgcggccgcaaggattgtgtaacattcagacagttgggttcagggttcttgattggctttgtacaactccacctgaaaaaggctaatattttgctctaactagggttggtaacgggctctagagtttatactatagaatttaagtatcgaataggattaggattagactctattcttgtttatttttgagctaatacctcgtttgggtgtagatattggaaattggaatgagctttactgaattatgttgtttagtttcacataaaattgac

SEQ ID NO: 4634 - DNA, 2168 bp, Zea Mays
ctataatcagctaatcaagttgaccagaacaagttttgcttggatcaggatcacgtcgtccactaacatatagtgccgatggaaggaaaaccacttcccgcccccggactggaagccaaccgaagcaagaaagaggagaaacgtagcaagaaaccaactacgaacccaacaaccagagctcaaaatccaattttttttttttaaaaaaaaaactcccagcagaagaacaaccaagaagccaagaacctgtgacgcgagccatggactctggtccggtgcccacgcgcccaacaggaggttccgcagcggtggcttcgtcgtcttcatcactcatctttctgggcaccggctgctccggcgcgctccccgacgcgcgatgcctcatccagccgtcggagcctccgtgcaccgtctgctccacggccctctccctgccgccggaccggaaccccaactacaggtgagcgctgcgctcctacatagcatagcatagccaatcgctgttcagcgaacgcttctgctccaaataactgccagagcctcaaaacaaaactggtcttgacctagagaattctcgagttttacctgccctggaaatcggcaagagcatccggtgtctcacactgctacccgaaccgcgtttttggccgtgccgtgttggctggctattataggcacagctttgtcgccactcacgtctggtttcaggtgcaacacctccctcctggtagattactgccacgacgatggagctcacaggtatatcctgatcgatgtcggcaagaccttcagagagcaagtcctccggtggttcgtgcaccacgaagtcccgtccattgactcggttattctcacgcacgagcacgcagatgctgtcttaggcctcgatgatctctgggtggcactaccgagctgtcagagaaacggtagtgccaaagttccggtttttctcacccaattcacaatggacagtgtggccgcaagattccccaacttggttgaacagaagctgcagggaggtgatgacttcgccagacctgctcagctccattggacgataatcgagggtgatgttgacaagccatttgtagcatcggagcttcagttttggccgttgcccgtcatgcatggagaggactatgtctgtttaggcttcttgttcgggaggaaagcgagagttgcatacttgtctgatgtctcaagaattctacctagaactgagcacgcgatttcgaagtctggtaccgccaccggacaagggcagctagatctactcatactagaaacaaacaggttgcatggggcgggagacggtcgcagttgccatttgactctgagccaggttatttaatcaggacctctcagtattttctaacttggcggttaaatatgagattaattaatccatcttcataaaatcggcctagaaggctagctaggacagatcaacagaacggctcacagcctcaaaccaggaagcatttacagtcatgcctgtgaagatgcatcagagaatctattgatttctctctctctctctctcttaaacacggagtaccatgttaacgtttactggctgttgtagagccttgacgctgtcaagaggatacgccctaaacgagctctgctgattgggatgaaccacgagtttgaacatcacagagaaaaccagctgttagcaagatggtcatgcagggaaagaataccagtgcagctagctcatgacggcctgcgtgtcttcattgatctgtgataacgcagtgttttagcaacactttgatgccaacttagctgttcggtactagtgggaagtccaccggtgcatattaattactcagtgatcactttgacaatttgctagagtccattgaaatcaaggctgtatttgtctttatctgcggccgcaaggattgtgtaacattcagacagttgggttcagggttcttgattggctttgtacaactccacctgaaaaaggctaatattttgctctaactagggttggtaacgggctctagagtttatactatagaatttaagtatcgaataggattaggattagactctattcttgtttatttttgagctaatacctcgtttgggtgtagatattggaaattggaatgagctttactgaattatgttgtttagtttcacataaaattgac

SEQ ID NO: 4635 - DNA, 1841 bp, Zea Mays
cggactggaagccaaccgaagcaagaaagaggagaaacgtagcaagaaaccaactacgaacccaacaaccagagctcaaaatccaattttttttttttaaaaaaaaaactcccagcagaagaacaaccaagaagccaagaacctgtgacgcgagccatggactctggtccggtgcccacgcgcccaacaggaggttccgcagcggtggcttcgtcgtcttcatcactcatctttctgggcaccggctgctccggcgcgctccccgacgcgcgatgcctcatccagccgtcggagcctccgtgcaccgtctgctccacggccctctccctgccgccggaccggaaccccaactacaggtgagcgctgcgctcctacatagcatagcatagccaatcgctgttcagcgaacgcttctgctccaaataactgccagagcctcaaaacaaaactggtcttgacctagagaattctcgagttttacctgccctggaaatcggcaagagcatccggtgtctcacactgctacccgaaccgcgtttttggccgtgccgtgttggctggctattataggcacagctttgtcgccactcacgtctggtttcaggtgcaacacctccctcctggtagattactgccacgacgatggagctcacaggtatatcctgatcgatgtcggcaagaccttcagagagcaagtcctccggtggttcgtgcaccacgaagtcccgtccattgactcggttattctcacgcacgagcacgcagatgctgtcttaggcctcgatgatctctgggtggcactaccgagctgtcagagaaacggtagtgccaaagttccggtttttctcacccaattcacaatggacagtgtggccgcaagattccccaacttggttgaacagaagctgcagggaggtgatgacttcgccagacctgctcagctccattggacgataatcgagggtgatgttgacaagccatttgtagcatcggagcttcagttttggccgttgcccgtcatgcatggagaggactatgtctgtttaggcttcttgttcgggaggaaagcgagagttgcatacttgtctgatgtctcaagaattctacctagaactgagcacgcgatttcgaagtctggtaccgccaccggacaagggcagctagatctactcatactagaaacaaacaggttgcatggggcgatttaatgctctatgaacagggagacggtcgcagttgccatttgactctgagccagagccttgacgctgtcaagaggatacgccctaaacgagctctgctgattgggatgaaccacgagtttgaacatcacagagaaaaccagctgttagcaagatggtcatgcagggaaagaataccagtgcagctagctcatgacggcctgcgtgtcttcattgatctgtgataacgcagtgttttagcaacactttgatgccaacttagctgttcggtactagtgggaagtccaccggtgcatattaattactcagtgatcactttgacaatttgctagagtccattgaaatcaaggctgtatttgtctttatctgcggccgcaaggattgtgtaacattcagacagttgggttcagggttcttgattggctttgtacaactccacctgaaaaaggctaatattttgctctaactagggttggtaacgggctctagagtttatactatagaatttaagtatcgaataggattaggattagactctattcttgtttatttttgagctaatacctcgtttgggtgtagatattggaaattggaatgagctttactgaattatgttgtttagtttcacataaaattgac

SEQ ID NO: 4636 - DNA, 1836 bp, Zea Mays
cggactggaagccaaccgaagcaagaaagaggagaaacgtagcaagaaaccaactacgaacccaacaaccagagctcaaaatccaattttttttttttaaaaaaaaaactcccagcagaagaacaaccaagaagccaagaacctgtgacgcgagccatggactctggtccggtgcccacgcgcccaacaggaggttccgcagcggtggcttcgtcgtcttcatcactcatctttctgggcaccggctgctccggcgcgctccccgacgcgcgatgcctcatccagccgtcggagcctccgtgcaccgtctgctccacggccctctccctgccgccggaccggaaccccaactacaggtgcaacacctccctcctggtagattactgccacgacgatggagctcacaggtatatcctgatcgatgtcggcaagaccttcagagagcaagtcctccggtggttcgtgcaccacgaagtcccgtccattgactcggttattctcacgcacgagcacgcagatgctgtcttaggcctcgatgatctctgggtggcactaccgagctgtcagagaaacggtagtgccaaagttccggtttttctcacccaattcacaatggacagtgtggccgcaagattccccaacttggttgaacagaagctgcagggaggtgatgacttcgccagacctgctcagctccattggacgataatcgagggtgatgttgacaagccatttgtagcatcggagcttcagttttggccgttgcccgtcatgcatggagaggactatgtctgtttaggcttcttgttcgggaggaaagcgagagttgcatacttgtctgatgtctcaagaattctacctagaactgagcacgcgatttcgaagtctggtaccgccaccggacaagggcagctagatctactcatactagaaacaaacaggttgcatggggcgatttaatgctctatgaacagggagacggtcgcagttgccatttgactctgagccaggttatttaatcaggacctctcagtattttctaacttggcggttaaatatgagattaattaatccatcttcataaaatcggcctagaaggctagctaggacagatcaacagaacggctcacagcctcaaaccaggaagcatttacagtcatgcctgtgaagatgcatcagagaatctattgatttctctctctctctctctcttaaacacggagtaccatgttaacgtttactggctgttgtagagccttgacgctgtcaagaggatacgccctaaacgagctctgctgattgggatgaaccacgagtttgaacatcacagagaaaaccagctgttagcaagatggtcatgcagggaaagaataccagtgcagctagctcatgacggcctgcgtgtcttcattgatctgtgataacgcagtgttttagcaacactttgatgccaacttagctgttcggtactagtgggaagtccaccggtgcatattaattactcagtgatcactttgacaatttgctagagtccattgaaatcaaggctgtatttgtctttatctgcggccgcaaggattgtgtaacattcagacagttgggttcagggttcttgattggctttgtacaactccacctgaaaaaggctaatattttgctctaactagggttggtaacgggctctagagtttatactatagaatttaagtatcgaataggattaggattagactctattcttgtttatttttgagctaatacctcgtttgggtgtagatattggaaattggaatgagctttactgaattatgttgtttagtttcacataaaattgac

SEQ ID NO: 4637 - DNA, 1593 bp, Zea Mays
cggactggaagccaaccgaagcaagaaagaggagaaacgtagcaagaaaccaactacgaacccaacaaccagagctcaaaatccaattttttttttttaaaaaaaaaactcccagcagaagaacaaccaagaagccaagaacctgtgacgcgagccatggactctggtccggtgcccacgcgcccaacaggaggttccgcagcggtggcttcgtcgtcttcatcactcatctttctgggcaccggctgctccggcgcgctccccgacgcgcgatgcctcatccagccgtcggagcctccgtgcaccgtctgctccacggccctctccctgccgccggaccggaaccccaactacaggtgcaacacctccctcctggtagattactgccacgacgatggagctcacaggtatatcctgatcgatgtcggcaagaccttcagagagcaagtcctccggtggttcgtgcaccacgaagtcccgtccattgactcggttattctcacgcacgagcacgcagatgctgtcttaggcctcgatgatctctgggtggcactaccgagctgtcagagaaacggtagtgccaaagttccggtttttctcacccaattcacaatggacagtgtggccgcaagattccccaacttggttgaacagaagctgcagggaggtgatgacttcgccagacctgctcagctccattggacgataatcgagggtgatgttgacaagccatttgtagcatcggagcttcagttttggccgttgcccgtcatgcatggagaggactatgtctgtttaggcttcttgttcgggaggaaagcgagagttgcatacttgtctgatgtctcaagaattctacctagaactgagcacgcgatttcgaagtctggtaccgccaccggacaagggcagctagatctactcatactagaaacaaacaggttgcatggggcgatttaatgctctatgaacagggagacggtcgcagttgccatttgactctgagccagagccttgacgctgtcaagaggatacgccctaaacgagctctgctgattgggatgaaccacgagtttgaacatcacagagaaaaccagctgttagcaagatggtcatgcagggaaagaataccagtgcagctagctcatgacggcctgcgtgtcttcattgatctgtgataacgcagtgttttagcaacactttgatgccaacttagctgttcggtactagtgggaagtccaccggtgcatattaattactcagtgatcactttgacaatttgctagagtccattgaaatcaaggctgtatttgtctttatctgcggccgcaaggattgtgtaacattcagacagttgggttcagggttcttgattggctttgtacaactccacctgaaaaaggctaatattttgctctaactagggttggtaacgggctctagagtttatactatagaatttaagtatcgaataggattaggattagactctattcttgtttatttttgagctaatacctcgtttgggtgtagatattggaaattggaatgagctttactgaattatgttgtttagtttcacataaaattgac

SEQ ID NO: 4638 - DNA, 2611 bp, Zea Mays
aaatccgtgtggattttgcacggccacgtcccgaaaatgccacaggttctgcacaacaggacttcctagcgatgtcaccgttgaggttggggatatgtctttccaccttcacaagttccctttactttcaaaaagcgcctttcttgaacggtcaattgaagaaaactctgaccaagaagaatgcatcatcaaactaaatgacattcctgggggtgccaagtcatttgagctagttgcaaggttctgctatggtgtgaaaatagagctttcacctgcaaatgttgtctacctacggtgtgcctcagagcatctagaaatgactgaagaagtagctgaggaaaacctgattgcacagtcagaaatgttcctcaaccaagtggttctccgtaactggaaagattccttggcagcattggaaacatgtgatgacctactcccccatgctgaagacctccagattgtgaacagatgcatcgagtcattggcatcaaaagctactagtaatccaaacctcttcggatggccgataagggaacatggcatgatgcaaagtcctggtggcagtgtactatggaatgggatcagcacgggtgcaaggcccagaaatttcaattcagactggtggtatggtgatgcttcatcattgagttttcccatgtataagaggttaatctccaccatggagtctcgaggcatccggcctgaaataattgctggttccttaacctactatgccaagaagtatcttccaggacttaggcgtcatagtcatagcatgggcacaatgcctcttactgctactctatctgaggttgaacaaaaaaaattacttgaggagatcgacaggcttttgcctcttcacaggggtatagcatcgacaaaagttctgcttgggctccttcgcactgccatgattctgaaagccagccccacgtgcatttctaacttggagaaacgaattggcatgcaactagaccaggccactttggaggatctgctgctgccaaatttctcctacacaatggaaacactgtacaatgtggagtgtgtgcacaggattcttgatcatttcttggcaatggaccaagcaaatggtggcgagtccccatgcttggatgatgtcatggcatccccatccttgacaccgatcacaagtgttgccaagctaattgacggctatcttgcagaaattgcaccagatatcaatttgaagcctccaaagttccaagctctggcctctgctattcctgaatatgcccggccactggatgatggcctttatcgtgccattgatatatacttgaaggctcattcctggctgtcagaagctgaaagggagcagttctgccggctgttggactgccagaagctctccctggaagcatgcacccacgccgcccagaacgagaggctgccgttgcgcgtggtggtgcaagtcctcttcttcgagcaactccagctaagaacctcgatcgcagggtgcctgctggtctcggacaacctcgaaggctccaggcctctgcggagcggcattgccacatccggcgaggctggaggctgggccacggctgtccgagagaaccaggtcctgaaggtcggcatggacaacatgcggacgcggctggccgagctggagaaggagtgctcgagcatgcggcaggagatcgagaagctgggcgggcgcgctggtaagggcggcggtggcgggtgggcctcccgcgtcgtgccccggcgactgggcctgaaggtgaggtcgcagatgtgcagcgcccaggagggctccgtcagtgagcagcacaggagcatgagcgccaagctcgacaagctgcaggctaaggtgtcgaagcagaagaagcagctggccgcggatgcctgaagttgaggtttcgagactccggcttcatggcctgaccttgtaattttagcccggtatcaattgtttttgcctctcttttgttgcctgtgtagctgttaggcgaaacgaccgagtgcagtgtgtcggttcgttcttgaaccgtggatggtaccaagaagaatgggagtgtcctagctaagaacacgaacctgatgtgatcagttaatagtttgttaccggtaaggaaaatgtcgcttgcttggttacttttgtgatctgtgacatgtccgttgcctacatgttaaacttttctgtctgctaggactaaactaggagtgctgcttgactgctagtggtggaagacggcggcacaccgctatcacttggagtgagggttttgctcctactgtcgtcttgcttggttataacttataaatataaacgtcggttcagattcgagtcgggtaaaagtcgggttcttgttcgtttggcatgacccatatccgactcgtatcggatcagatttattcgtgtttttttgtcggatttttttaggttagatcgtttttttctttgcgttgggttttaggttaaaagttataatccgtacgtccccctatattgttgtgggtcggaccacccatgctcatgtttacttggtttggttatatggtcttatttgtttcggacctggggtaggcattcatatcagatgtacgacttcatatgactattttatatgctcagcgtgtccca

SEQ ID NO: 4639 - DNA, 1044 bp, Zea Mays
tgctgctaccgacaatggttctgcccccacttctgatgctgatgggaaatgtgcccttgggaaatttctataagtattttggtgattagatgcccaacacattaattgagtacttatgtgcgagaagtgcaaatcagagacaaaggtacgtttctagacttggtatattgttttatgtactaacatggttatccaagtgctagaaacagtgactaaagaagaagcgaagaaaagggaaagagttggctgtgtgcagccaacaccagctcactctggcacaccggactgtccggtgcgccaggctggccggcggtgaactggctactctcgggaaaacgcagaggcgtacggctataattcaccggactatccggtggtgcaccggactgtccggtgagccaacggtcgccagcgccaacggtcggctgcgcaatccgcgggcgacgcgtggcccgcagcaacgatcggttgggcacaccggactgtccagtgtgcaccagacagtgtccggtgcgccaatcgaccccgaggaccaacggtcggatgcgctagatatggaaggagatcgcgcaccggacaactacagtgactgtccggtggtgcatcggactgtccggtgcaccacctgacagaaggtaagtttggccttccaagttggtctccaatggctcctagctgccttagggctataaaagggacccctaggcgcatggaggagtataccaagccttcacgaaacattctaagactcccagacttcgactccacgcttttgattctctgtgttagcgatttgagctccatttgagttgcgaactccgtgtgttgtgtactcgagctcaagttgtgactcgtgtgtgtggttgtgctgcggagttgagtcttatgtgtgttgctctccccaaccttactctgtgctttctctgtgatctcaattgtaagggcgagagactccaaattgtggagattcctcgcaaacgggaaacatactctaaaggaaaagaccgtggtattaaagttgatcatcagatcacttgaaagggg

SEQ ID NO: 4640 - DNA, 2078 bp, Zea Mays
cgcgttttcggtcactccgctactgtagtactgtcttaaaccctcgtctttccgccgcccgtcgcttcgttcctcgcttccccccacaggcccacactctcgccgtctcgcgcgcatcacggcggcggcgaagcaccgcgtggccctccacctaagtcctagcccaagcgtaagcgatcgctctccccatcagccactatggcgccacgcccccgcaagcgggcctcgcgccccaagccccgcccgggctcccgacgtggcggcggcggaggggacgacgatcccttcttcgagtccgagcccaagcgccgccgtggaggccgtgacgaggacgagtcgggagggagacgggtggcggagatcctgcagagaaagcagcttgaggagagcggcaggaagcggagggagattgctgcgagggtattaccaccgggccctcaggatggctttaaggttcttgtgaagcaccggcaacctgttactgctgttgctctatccaaggatagtgataagggattttcagcatcaaaaagatggaattattatgcattgggatgttgaaactgggaaatgtgagaagtatatatggccaagtgaaaatgtgttggtttcacatcacgcaaaaccaccaatatcagctaaaagaagcaagcaagtgctggctttagctgccagttctgatggtcgttacttggcaagcggtggcttggaccgtcatatccatctatgggatgttaggtcacgggagcacatacaggcatttagcggccatcggggaccaatatcttgtcttgcttttgctccggactcttcagagctgttctctggttcttttgatcgatcaataatgcagtggaatgctgaggataggacatacatgaactgtctatatgggcatcagaatgaaatcttgacaatggatgcacttagtaaagacaggattctaactgtagcacgggaccgtacgatgcatctttggaagattccagaagagtcgcagttagtgttccgtgctcctgctgccgcatctttagagtgctgctgcttcattgatgacaaggagtttttgtctggatctgatgatggaagcattgagctttggagcataatgaggaaaaagcctatccttataataaaaaatgctcatccagtattgtgtactaaccttaattcagttgacaatgatgacgagtcacctaaagaaaatggaatgcataaaccggaaaatgtgccatccgcagcccagtcatgggttggtactgttgctgcaagaagaggttctgaccttgttgcatcaggagcaggaaatggtttagttcgtctctgggctatcaaacctgattctaagggagccgagccattattcgatttgaaactggatggatttgttaattctcttgccatagcaaaatctggacgttttattgttgctggtgttggccaggagcctcgccttggaagatggggacgagttcgatcggctcaaaatggagtcgcaattcacccaatccgactaaaagatgtgaaagaggacttgtagagtagattgatgtcttgcattacagtggaacgtccatccatccagcctgcacttctgcagccacggcacaaaagaaaatttgttgaggctaactgggatacatgcaagcaatacaaatttggagggcactacagatgatttttgagctccggttatgtgtgacacggggaatttgtgaggcaattttgtaacttctacagccttctggagcggacaatgaggatttgaagatccatattttttgttccccatgtctggttaactgcattcttttttctgatagctagttctcgccattcgcttttgtacggggtttctccttgcttcgtgtcttgagcgcacgaatagtttgatttggctgcatgacctttatagggtagttccaacaatgacttacgagctagttgtaagcattttattttattctatattataattgaagagaagtaatttttgatcaatagttagtctcaaaatcatgtggtgaaggaagagaagcaattttatacagtattatgaggtactgctaaaagttttt

SEQ ID NO: 4641 - DNA, 3562 bp, Zea Mays
gtactgtcttaaaccctcgtctttccgccgcccgtcgcttcgttcctcgcttccccccacaggcccacactctcgccgtctcgcgcgcatcacggcggcggcgaagcaccgcgtggccctccacctaagtcctagcccaagcgtaagcgatcgctctccccatcagccactatggcgccacgcccccgcaagcgggcctcgcgccccaagccccgcccgggctcccgacgtggcggcggcggaggggacgacgatcccttcttcgagtccgagcccaagcgccgccgtggaggccgtgacgaggacatcgagagcgaggacagcgacgacgatggcgtggctgcgtttgggggcggatttgatgaggatggggacgagcgcggtagggaggaggaggacgaggagacggtgggggagaagaagatgcggatgacgaaggagtggctgaagaaggtcactgaggtcgctaagagggggcaggaggatgacgacgaggacgagtcgggagggagacgggtggcggagatcctgcagagaaagcagcttgaggagagcggcaggaagcggagggagattgctgcgagggtattaccaccgggccctcaggatggctttaaggttcttgtgaagcaccggcaacctgttactgctgttgctctatccaaggatagtgataagggattttcagcatcaaaaagatggaattattatgcattgggatgttgaaactgggaaatgtgagaagtatatatggccaagtgaaaatgtgttggtttcacatcacgcaaaaccaccaatatcagctaaaagaagcaagcaagtgctggctttagctgccagttctgatggtcgttacttggcaagcggtggcttggaccgtcatatccatctatgggatgttaggtcacgggagcacatacaggcatttagcggccatcggggaccaatatcttgtcttgcttttgctccggactcttcagagctgttctctggttcttttgatcgatcaataatgcagtggaatgctgaggataggacatacatgaactgtctatatgggcatcagaatgaaatcttgacaatggatgcacttagtaaagacaggattctaactgtagcacgggaccgtacgatgcatctttggaagattccagaagagtcgcagttagtgttccgtgctcctgctgccgcatctttagagtgctgctgcttcattgatgacaaggagtttttgtctggatctgatgatggaagcattgagctttggagcataatgaggaaaaagcctatccttataataaaaaatgctcatccagtattgtgtactaaccttaattcagttgacaatgatgacgagtcacctaaagaaaatggaatgcataaaccggaaaatgtgccatccgcagcccagtcatgggttggtactgttgctgcaagaagaggttctgaccttgttgcatcaggagcaggaaatggtttagttcgtctctgggctatcaaacctgattctaagggagccgagccattattcgatttgaaactgattaattcgctgagctgtggttttgattcatggaaggccatgattgatgttcactaagagattcgctgatagcgccttcatcggggagttactttgttagtaactcaccacaaaaacacttcattgttgctgctcaccgtaacacccacaagtgctttaaattgaagatcaaggaaccatgcagctgatgatgtaactaatcaatggtggcaatgaaacgatgaactatcaaacctgcaaaagaaaaaccatagcaaatgggtaggttgttactttattaggcttttgagtccccttagacaggtttcaaagtatatatttttattcatccttcagttctgttgactagcacttttgacactccttactttctgcgagtagacatgcttgccccagagtgactatcatattttaaaagtcaaagagcactactgaaaataatcatgtgtggctcactaaacaattaataaaaaattgaaccttttcagtctgtacaacccagctgctttagaaatcagcccctacttagtgaaagaatttcataaacgctctccactatcacctctgtgatcttgtttcttctgtgcttttccatgacaatgtgagtatgtcttctttctccccttcttttccatgactgagtatttggggtatgtattctctgacataatatcttgcaatcccgtattaagcttcggccctgtttggcacaacctatgatggtgcagaatctgcttattggggctgttgggtaggatgttaaagctgtatgttgcttcatccattggaatcgggctcgggtaaatctgcaagctatcagatgtgttttccaacatctactgtttttttgtgtcataatctttcaatttgtgaattcctgggagtacatgtaatcaatcatttagtagaagataaaaaatgcactgtcacagccatggcatcgtttcaggtcaaattgtgagtcagaatgtaatttctgagccatccgctgatatatgaacccatgcatgtggtttcaggctggataccaatttgtttttgtttgatactttgatttgtgataagttttcccaaggagaggtcagacaatttcgtcttgaatttagtcaagacagataccgcacctgtttcatgttctgctgattagctgtgccaaacccataccatgcaggatcaactgccacagccacagttctcttcaaattaaaatgcattcctttgctcaatttaattatgtcattcaaatgatgtaaaagattgttgagcattgtacttaccattgctatgtgtcgctgatacatgtttgtttgtcacgccaggatggatttgttaattctcttgccatagcaaaatctggacgttttattgttgctggtgttggccaggagcctcgccttggaagatggggacgagttcgatcggctcaaaatggagtcgcaattcacccaatccgactaaaagatgtgaaagaggacttgtagagtagattgatgtcttgcattacagtggaacgtccatccatccagcctgcacttctgcagccacggcacaaaagaaaatttgttgaggctaactgggatacatgcaagcaatacaaatttggagggcactacagatgatttttgagctccggttatgtgtgacacggggaatttgtgaggcaattttgtaacttctacagccttctggagcggacaatgaggatttgaagatccatattttttgttccccatgtctggttaactgcattcttttttctgatagctagttctcgccattcgcttttgtacggggtttctccttgcttcgtgtcttgagcgcacgaatagtttgatttggctgcatgacctttatagggtagttccaacaatgacttacgagctagttgtaagcattttattttattctatattataattgaagagaagtaatttttgatcaatagttagtctcaaaatcatgtggtgaaggaagagaagcaattttatacagtattatgaggtactgctaaaagttttt

SEQ ID NO: 4642 - DNA, 3043 bp, Zea Mays
gtactgtcttaaaccctcgtctttccgccgcccgtcgcttcgttcctcgcttccccccacaggcccacactctcgccgtctcgcgcgcatcacggcggcggcgaagcaccgcgtggccctccacctaagtcctagcccaagcgtaagcgatcgctctccccatcagccactatggcgccacgcccccgcaagcgggcctcgcgccccaagccccgcccgggctcccgacgtggcggcggcggaggggacgacgatcccttcttcgagtccgagcccaagcgccgccgtggaggccgtgacgaggacatcgagagcgaggacagcgacgacgatggcgtggctgcgtttgggggcggatttgatgaggatggggacgagcgcggtagggaggaggaggacgaggagacggtgggggagaagaagatgcggatgacgaaggagtggctgaagaaggtcactgaggtcgctaagagggggcaggaggatgacgacgaggacgagtcgggagggagacgggtggcggagatcctgcagagaaagcagcttgaggagagcggcaggaagcggagggagattgctgcgagggtattaccaccgggccctcaggatggctttaaggttcttgtgaagcaccggcaacctgttactgctgttgctctatccaaggatagtgataagggattttcagcatcaaaaagatggaattattatgcattgggatgttgaaactgggaaatgtgagaagtatatatggccaagtgaaaatgtgttggtttcacatcacgcaaaaccaccaatatcagctaaaagaagcaagcaagtgctggctttagctgccagttctgatggtcgttacttggcaagcggtggcttggaccgtcatatccatctatgggatgttaggtcacgggagcacatacaggcatttagcggccatcggggaccaatatcttgtcttgcttttgctccggactcttcagagctgttctctggttcttttgatcgatcaataatgcagtggaatgctgaggataggacatacatgaactgtctatatgggcatcagaatgaaatcttgacaatggatgcacttagtaaagacaggattctaactgtagcacgggaccgtacgatgcatctttggaagattccagaagagtcgcagttagtgttccgtgctcctgctgccgcatctttagagtgctgctgcttcattgatgacaaggagtttttgtctggatctgatgatggaagcattgagctttggagcataatgaggaaaaagcctatccttataataaaaaatgctcatccagtattgtgtactaaccttaattcagttgacaatgatgacgagtcacctaaagaaaatggaatgcataaaccggaaaatgtgccatccgcagcccagtcatgggttggtactgttgctgcaagaagaggttctgaccttgttgcatcaggagcaggaaatggtttagttcgtctctgggctatcaaacctgattctaagggagccgagccattattcgatttgaaactgattaattcgctgagctgtggttttgattcatggaaggccatgattgatgttcactaagagattcgctgatagcgccttcatcggggagttactttgttagtaactcaccacaaaaacacttcattgttgctgctcaccgtaacacccacaagtgctttaaattgaagatcaaggaaccatgcagctgatgatgtaactaatcaatggtggcaatgaaacgatgaactatcaaacctgcaaaagaaaaaccatagcaaatgggtaggttgttactttattaggcttttgagtccccttagacaggtttcaaagtatatatttttattcatccttcagttctgttgactagcacttttgacactccttactttctgcgagtagacatgcttgccccagagtgactatcatattttaaaagtcaaagagcactactgaaaataatcatgtgtggctcactaaacaattaataaaaaattgaaccttttcagtctgtacaacccagctgctttagaaatcagcccctacttagtgaaagaatttcataaacgctctccactatcacctctgtgatcttgtttcttctgtgcttttccatgacaatgtgagtatgtcttctttctccccttcttttccatgactgagtatttggggtatgtattctctgacataatatcttgcaatcccgtattaagcttcggccctgtttggcacaacctatgatggtgcagaatctgcttattggggctgttgggtaggatgttaaagctgtatgttgcttcatccattggaatcgggctcgggatggatttgttaattctcttgccatagcaaaatctggacgttttattgttgctggtgttggccaggagcctcgccttggaagatggggacgagttcgatcggctcaaaatggagtcgcaattcacccaatccgactaaaagatgtgaaagaggacttgtagagtagattgatgtcttgcattacagtggaacgtccatccatccagcctgcacttctgcagccacggcacaaaagaaaatttgttgaggctaactgggatacatgcaagcaatacaaatttggagggcactacagatgatttttgagctccggttatgtgtgacacggggaatttgtgaggcaattttgtaacttctacagccttctggagcggacaatgaggatttgaagatccatattttttgttccccatgtctggttaactgcattcttttttctgatagctagttctcgccattcgcttttgtacggggtttctccttgcttcgtgtcttgagcgcacgaatagtttgatttggctgcatgacctttatagggtagttccaacaatgacttacgagctagttgtaagcattttattttattctatattataattgaagagaagtaatttttgatcaatagttagtctcaaaatcatgtggtgaaggaagagaagcaattttatacagtattatgaggtactgctaaaagttttt

SEQ ID NO: 4643 - DNA, 2023 bp, Zea Mays
gtactgtcttaaaccctcgtctttccgccgcccgtcgcttcgttcctcgcttccccccacaggcccacactctcgccgtctcgcgcgcatcacggcggcggcgaagcaccgcgtggccctccacctaagtcctagcccaagcgtaagcgatcgctctccccatcagccactatggcgccacgcccccgcaagcgggcctcgcgccccaagccccgcccgggctcccgacgtggcggcggcggaggggacgacgatcccttcttcgagtccgagcccaagcgccgccgtggaggccgtgacgaggacatcgagagcgaggacagcgacgacgatggcgtggctgcgtttgggggcggatttgatgaggatggggacgagcgcggtagggaggaggaggacgaggagacggtgggggagaagaagatgcggatgacgaaggagtggctgaagaaggtcactgaggtcgctaagagggggcaggaggatgacgacgaggacgagtcgggagggagacgggtggcggagatcctgcagagaaagcagcttgaggagagcggcaggaagcggagggagattgctgcgagggtattaccaccgggccctcaggatggctttaaggttcttgtgaagcaccggcaacctgttactgctgttgctctatccaaggatagtgataagggattttcagcatcaaaaagatggaattattatgcattgggatgttgaaactgggaaatgtgagaagtatatatggccaagtgaaaatgtgttggtttcacatcacgcaaaaccaccaatatcagctaaaagaagcaagcaagtgctggctttagctgccagttctgatggtcgttacttggcaagcggtggcttggaccgtcatatccatctatgggatgttaggtcacgggagcacatacaggcatttagcggccatcggggaccaatatcttgtcttgcttttgctccggactcttcagagctgttctctggttcttttgatcgatcaataatgcagtggaatgctgaggataggacatacatgaactgtctatatgggcatcagaatgaaatcttgacaatggatgcacttagtaaagacaggattctaactgtagcacgggaccgtacgatgcatctttggaagaaaatggaatgcataaaccggaaaatgtgccatccgcagcccagtcatgggttggtactgttgctgcaagaagaggttctgaccttgttgcatcaggagcaggaaatggtttagttcgtctctgggctatcaaacctgattctaagggagccgagccattattcgatttgaaactggatggatttgttaattctcttgccatagcaaaatctggacgttttattgttgctggtgttggccaggagcctcgccttggaagatggggacgagttcgatcggctcaaaatggagtcgcaattcacccaatccgactaaaagatgtgaaagaggacttgtagagtagattgatgtcttgcattacagtggaacgtccatccatccagcctgcacttctgcagccacggcacaaaagaaaatttgttgaggctaactgggatacatgcaagcaatacaaatttggagggcactacagatgatttttgagctccggttatgtgtgacacggggaatttgtgaggcaattttgtaacttctacagccttctggagcggacaatgaggatttgaagatccatattttttgttccccatgtctggttaactgcattcttttttctgatagctagttctcgccattcgcttttgtacggggtttctccttgcttcgtgtcttgagcgcacgaatagtttgatttggctgcatgacctttatagggtagttccaacaatgacttacgagctagttgtaagcattttattttattctatattataattgaagagaagtaatttttgatcaatagttagtctcaaaatcatgtggtgaaggaagagaagcaattttatacagtattatgaggtactgctaaaagttttt

SEQ ID NO: 4644 - DNA, 1698 bp, Zea Mays
agacagttcctacacatcccctgagaagtgaaaaactagggtattaccaccgggccctcaggatggctttaaggttcttgtgaagcaccggcaacctgttactgctgttgctctatccaaggatagtgataagggattttcagcatcaaaaagatggaattattatgcattgggatgttgaaactgggaaatgtgagaagtatatatggccaagtgaaaatgtgttggtttcacatcacgcaaaaccaccaatatcagctaaaagaagcaagcaagtgctggctttagctgccagttctgatggtcgttacttggcaagcggtggcttggaccgtcatatccatctatgggatgttaggtcacgggagcacatacaggcatttagcggccatcggggaccaatatcttgtcttgcttttgctccggactcttcagagctgttctctggttcttttgatcgatcaataatgcagtggaatgctgaggataggacatacatgaactgtctatatgggcatcagaatgaaatcttgacaatggatgcacttagtaaagacaggattctaactgtagcacgggaccgtacgatgcatctttggaagattccagaagagtcgcagttagtgttccgtgctcctgctgccgcatctttagagtgctgctgcttcattgatgacaaggagtttttgtctggatctgatgatggaagcattgagctttggagcataatgaggaaaaagcctatccttataataaaaaatgctcatccagtattgtgtactaaccttaattcagttgacaatgatgacgagtcacctaaagaaaatggaatgcataaaccggaaaatgtgccatccgcagcccagtcatgggttggtactgttgctgcaagaagaggttctgaccttgttgcatcaggagcaggaaatggtttagttcgtctctgggctatcaaacctgattctaagggagccgagccattattcgatttgaaactggatggatttgttaattctcttgccatagcaaaatctggacgttttattgttgctggtgttggccaggagcctcgccttggaagatggggacgagttcgatcggctcaaaatggagtcgcaattcacccaatccgactaaaagatgtgaaagaggacttgtagagtagattgatgtcttgcattacagtggaacgtccatccatccagcctgcacttctgcagccacggcacaaaagaaaatttgttgaggctaactgggatacatgcaagcaatacaaatttggagggcactacagatgatttttgagctccggttatgtgtgacacggggaatttgtgaggcaattttgtaacttctacagccttctggagcggacaatgaggatttgaagatccatattttttgttccccatgtctggttaactgcattcttttttctgatagctagttctcgccattcgcttttgtacggggtttctccttgcttcgtgtcttgagcgcacgaatagtttgatttggctgcatgacctttatagggtagttccaacaatgacttacgagctagttgtaagcattttattttattctatattataattgaagagaagtaatttttgatcaatagttagtctcaaaatcatgtggtgaaggaagagaagcaattttatacagtattatgaggtactgctaaaagttttt

SEQ ID NO: 4645 - DNA, 2200 bp, Zea Mays
tttggatcaaacagctgtgctgcaactttgtatgcttatttagatctgtgagagatcactgacacaatcgactggaggtccatcaggacccaacactccaaattttgtaagagccgaagtgcttcctagtggctatctaattcgaccctgtgagggaggtggctccatgattcacattgtggatcatgttgatttagatgcttggagtgtgcctgaggtccttagaccactttatgaatccccgaagattcttgcacagaaaacaactattgctgcactgcgtcacattaggcaaattgcgcatgaatctagtggggaaatgccctatggagggggccgacagccagcagttttgagaacatttagccagaggcttagcaggggtttcaatgatgctgtcaatgggtttccagatgacggttggtcactgatgagcagtgacggtgctgaggatgttactattgctatcaactcttctccaaacaaacttattggtcctcatgtcaactcttcccagctgtttactgcgatcggaggtggcatcctgtgtgctaaggcatcaatgctgcttcagaatgtgccacctgccctactagtacgatttctgagggagcatcgctccgaatgggctgatcctggtgttgatgcttattctgccgctgctcttagggctagtccatatgcagttcctggcttgcgtgctagtgggtttatgggcagccaggttattctgccgcttgcacataccttagagcacgaagagttcttggaggttattaggcttgagggacacagcctctgccatgacgaagttgttctgtcacgagatatgtatcttctgcagttgtgcagtggtgtggatgaaaatgcagctggtgcatgtgcacagcttgtgtttgcacccatcgatgaatcttttgccgacgatgcgccactgctaccctcaggcttccgtgtcattccactggatgcaaagacggatccaccatcaggcacacgcacacttgacctcgcatctaccctcgaggttggatctggtgggacaacgcgtgcttcgagtgacgcctccagcacctgcaacacaagatcagtgctgaccattgctttccagttctcatatgagaatcacctacgagagagcgtcgcagccatggccaggcaatacgtcaggactgtggtggcgtcggtgcagagggtagccatggcaatagctccttcgcgcattggtggacagcttgaaatgaagcaaactccaggatctcctgaggcacacacgctggcaaggtggatcggcaggagctacaggttccacactggagccgaactcctccgcacggacacccaatgcacggatgcttccttgaaagcgctgtggcaacactcggactcgatcatgtgctgttccctgaaggctgctcccgtgttcacctttgccaaccaagccggcctggacatgctggagacgacgctgattgcgctccaggacatctcccttgagaagatccttgatgacgatggcaggaaggcgctctgcaccgagtaccctaagattatgcaacagggcttcgcgtacctccccggtggcgtgtgtgtgtcgagcatggggcggccggtgtcgtacgagcaggcggtggcgtggaaggtcctgagcgacgacgacaccccgcactgccttgccttcatgttcgtgaactggtccttcgtgtgagaacccggtcccctagtagtcagtagagccaagtcgcctagcgtttgcggctctgttgtttgaactctgtaccccatgtaccgtcgattttgcctgtgtccaggcaacctatgaaacacacctttgtagttgttcatcatccccgtggaacaaacagctttgtactagttgttcgtcttcgcttgcttgctatcttatgatgggtcctggtttgctacagctcctgaaaaattgattggaccattgcgtctgtgctgctgaatttgttgcttgatgatctggggggtcttgggacgcgtcaaatgcctagacggcaagcgtgatacatgatgtggccgctcgccgacctcggaagcggacgtggggtcctgctgtagtggatggctgccgctgtggtggttggactgatttggttgggtgaggtgcgtggtcttctgttctggtagaggccacctgagctggcgatggacaggaaggagaggtggagaagag

SEQ ID NO: 4646 - DNA, 879 bp, Zea Mays
cccactcttcacttcgcccaatttctctcccaccctcctgctcctcctcccgcggtcccgccatttcgtcccccgctcaccaactcaaaccccctccgctctcaaaccctaaccctagccctagcccgctcccggcggaccgacgatgccgaaggcaggcggcggggcggcggacgaagaggagttccgcgccgaggtggaggagcgcctcatcaacgaggagtacaagatctggaagaagaacacacccttcctctacgacctcgtcatcacccacgcgctcgaatggccctcccttaccgtgcagtggctccccgaccgcaccgagccgccggggaaggaccactccgtccagaagatgatccttggcacgcacacctctgacaacgagcccaactacctcatgctcgcgcaggtccagctgcccctcgacgacgccgaggccgacgcccgccactacgacgatgaccacgccgacatcggtgggtttggcgccgcctccggcaaggtgcaaattgttcagcagataaatcatgatggagaggtcaatcgagctcgctatatgccccaaaattcatttataattgctattaagacagttagcgcagaagtatatgtttttgactatagcaagcacccatctaagcctccactagatggtgcatgcaaccggtggtttacggctgaagggacataattctgaaggatatggcttatcatggagtatttttaaagagggacatttgttaagtgggtctgacgatgctcaaatttgcttgtgggacattaaagcaaatagtagaaacaaaagtcttgacgccttgcagatttttaagaattctgtaccatctctttgaaggtgcataatagtcatacttg

SEQ ID NO: 4647 - DNA, 1576 bp, Zea Mays
ctctcccaccctcctgctcctcctcccgcggtcccgccatttcgtcccccgctcaccaactcaaaccccctccgctctcaaaccctaaccctagccctagcccgctcccggcggaccgacgatgccgaaggcaggcggcggggcggcggacgaagaggagttccgcgccgaggtggaggagcgcctcatcaacgaggagtacaagatctggaagaagaacacacccttcctctacgacctcgtcatcacccacgcgctcgaatggccctcccttaccgtgcagtggctccccgaccgcaccgagccgccggggaaggaccactccgtccagaagatgatccttggcacgcacacctctgacaacgagcccaactacctcatgctcgcgcaggtccagctgcccctcgacgacgccgaggccgacgcccgccactacgacgatgaccacgccgacatcggtgggtttggcgccgcctccggcaaggtgcaaattgttcagcagataaatcatgatggagaggtcaatcgagctcgctatatgccccaaaattcatttataattgctattaagacagttagcgcagaagtatatgtttttgactatagcaagcacccatctaagcctccactagatggtgcatgcaaccggtggtttacggctgaagggacataattctgaaggatatggcttatcatggagtatttttaaagagggacatttgttaagtgggtctgacgatgctcaaatttgcttgtgggacattaaagcaaatagtagaaacaaaagtcttgacgccttgcagatttttaagcatcatgatggtgtcgttgaagatgttgcttggcacttgaggcatgagtacttatttgggtcagttggtgacgattatcatcttttgatttgggacctgcggtctcccgcccctactaaacctgttcagtcagtggtggcgcaccagggtgagagaggaagtttttcaagttggatggagtccaaagaatgaaactgtacttgcatcctgttgtctgggcagaaggctcatggtctgggatctaagcaggatcgaccaagaacaaacaccagaggatgctgaagatggtcctccagagctcatgttcatccatggaggccataccagcaagatctctgatttctcctggaacccctgcgaggactgggtggttgctagcgtcgctgaggacaacatcctccagatatggcagatggctgagaacatctaccatgacgaagatgatctgccaattagcgatgagccggcaaaaacttcttgaagcaacacatcacaaaaggaatcttaactcctatcgactgttggtgctcctagatcggaaccctgctcgccggagaatcttaaccgagtgagagttggctgtaggttgcttccgtggtcgtaactttatgcttgacgggttggtcgtttcttcgaccgtctgtatgtgtattcgtcgaacctttagcattatacatatgctgattgactagatctgttcgtcgcagttgtgttttgtagtattgctttatatctagcaggatcatgctcgtgatgtgatttgt

SEQ ID NO: 4648 - DNA, 2334 bp, Zea Mays
atggaatgccaggaaaagaacaatatatgcaatgagcacgctagtaaggtagcacatgtcaggagaagaagagcgagcaaagaaggatgcttgaattctcaagccactgtaaattggagaccaaatacttcacacaaaaataagataggacatagaaagatagacactgatactcattctactcatcaaataagcgttgtcagatcacggtgctacacacactggttcagtgaatctgcaggtgctgctcatatggaaacatacactactgatgacgctcttacgctcatggggtttggaaagttccaagcacttgtccttgcatatgcaggaatgggctgggttgcagaagccatggaggtcatgctattgtcattccttggaccagtggtgcgggaagagtggaatgtctctccccaagacgagagtctgctatccagtgttgtgtttgctggcatgctaatcggagcttgtgcttggggctttatttccgacagatacggaagaaagtaaggatctgctccagcaaactctttatgtttcaatttacaggccttggcttcttaaggcaggcaggaataatttcaagtcctttaggattcacaggaaactgatttcatttctcactagtctgaagatattggatctaatcacacctacgtccaaataaccaatacagttttgacagtggtcgtggtactggtattagttttactatgtgacctgtggttggaatcagttcactgagtcaataaaccaatgagtcatttcagttagcgacctcatgtagtgaatcagcacggtaaaaggcaagcaatttgttcttctctttcgtctagtttgcacctctctcttttatcttccctcttgctacctgtaaaataataaaaccagagtgggatgcctcataaacggccagatttgcataaacaatttgataacccccagcactgctaaatagtgattttgccttcacaaagtcaggacgattatggttttcagtatagggtatagtttgtactagttgtcgttttagctcttttttatgtctatattcaaatacatgaagatgaacctagacacatatataaaacacatacatcaagtgttgtatgaacctactaattaattaaaacgaattttaatctgggacagagggagcattggttataccctattttttactatgattcttctctatgtttgatttgtgccaaacatacatgaaataaaccttgtattttttgtcaggactgttttattgctttcgactctgcttactagtggattgggtcttctaagtgctctatctattaactacttgtgcttgctggttcttcggttttttgtcggcataggagtgggcagtgggcatgtattttcatcttggttcttggagttcgttcctgcaggaaatcgtggcacttggatggttattttttcctttttttggactattggcacagtcttggaggcttcacttgcatgggattttgttcaagcaggcctctgaaaccggaattcttttttggaatgctccttgtcatgagtaacattgatttttttctgcaggctgtactatcagcattgagttggaggtggttgctggcattgtcttcccttccatgcttcctcttgcttcttttcttcagaatcacacctgagtcaccacgctatctttgcgcacaaaatagaatgactgatgcaaggtttgtcctggagagaatggccattgcaaaccaagcagctcttcctatgggagttctcacataccaccaagaaacaaaaactgaatgcattactcatgtttctgaggatgaacatcttattccagtcagagagaaggaacatacagataggaatgctattagttccaaatctggtgctgttgctgtattgcacaagctattatcacataacttgctcaaatcaactctacttctttggtttgtttactatgccagttccttcgcttattatgggataacattgctgacatcacaactaagtgatgtgaatagaagctgtaaatctgatctggtctttgaagtgcaccaaaataatggcaatctttataaagatacttttatcactagtttagcagagatcccaggcttgattttatccgctttgcttgttgatcggtttggccggaaagctactatgtcgtgcctgatgtttgcatgttgtgctttccttgggccactcgtacttcatcagaatgagttgctgacaactactcttttattcggagctcgtgcttgtggcaccggtgccactacaactttatgtctatatgcccccgagctcacagagactcctaccaaggctcgc

SEQ ID NO: 4649 - DNA, 3177 bp, Zea Mays
atggaatgccaggaaaagaacaatatatgcaatgagcacgctagtaaggtagcacatgtcaggagaagaagagcgagcaaagaaggatgcttgaattctcaagccactgtaaattggagaccaaatacttcacacaaaaataagataggacatagaaagatagacactgatactcattctactcatcaaataagcgttgtcagatcacggtgctacacacactggttcagtgaatctgcaggtgctgctcatatggaaacatacactactgatgacgctcttacgctcatggggtttggaaagttccaagcacttgtccttgcatatgcaggaatgggctgggttgcagaagccatggaggtcatgctattgtcattccttggaccagtggtgcgggaagagtggaatgtctctccccaagacgagagtctgctatccagtgttgtgtttgctggcatgctaatcggagcttgtgcttggggctttatttccgacagatacggaagaaagtaaggatctgctccagcaaactctttatgtttcaatttacaggccttggcttcttaaggcaggcaggaataatttcaagtcctttaggattcacaggaaactgatttcatttctcactagtctgaagatattggatctaatcacacctacgtccaaataaccaatacagttttgacagtggtcgtggtactggtattagttttactatgtgacctgtggttggaatcagttcactgagtcaataaaccaatgagtcatttcagttagcgacctcatgtagtgaatcagcacggtaaaaggcaagcaatttgttcttctctttcgtctagtttgcacctctctcttttatcttccctcttgctacctgtaaaataataaaaccagagtgggatgcctcataaacggccagatttgcataaacaatttgataacccccagcactgctaaatagtgattttgccttcacaaagtcaggacgattatggttttcagtatagggtatagtttgtactagttgtcgttttagctcttttttatgtctatattcaaatacatgaagatgaacctagacacatatataaaacacatacatcaagtgttgtatgaacctactaattaattaaaacgaattttaatctgggacagagggagcattggttataccctattttttactatgattcttctctatgtttgatttgtgccaaacatacatgaaataaaccttgtattttttgtcaggactgttttattgctttcgactctgcttactagtggattgggtcttctaagtgctctatctattaactacttgtgcttgctggttcttcggttttttgtcggcataggagtgggcagtgggcatgtattttcatcttggttcttggagttcgttcctgcaggaaatcgtggcacttggatggttattttttcctttttttggactattggcacagtcttggaggcttcacttgcatgggattttgttcaagcaggcctctgaaaccggaattcttttttggaatgctccttgtcatgagtaacattgatttttttctgcaggtgtagtatatcatgactgttcacaaccatatttatcactttatcagttgcattatccatttgcagtatactgtcattatttctgtagcaatatttaagatatctcaatgtgtgatgcctgcctgatgatcatacttttacctacccatctgaactctgacttttctgcatctaataaaaatgtctggaattcagtaagttatgtttggatttggtacacatctgacttgtacatgtacacgttttcagataaaaaatgctcatttttatttgcattgcaggctgtactatcagcattgagttggaggtggttgctggcattgtcttcccttccatgcttcctcttgcttcttttcttcagaatcacacctgagtcaccacgctatctttgcgcacaaaatagaatgactgatgcaaggtttgtcctggagagaatggccattgcaaaccaagcagctcttcctatgggagttctcacataccaccaagaaacaaaaactgaatgcattactcatgtttctgaggatgaacatcttattccagtcagagagaaggaacatacagataggaatgctattagttccaaatctggtgctgttgctgtattgcacaagctattatcacataacttgctcaaatcaactctacttctttggtttgtttactatgccagttccttcgcttattatgggataacattgctgacatcacaactaagtgatgtgaatagaagctgtaaatctgatctggtctttgaagtgcaccaaaataatggcaatctttataaagatacttttatcactagtttagcagagatcccaggcttgattttatccgctttgcttgttgatcggtttggccggaaagctactatgtcgtgcctgatgtttgcatgttgtgctttccttgggccactcgtacttcatcagaatgagttgctgacaactactcttttattcggagctcgtgcttgtggcaccggtgccactacaactttatgtctatatgcccccgaggtgtatccgacatatgttcgctcaacaggggtcgggatcgcaaccgccatcggtaagatcggcggggttatttgccccctcgtcgccgtgggcatgctgcggagctgccatcagatggaagcggtgctggtgtttgagctggtgctgttcctcgctggggtctcctgcatcctcttccctgtggagaccaagggccgagaaatggactgagcacgcacggtggtggtagctcagcacatttgggcatccagatgggcttgtggttcatcttgattctgtataaacacaactctactacatccgcgacaagcttagcggatatgcaaaggggtgtaaacaggagctatagtaattacgagaaagaactggcaatgagcaatatttgtaacaggattattgttatagaacttcctcatcatcagtcaggaggtaaataaatatgtgaagttaaatagtaaccatgtggtggacagtgattataaacgaggatattctcgtggtgctggatatgcccaacgtcaattcgttgcgggcaacacacaacctaacgcgtgcctccaaacagctatcaattaattatcattacttg

SEQ ID NO: 4650 - DNA, 1833 bp, Zea Mays
atggaatgccaggaaaagaacaatatatgcaatgagcacgctagtaaggtagcacatgtcaggagaagaagagcgagcaaagaaggatgcttgaattctcaagccactgtaaattggagaccaaatacttcacacaaaaataagataggacatagaaagatagacactgatactcattctactcatcaaataagcgttgtcagatcacggtgctacacacactggttcagtgaatctgcaggtgctgctcatatggaaacatacactactgatgacgctcttacgctcatggggtttggaaagttccaagcacttgtccttgcatatgcaggaatgggctgggttgcagaagccatggaggtcatgctattgtcattccttggaccagtggtgcgggaagagtggaatgtctctccccaagacgagagtctgctatccagtgttgtgtttgctggcatgctaatcggagcttgtgcttggggctttatttccgacagatacggaagaaagctgtactatcagcattgagttggaggtggttgctggcattgtcttcccttccatgcttcctcttgcttcttttcttcagaatcacacctgagtcaccacgctatctttgcgcacaaaatagaatgactgatgcaaggtttgtcctggagagaatggccattgcaaaccaagcagctcttcctatgggagttctcacataccaccaagaaacaaaaactgaatgcattactcatgtttctgaggatgaacatcttattccagtcagagagaaggaacatacagataggaatgctattagttccaaatctggtgctgttgctgtattgcacaagctattatcacataacttgctcaaatcaactctacttctttggtttgtttactatgccagttccttcgcttattatgggataacattgctgacatcacaactaagtgatgtgaatagaagctgtaaatctgatctggtctttgaagtgcaccaaaataatggcaatctttataaagatacttttatcactagtttagcagagatcccaggcttgattttatccgctttgcttgttgatcggtttggccggaaagctactatgtcgtgcctgatgtttgcatgttgtgctttccttgggccactcgtacttcatcagaatgagttgctgacaactactcttttattcggagctcgtgcttgtggcaccggtgccactacaactttatgtctatatgcccccgaggtgtatccgacatatgttcgctcaacaggggtcgggatcgcaaccgccatcggtaagatcggcggggttatttgccccctcgtcgccgtgggcatgctgcggagctgccatcagatggaagcggtgctggtgtttgagctggtgctgttcctcgctggggtctcctgcatcctcttccctgtggagaccaagggccgagaaatggactgagcacgcacggtggtggtagctcagcacatttgggcatccagatgggcttgtggttcatcttgattctgtataaacacaactctactacatccgcgacaagcttagcggatatgcaaaggggtgtaaacaggagctatagtaattacgagaaagaactggcaatgagcaatatttgtaacaggattattgttatagaacttcctcatcatcagtcaggaggtaaataaatatgtgaagttaaatagtaaccatgtggtggacagtgattataaacgaggatattctcgtggtgctggatatgcccaacgtcaattcgttgcgggcaacacacaacctaacgcgtgcctccaaacagctatcaattaattatcattacttg

SEQ ID NO: 4651 - DNA, 2746 bp, Zea Mays
atggaatgccaggaaaagaacaatatatgcaatgagcacgctagtaaggtagcacatgtcaggagaagaagagcgagcaaagaaggatgcttgaattctcaagccactgtaaattggagaccaaatacttcacacaaaaataagataggacatagaaagatagacactgatactcattctactcatcaaataagcgttgtcagatcacggtgctacacacactggttcagtgaatctgcaggtgctgctcatatggaaacatacactactgatgacgctcttacgctcatggggtttggaaagttccaagcacttgtccttgcatatgcaggaatgggctgggttgcagaagccatggaggtcatgctattgtcattccttggaccagtggtgcgggaagagtggaatgtctctccccaagacgagagtctgctatccagtgttgtgtttgctggcatgctaatcggagcttgtgcttggggctttatttccgacagatacggaagaaagtaaggatctgctccagcaaactctttatgtttcaatttacaggccttggcttcttaaggcaggcaggaataatttcaagtcctttaggattcacaggaaactgatttcatttctcactagtctgaagatattggatctaatcacacctacgtccaaataaccaatacagttttgacagtggtcgtggtactggtattagttttactatgtgacctgtggttggaatcagttcactgagtcaataaaccaatgagtcatttcagttagcgacctcatgtagtgaatcagcacggtaaaaggcaagcaatttgttcttctctttcgtctagtttgcacctctctcttttatcttccctcttgctacctgtaaaataataaaaccagagtgggatgcctcataaacggccagatttgcataaacaatttgataacccccagcactgctaaatagtgattttgccttcacaaagtcaggacgattatggttttcagtatagggtatagtttgtactagttgtcgttttagctcttttttatgtctatattcaaatacatgaagatgaacctagacacatatataaaacacatacatcaagtgttgtatgaacctactaattaattaaaacgaattttaatctgggacagagggagcattggttataccctattttttactatgattcttctctatgtttgatttgtgccaaacatacatgaaataaaccttgtattttttgtcaggactgttttattgctttcgactctgcttactagtggattgggtcttctaagtgctctatctattaactacttgtgcttgctggttcttcggttttttgtcggcataggagtgggcagtgggcatgtattttcatcttggttcttggagttcgttcctgcaggaaatcgtggcacttggatggttattttttcctttttttggactattggcacagtcttggaggcttcacttgcatgggattttgttcaagcaggcctctgaaaccggaattcttttttggaatgctccttgtcatgagtaacattgatttttttctgcaggctgtactatcagcattgagttggaggtggttgctggcattgtcttcccttccatgcttcctcttgcttcttttcttcagaatcacacctgagtcaccacgctatctttgcgcacaaaatagaatgactgatgcaaggtttgtcctggagagaatggccattgcaaaccaagcagctcttcctatgggagttctcacataccaccaagaaacaaaaactgaatgcattactcatgtttctgaggatgaacatcttattccagtcagagagaaggaacatacagataggaatgctattagttccaaatctggtgctgttgctgtattgcacaagctattatcacataacttgctcaaatcaactctacttctttggtttgtttactatgccagttccttcgcttattatgggataacattgctgacatcacaactaagtgatgtgaatagaagctgtaaatctgatctggtctttgaagtgcaccaaaataatggcaatctttataaagatacttttatcactagtttagcagctcgtgcttgtggcaccggtgccactacaactttatgtctatatgcccccgaggtgtatccgacatatgttcgctcaacaggggtcgggatcgcaaccgccatcggtaagatcggcggggttatttgccccctcgtcgccgtgggcatgctgcggagctgccatcagatggaagcggtgctggtgtttgagctggtgctgttcctcgctggggtctcctgcatcctcttccctgtggagaccaagggccgagaaatggactgagcacgcacggtggtggtagctcagcacatttgggcatccagatgggcttgtggttcatcttgattctgtataaacacaactctactacatccgcgacaagcttagcggatatgcaaaggggtgtaaacaggagctatagtaattacgagaaagaactggcaatgagcaatatttgtaacaggattattgttatagaacttcctcatcatcagtcaggaggtaaataaatatgtgaagttaaatagtaaccatgtggtggacagtgattataaacgaggatattctcgtggtgctggatatgcccaacgtcaattcgttgcgggcaacacacaacctaacgcgtgcctccaaacagctatcaattaattatcattacttg

SEQ ID NO: 4652 - DNA, 1683 bp, Zea Mays
atggaatgccaggaaaagaacaatatatgcaatgagcacgctagtaaggtagcacatgtcaggagaagaagagcgagcaaagaaggatgcttgaattctcaagccactgtaaattggagaccaaatacttcacacaaaaataagataggacatagaaagatagacactgatactcattctactcatcaaataagcgttgtcagatcacggtgctacacacactggttcagtgaatctgcaggtgctgctcatatggaaacatacactactgatgacgctcttacgctcatggggtttggaaagttccaagcacttgtccttgcatatgcaggaatgggctgggttgcagaagccatggaggtcatgctattgtcattccttggaccagtggtgcgggaagagtggaatgtctctccccaagacgagagtctgctatccagtgttgtgtttgctggcatgctaatcggagcttgtgcttggggctttatttccgacagatacggaagaaagctgtactatcagcattgagttggaggtggttgctggcattgtcttcccttccatgcttcctcttgcttcttttcttcagaatcacacctgagtcaccacgctatctttgcgcacaaaatagaatgactgatgcaaggtttgtcctggagagaatggccattgcaaaccaagcagctcttcctatgggagttctcacataccaccaagaaacaaaaactgaatgcattactcatgtttctgaggatgaacatcttattccagtcagagagaaggaacatacagataggaatgctattagttccaaatctggtgctgttgctgtattgcacaagctattatcacataacttgctcaaatcaactctacttctttggtttgtttactatgccagttccttcgcttattatgggataacattgctgacatcacaactaagtgatgtgaatagaagctgtaaatctgatctggtctttgaagtgcaccaaaataatggcaatctttataaagatacttttatcactagtttagcagctcgtgcttgtggcaccggtgccactacaactttatgtctatatgcccccgaggtgtatccgacatatgttcgctcaacaggggtcgggatcgcaaccgccatcggtaagatcggcggggttatttgccccctcgtcgccgtgggcatgctgcggagctgccatcagatggaagcggtgctggtgtttgagctggtgctgttcctcgctggggtctcctgcatcctcttccctgtggagaccaagggccgagaaatggactgagcacgcacggtggtggtagctcagcacatttgggcatccagatgggcttgtggttcatcttgattctgtataaacacaactctactacatccgcgacaagcttagcggatatgcaaaggggtgtaaacaggagctatagtaattacgagaaagaactggcaatgagcaatatttgtaacaggattattgttatagaacttcctcatcatcagtcaggaggtaaataaatatgtgaagttaaatagtaaccatgtggtggacagtgattataaacgaggatattctcgtggtgctggatatgcccaacgtcaattcgttgcgggcaacacacaacctaacgcgtgcctccaaacagctatcaattaattatcattacttg

SEQ ID NO: 4653 - DNA, 1619 bp, Zea Mays
atggaatgccaggaaaagaacaatatatgcaatgagcacgctagtaaggtagcacatgtcaggagaagaagagcgagcaaagaaggatgcttgaattctcaagccactgtaaattggagaccaaatacttcacacaaaaataagataggacatagaaagatagacactgatactcattctactcatcaaataagcgttgtcagatcacggtgctacacacactggttcagtgaatctgcaggtgctgctcatatggaaacatacactactgatgacgctcttacgctcatggggtttggaaagttccaagcacttgtccttgcatatgcaggaatgggctgggttgcagaagccatggaggtcatgctattgtcattccttggaccagtggtgcgggaagagtggaatgtctctccccaagacgagagtctgctatccagtgttgtgtttgctggcatgctaatcggagcttgtgcttggggctttatttccgacagatacggaagaaagactgttttattgctttcgactctgcttactagtggattgggtcttctaagtgctctatctattaactacttgtgcttgctggttcttcggttttttgtcggcataggagtgggcagtgggcatgtattttcatcttggttcttggagttcgttcctgcaggaaatcgtggcacttggatggctgtactatcagcattgagttggaggtggttgctggcattgtcttcccttccatgcttcctcttgcttcttttcttcagaatcacacctgagtcaccacgctatctttgcgcacaaaatagaatgactgatgcaagagatcccaggcttgattttatccgctttgcttgttgatcggtttggccggaaagctactatgtcgtgcctgatgtttgcatgttgtgctttccttgggccactcgtacttcatcagaatgagttgctgacaactactcttttattcggagctcgtgcttgtggcaccggtgccactacaactttatgtctatatgcccccgaggtgtatccgacatatgttcgctcaacaggggtcgggatcgcaaccgccatcggtaagatcggcggggttatttgccccctcgtcgccgtgggcatgctgcggagctgccatcagatggaagcggtgctggtgtttgagctggtgctgttcctcgctggggtctcctgcatcctcttccctgtggagaccaagggccgagaaatggactgagcacgcacggtggtggtagctcagcacatttgggcatccagatgggcttgtggttcatcttgattctgtataaacacaactctactacatccgcgacaagcttagcggatatgcaaaggggtgtaaacaggagctatagtaattacgagaaagaactggcaatgagcaatatttgtaacaggattattgttatagaacttcctcatcatcagtcaggaggtaaataaatatgtgaagttaaatagtaaccatgtggtggacagtgattataaacgaggatattctcgtggtgctggatatgcccaacgtcaattcgttgcgggcaacacacaacctaacgcgtgcctccaaacagctatcaattaattatcattacttg

SEQ ID NO: 4654 - DNA, 1964 bp, Zea Mays
atggaatgccaggaaaagaacaatatatgcaatgagcacgctagtaaggtagcacatgtcaggagaagaagagcgagcaaagaaggatgcttgaattctcaagccactgtaaattggagaccaaatacttcacacaaaaataagataggacatagaaagatagacactgatactcattctactcatcaaataagcgttgtcagatcacggtgctacacacactggttcagtgaatctgcaggtgctgctcatatggaaacatacactactgatgacgctcttacgctcatggggtttggaaagttccaagcacttgtccttgcatatgcaggaatgggctgggttgcagaagccatggaggtcatgctattgtcattccttggaccagtggtgcgggaagagtggaatgtctctccccaagacgagagtctgctatccagtgttgtgtttgctggcatgctaatcggagcttgtgcttggggctttatttccgacagatacggaagaaagagtgggcagtgggcatgtattttcatcttggttcttggagttcgttcctgcaggaaatcgtggcacttggatggttattttttcctttttttggactattggcacagtcttggaggcttcacttgcatgggctgtactatcagcattgagttggaggtggttgctggcattgtcttcccttccatgcttcctcttgcttcttttcttcagaatcacacctgagtcaccacgctatctttgcgcacaaaatagaatgactgatgcaaggtttgtcctggagagaatggccattgcaaaccaagcagctcttcctatgggagttctcacataccaccaagaaacaaaaactgaatgcattactcatgtttctgaggatgaacatcttattccagtcagagagaaggaacatacagataggaatgctattagttccaaatctggtgctgttgctgtattgcacaagctattatcacataacttgctcaaatcaactctacttctttggtttgtttactatgccagttccttcgcttattatgggataacattgctgacatcacaactaagtgatgtgaatagaagctgtaaatctgatctggtctttgaagtgcaccaaaataatggcaatctttataaagatacttttatcactagtttagcagagatcccaggcttgattttatccgctttgcttgttgatcggtttggccggaaagctactatgtcgtgcctgatgtttgcatgttgtgctttccttgggccactcgtacttcatcagaatgagttgctgacaactactcttttattcggagctcgtgcttgtggcaccggtgccactacaactttatgtctatatgcccccgaggtgtatccgacatatgttcgctcaacaggggtcgggatcgcaaccgccatcggtaagatcggcggggttatttgccccctcgtcgccgtgggcatgctgcggagctgccatcagatggaagcggtgctggtgtttgagctggtgctgttcctcgctggggtctcctgcatcctcttccctgtggagaccaagggccgagaaatggactgagcacgcacggtggtggtagctcagcacatttgggcatccagatgggcttgtggttcatcttgattctgtataaacacaactctactacatccgcgacaagcttagcggatatgcaaaggggtgtaaacaggagctatagtaattacgagaaagaactggcaatgagcaatatttgtaacaggattattgttatagaacttcctcatcatcagtcaggaggtaaataaatatgtgaagttaaatagtaaccatgtggtggacagtgattataaacgaggatattctcgtggtgctggatatgcccaacgtcaattcgttgcgggcaacacacaacctaacgcgtgcctccaaacagctatcaattaattatcattacttg

SEQ ID NO: 4655 - DNA, 1814 bp, Zea Mays
atggaatgccaggaaaagaacaatatatgcaatgagcacgctagtaaggtagcacatgtcaggagaagaagagcgagcaaagaaggatgcttgaattctcaagccactgtaaattggagaccaaatacttcacacaaaaataagataggacatagaaagatagacactgatactcattctactcatcaaataagcgttgtcagatcacggtgctacacacactggttcagtgaatctgcaggtgctgctcatatggaaacatacactactgatgacgctcttacgctcatggggtttggaaagttccaagcacttgtccttgcatatgcaggaatgggctgggttgcagaagccatggaggtcatgctattgtcattccttggaccagtggtgcgggaagagtggaatgtctctccccaagacgagagtctgctatccagtgttgtgtttgctggcatgctaatcggagcttgtgcttggggctttatttccgacagatacggaagaaagagtgggcagtgggcatgtattttcatcttggttcttggagttcgttcctgcaggaaatcgtggcacttggatggttattttttcctttttttggactattggcacagtcttggaggcttcacttgcatgggctgtactatcagcattgagttggaggtggttgctggcattgtcttcccttccatgcttcctcttgcttcttttcttcagaatcacacctgagtcaccacgctatctttgcgcacaaaatagaatgactgatgcaaggtttgtcctggagagaatggccattgcaaaccaagcagctcttcctatgggagttctcacataccaccaagaaacaaaaactgaatgcattactcatgtttctgaggatgaacatcttattccagtcagagagaaggaacatacagataggaatgctattagttccaaatctggtgctgttgctgtattgcacaagctattatcacataacttgctcaaatcaactctacttctttggtttgtttactatgccagttccttcgcttattatgggataacattgctgacatcacaactaagtgatgtgaatagaagctgtaaatctgatctggtctttgaagtgcaccaaaataatggcaatctttataaagatacttttatcactagtttagcagctcgtgcttgtggcaccggtgccactacaactttatgtctatatgcccccgaggtgtatccgacatatgttcgctcaacaggggtcgggatcgcaaccgccatcggtaagatcggcggggttatttgccccctcgtcgccgtgggcatgctgcggagctgccatcagatggaagcggtgctggtgtttgagctggtgctgttcctcgctggggtctcctgcatcctcttccctgtggagaccaagggccgagaaatggactgagcacgcacggtggtggtagctcagcacatttgggcatccagatgggcttgtggttcatcttgattctgtataaacacaactctactacatccgcgacaagcttagcggatatgcaaaggggtgtaaacaggagctatagtaattacgagaaagaactggcaatgagcaatatttgtaacaggattattgttatagaacttcctcatcatcagtcaggaggtaaataaatatgtgaagttaaatagtaaccatgtggtggacagtgattataaacgaggatattctcgtggtgctggatatgcccaacgtcaattcgttgcgggcaacacacaacctaacgcgtgcctccaaacagctatcaattaattatcattacttg

SEQ ID NO: 4656 - DNA, 2071 bp, Zea Mays
atggaatgccaggaaaagaacaatatatgcaatgagcacgctagtaaggtagcacatgtcaggagaagaagagcgagcaaagaaggatgcttgaattctcaagccactgtaaattggagaccaaatacttcacacaaaaataagataggacatagaaagatagacactgatactcattctactcatcaaataagcgttgtcagatcacggtgctacacacactggttcagtgaatctgcaggtgctgctcatatggaaacatacactactgatgacgctcttacgctcatggggtttggaaagttccaagcacttgtccttgcatatgcaggaatgggctgggttgcagaagccatggaggtcatgctattgtcattccttggaccagtggtgcgggaagagtggaatgtctctccccaagacgagagtctgctatccagtgttgtgtttgctggcatgctaatcggagcttgtgcttggggctttatttccgacagatacggaagaaagactgttttattgctttcgactctgcttactagtggattgggtcttctaagtgctctatctattaactacttgtgcttgctggttcttcggttttttgtcggcataggagtgggcagtgggcatgtattttcatcttggttcttggagttcgttcctgcaggaaatcgtggcacttggatggttattttttcctttttttggactattggcacagtcttggaggcttcacttgcatgggctgtactatcagcattgagttggaggtggttgctggcattgtcttcccttccatgcttcctcttgcttcttttcttcagaatcacacctgagtcaccacgctatctttgcgcacaaaatagaatgactgatgcaaggtttgtcctggagagaatggccattgcaaaccaagcagctcttcctatgggagttctcacataccaccaagaaacaaaaactgaatgcattactcatgtttctgaggatgaacatcttattccagtcagagagaaggaacatacagataggaatgctattagttccaaatctggtgctgttgctgtattgcacaagctattatcacataacttgctcaaatcaactctacttctttggtttgtttactatgccagttccttcgcttattatgggataacattgctgacatcacaactaagtgatgtgaatagaagctgtaaatctgatctggtctttgaagtgcaccaaaataatggcaatctttataaagatacttttatcactagtttagcagagatcccaggcttgattttatccgctttgcttgttgatcggtttggccggaaagctactatgtcgtgcctgatgtttgcatgttgtgctttccttgggccactcgtacttcatcagaatgagttgctgacaactactcttttattcggagctcgtgcttgtggcaccggtgccactacaactttatgtctatatgcccccgaggtgtatccgacatatgttcgctcaacaggggtcgggatcgcaaccgccatcggtaagatcggcggggttatttgccccctcgtcgccgtgggcatgctgcggagctgccatcagatggaagcggtgctggtgtttgagctggtgctgttcctcgctggggtctcctgcatcctcttccctgtggagaccaagggccgagaaatggactgagcacgcacggtggtggtagctcagcacatttgggcatccagatgggcttgtggttcatcttgattctgtataaacacaactctactacatccgcgacaagcttagcggatatgcaaaggggtgtaaacaggagctatagtaattacgagaaagaactggcaatgagcaatatttgtaacaggattattgttatagaacttcctcatcatcagtcaggaggtaaataaatatgtgaagttaaatagtaaccatgtggtggacagtgattataaacgaggatattctcgtggtgctggatatgcccaacgtcaattcgttgcgggcaacacacaacctaacgcgtgcctccaaacagctatcaattaattatcattacttg

SEQ ID NO: 4657 - DNA, 1921 bp, Zea Mays
atggaatgccaggaaaagaacaatatatgcaatgagcacgctagtaaggtagcacatgtcaggagaagaagagcgagcaaagaaggatgcttgaattctcaagccactgtaaattggagaccaaatacttcacacaaaaataagataggacatagaaagatagacactgatactcattctactcatcaaataagcgttgtcagatcacggtgctacacacactggttcagtgaatctgcaggtgctgctcatatggaaacatacactactgatgacgctcttacgctcatggggtttggaaagttccaagcacttgtccttgcatatgcaggaatgggctgggttgcagaagccatggaggtcatgctattgtcattccttggaccagtggtgcgggaagagtggaatgtctctccccaagacgagagtctgctatccagtgttgtgtttgctggcatgctaatcggagcttgtgcttggggctttatttccgacagatacggaagaaagactgttttattgctttcgactctgcttactagtggattgggtcttctaagtgctctatctattaactacttgtgcttgctggttcttcggttttttgtcggcataggagtgggcagtgggcatgtattttcatcttggttcttggagttcgttcctgcaggaaatcgtggcacttggatggttattttttcctttttttggactattggcacagtcttggaggcttcacttgcatgggctgtactatcagcattgagttggaggtggttgctggcattgtcttcccttccatgcttcctcttgcttcttttcttcagaatcacacctgagtcaccacgctatctttgcgcacaaaatagaatgactgatgcaaggtttgtcctggagagaatggccattgcaaaccaagcagctcttcctatgggagttctcacataccaccaagaaacaaaaactgaatgcattactcatgtttctgaggatgaacatcttattccagtcagagagaaggaacatacagataggaatgctattagttccaaatctggtgctgttgctgtattgcacaagctattatcacataacttgctcaaatcaactctacttctttggtttgtttactatgccagttccttcgcttattatgggataacattgctgacatcacaactaagtgatgtgaatagaagctgtaaatctgatctggtctttgaagtgcaccaaaataatggcaatctttataaagatacttttatcactagtttagcagctcgtgcttgtggcaccggtgccactacaactttatgtctatatgcccccgaggtgtatccgacatatgttcgctcaacaggggtcgggatcgcaaccgccatcggtaagatcggcggggttatttgccccctcgtcgccgtgggcatgctgcggagctgccatcagatggaagcggtgctggtgtttgagctggtgctgttcctcgctggggtctcctgcatcctcttccctgtggagaccaagggccgagaaatggactgagcacgcacggtggtggtagctcagcacatttgggcatccagatgggcttgtggttcatcttgattctgtataaacacaactctactacatccgcgacaagcttagcggatatgcaaaggggtgtaaacaggagctatagtaattacgagaaagaactggcaatgagcaatatttgtaacaggattattgttatagaacttcctcatcatcagtcaggaggtaaataaatatgtgaagttaaatagtaaccatgtggtggacagtgattataaacgaggatattctcgtggtgctggatatgcccaacgtcaattcgttgcgggcaacacacaacctaacgcgtgcctccaaacagctatcaattaattatcattacttg

SEQ ID NO: 4658 - DNA, 2813 bp, Zea Mays
atggaatgccaggaaaagaacaatatatgcaatgagcacgctagtaaggtagcacatgtcaggagaagaagagcgagcaaagaaggatgcttgaattctcaagccactgtaaattggagaccaaatacttcacacaaaaataagataggacatagaaagatagacactgatactcattctactcatcaaataagcgttgtcagatcacggtgctacacacactggttcagtgaatctgcaggtgctgctcatatggaaacatacactactgatgacgctcttacgctcatggggtttggaaagttccaagcacttgtccttgcatatgcaggaatgggctgggttgcagaagccatggaggtcatgctattgtcattccttggaccagtggtgcgggaagagtggaatgtctctccccaagacgagagtctgctatccagtgttgtgtttgctggcatgctaatcggagcttgtgcttggggctttatttccgacagatacggaagaaagtaaggatctgctccagcaaactctttatgtttcaatttacaggccttggcttcttaaggcaggcaggaataatttcaagtcctttaggattcacaggaaactgatttcatttctcactagtctgaagatattggatctaatcacacctacgtccaaataaccaatacagttttgacagtggtcgtggtactggtattagttttactatgtgacctgtggttggaatcagttcactgagtcaataaaccaatgagtcatttcagttagcgacctcatgtagtgaatcagcacggtaaaaggcaagcaatttgttcttctctttcgtctagtttgcacctctctcttttatcttccctcttgctacctgtaaaataataaaaccagagtgggatgcctcataaacggccagatttgcataaacaatttgataacccccagcactgctaaatagtgattttgccttcacaaagtcaggacgattatggttttcagtatagggtatagtttgtactagttgtcgttttagctcttttttatgtctatattcaaatacatgaagatgaacctagacacatatataaaacacatacatcaagtgttgtatgaacctactaattaattaaaacgaattttaatctgggacagagggagcattggttataccctattttttactatgattcttctctatgtttgatttgtgccaaacatacatgaaataaaccttgtattttttgtcaggactgttttattgctttcgactctgcttactagtggattgggtcttctaagtgctctatctattaactacttgtgcttgctggttcttcggttttttgtcggcataggagtgggcagtgggcatgtattttcatcttggttcttggagttcgttcctgcaggaaatcgtggcacttggatggttattttttcctttttttggactattggcacagtcttggaggcttcacttgcatgggctgtactatcagcattgagttggaggtggttgctggcattgtcttcccttccatgcttcctcttgcttcttttcttcagaatcacacctgagtcaccacgctatctttgcgcacaaaatagaatgactgatgcaaggtttgtcctggagagaatggccattgcaaaccaagcagctcttcctatgggagttctcacataccaccaagaaacaaaaactgaatgcattactcatgtttctgaggatgaacatcttattccagtcagagagaaggaacatacagataggaatgctattagttccaaatctggtgctgttgctgtattgcacaagctattatcacataacttgctcaaatcaactctacttctttggtttgtttactatgccagttccttcgcttattatgggataacattgctgacatcacaactaagtgatgtgaatagaagctgtaaatctgatctggtctttgaagtgcaccaaaataatggcaatctttataaagatacttttatcactagtttagcagagatcccaggcttgattttatccgctttgcttgttgatcggtttggccggaaagctactatgtcgtgcctgatgtttgcatgttgtgctttccttgggccactcgtacttcatcagaatgagttgctgacaactactcttttattcggagctcgtgcttgtggcaccggtgccactacaactttatgtctatatgcccccgaggtgtatccgacatatgttcgctcaacaggggtcgggatcgcaaccgccatcggtaagatcggcggggttatttgccccctcgtcgccgtgggcatgctgcggagctgccatcagatggaagcggtgctggtgtttgagctggtgctgttcctcgctggggtctcctgcatcctcttccctgtggagaccaagggccgagaaatggactgagcacgcacggtggtggtagctcagcacatttgggcatccagatgggcttgtggttcatcttgattctgtataaacacaactctactacatccgcgacaagcttagcggatatgcaaaggggtgtaaacaggagctatagtaattacgagaaagaactggcaatgagcaatatttgtaacaggattattgttatagaacttcctcatcatcagtcaggaggtaaataaatatgtgaagttaaatagtaaccatgtggtggacagtgattataaacgaggatattctcgtggtgctggatatgcccaacgtcaattcgttgcgggcaacacacaacctaacgcgtgcctccaaacagctatcaattaattatcattacttg

SEQ ID NO: 4659 - DNA, 1910 bp, Zea Mays
atggaatgccaggaaaagaacaatatatgcaatgagcacgctagtaaggtagcacatgtcaggagaagaagagcgagcaaagaaggatgcttgaattctcaagccactgtaaattggagaccaaatacttcacacaaaaataagataggacatagaaagatagacactgatactcattctactcatcaaataagcgttgtcagatcacggtgctacacacactggttcagtgaatctgcaggtgctgctcatatggaaacatacactactgatgacgctcttacgctcatggggtttggaaagttccaagcacttgtccttgcatatgcaggaatgggctgggttgcagaagccatggaggtcatgctattgtcattccttggaccagtggtgcgggaagagtggaatgtctctccccaagacgagagtctgctatccagtgttgtgtttgctggcatgctaatcggagcttgtgcttggggctttatttccgacagatacggaagaaagaaatcgtggcacttggatggttattttttcctttttttggactattggcacagtcttggaggcttcacttgcatgggctgtactatcagcattgagttggaggtggttgctggcattgtcttcccttccatgcttcctcttgcttcttttcttcagaatcacacctgagtcaccacgctatctttgcgcacaaaatagaatgactgatgcaaggtttgtcctggagagaatggccattgcaaaccaagcagctcttcctatgggagttctcacataccaccaagaaacaaaaactgaatgcattactcatgtttctgaggatgaacatcttattccagtcagagagaaggaacatacagataggaatgctattagttccaaatctggtgctgttgctgtattgcacaagctattatcacataacttgctcaaatcaactctacttctttggtttgtttactatgccagttccttcgcttattatgggataacattgctgacatcacaactaagtgatgtgaatagaagctgtaaatctgatctggtctttgaagtgcaccaaaataatggcaatctttataaagatacttttatcactagtttagcagagatcccaggcttgattttatccgctttgcttgttgatcggtttggccggaaagctactatgtcgtgcctgatgtttgcatgttgtgctttccttgggccactcgtacttcatcagaatgagttgctgacaactactcttttattcggagctcgtgcttgtggcaccggtgccactacaactttatgtctatatgcccccgaggtgtatccgacatatgttcgctcaacaggggtcgggatcgcaaccgccatcggtaagatcggcggggttatttgccccctcgtcgccgtgggcatgctgcggagctgccatcagatggaagcggtgctggtgtttgagctggtgctgttcctcgctggggtctcctgcatcctcttccctgtggagaccaagggccgagaaatggactgagcacgcacggtggtggtagctcagcacatttgggcatccagatgggcttgtggttcatcttgattctgtataaacacaactctactacatccgcgacaagcttagcggatatgcaaaggggtgtaaacaggagctatagtaattacgagaaagaactggcaatgagcaatatttgtaacaggattattgttatagaacttcctcatcatcagtcaggaggtaaataaatatgtgaagttaaatagtaaccatgtggtggacagtgattataaacgaggatattctcgtggtgctggatatgcccaacgtcaattcgttgcgggcaacacacaacctaacgcgtgcctccaaacagctatcaattaattatcattacttg

SEQ ID NO: 4660 - DNA, 2014 bp, Zea Mays
atggaatgccaggaaaagaacaatatatgcaatgagcacgctagtaaggtagcacatgtcaggagaagaagagcgagcaaagaaggatgcttgaattctcaagccactgtaaattggagaccaaatacttcacacaaaaataagataggacatagaaagatagacactgatactcattctactcatcaaataagcgttgtcagatcacggtgctacacacactggttcagtgaatctgcaggtgctgctcatatggaaacatacactactgatgacgctcttacgctcatggggtttggaaagttccaagcacttgtccttgcatatgcaggaatgggctgggttgcagaagccatggaggtcatgctattgtcattccttggaccagtggtgcgggaagagtggaatgtctctccccaagacgagagtctgctatccagtgttgtgtttgctggcatgctaatcggagcttgtgcttggggctttatttccgacagatacggaagaaagactgttttattgctttcgactctgcttactagtggattgggtcttctaagtgctctatctattaactacttgtgcttgctggttcttcggttttttgtcggcataggagtgggcagtgggcatgtattttcatcttggttcttggagttcgttcctgcaggaaatcgtggcacttggatggctgtactatcagcattgagttggaggtggttgctggcattgtcttcccttccatgcttcctcttgcttcttttcttcagaatcacacctgagtcaccacgctatctttgcgcacaaaatagaatgactgatgcaaggtttgtcctggagagaatggccattgcaaaccaagcagctcttcctatgggagttctcacataccaccaagaaacaaaaactgaatgcattactcatgtttctgaggatgaacatcttattccagtcagagagaaggaacatacagataggaatgctattagttccaaatctggtgctgttgctgtattgcacaagctattatcacataacttgctcaaatcaactctacttctttggtttgtttactatgccagttccttcgcttattatgggataacattgctgacatcacaactaagtgatgtgaatagaagctgtaaatctgatctggtctttgaagtgcaccaaaataatggcaatctttataaagatacttttatcactagtttagcagagatcccaggcttgattttatccgctttgcttgttgatcggtttggccggaaagctactatgtcgtgcctgatgtttgcatgttgtgctttccttgggccactcgtacttcatcagaatgagttgctgacaactactcttttattcggagctcgtgcttgtggcaccggtgccactacaactttatgtctatatgcccccgaggtgtatccgacatatgttcgctcaacaggggtcgggatcgcaaccgccatcggtaagatcggcggggttatttgccccctcgtcgccgtgggcatgctgcggagctgccatcagatggaagcggtgctggtgtttgagctggtgctgttcctcgctggggtctcctgcatcctcttccctgtggagaccaagggccgagaaatggactgagcacgcacggtggtggtagctcagcacatttgggcatccagatgggcttgtggttcatcttgattctgtataaacacaactctactacatccgcgacaagcttagcggatatgcaaaggggtgtaaacaggagctatagtaattacgagaaagaactggcaatgagcaatatttgtaacaggattattgttatagaacttcctcatcatcagtcaggaggtaaataaatatgtgaagttaaatagtaaccatgtggtggacagtgattataaacgaggatattctcgtggtgctggatatgcccaacgtcaattcgttgcgggcaacacacaacctaacgcgtgcctccaaacagctatcaattaattatcattacttg

SEQ ID NO: 4661 - DNA, 3372 bp, Zea Mays
cagaagtgctacgctgatctgctctctaggcggctcgctcgttactcgttcgtcttaccgcctcccaacaaacagcgagcggcgcgacctaagccgctctgcgcccaccggccagccggggcggagagggaccgaccgctcctccgttcgaagtgccggtcctgagtcaccggcgtcgcccgcatccgctgctcagctcgcccgccagcctggtggcgatcggcatcctcttttactccagaaaaataaagatcttctcgcaaaagaaaaaaaggaaaaaaaagagaaaatgtcaatgcactgcaatggttgattctgaaacttggatcagatagacactgatactcattctactcatcaaataagcgttgtcagatcacggtgctacacacactggttcagtgaatctgcaggtgctgctcatatggaaacatacactactgatgacgctcttacgctcatggggtttggaaagttccaagcacttgtccttgcatatgcaggaatgggctgggttgcagaagccatggaggtcatgctattgtcattccttggaccagtggtgcgggaagagtggaatgtctctccccaagacgagagtctgctatccagtgttgtgtttgctggcatgctaatcggagcttgtgcttggggctttatttccgacagatacggaagaaagtaaggatctgctccagcaaactctttatgtttcaatttacaggccttggcttcttaaggcaggcaggaataatttcaagtcctttaggattcacaggaaactgatttcatttctcactagtctgaagatattggatctaatcacacctacgtccaaataaccaatacagttttgacagtggtcgtggtactggtattagttttactatgtgacctgtggttggaatcagttcactgagtcaataaaccaatgagtcatttcagttagcgacctcatgtagtgaatcagcacggtaaaaggcaagcaatttgttcttctctttcgtctagtttgcacctctctcttttatcttccctcttgctacctgtaaaataataaaaccagagtgggatgcctcataaacggccagatttgcataaacaatttgataacccccagcactgctaaatagtgattttgccttcacaaagtcaggacgattatggttttcagtatagggtatagtttgtactagttgtcgttttagctcttttttatgtctatattcaaatacatgaagatgaacctagacacatatataaaacacatacatcaagtgttgtatgaacctactaattaattaaaacgaattttaatctgggacagagggagcattggttataccctattttttactatgattcttctctatgtttgatttgtgccaaacatacatgaaataaaccttgtattttttgtcaggactgttttattgctttcgactctgcttactagtggattgggtcttctaagtgctctatctattaactacttgtgcttgctggttcttcggttttttgtcggcataggagtgggcagtgggcatgtattttcatcttggttcttggagttcgttcctgcaggaaatcgtggcacttggatggttattttttcctttttttggactattggcacagtcttggaggcttcacttgcatgggtatgacattttgctccttcgctagaactcaactgtttccctttttcatcctatggtttccttataggtcatactgtatatataatctttttgaaaggaatgctactagtaagttgcagagataatacattatgcataactttgagggtcttgctttccttaattctgtgtaggattttgttcaagcaggcctctgaaaccggaattcttttttggaatgctccttgtcatgagtaacattgatttttttctgcaggtgtagtatatcatgactgttcacaaccatatttatcactttatcagttgcattatccatttgcagtatactgtcattatttctgtagcaatatttaagatatctcaatgtgtgatgcctgcctgatgatcatacttttacctacccatctgaactctgacttttctgcatctaataaaaatgtctggaattcagtaagttatgtttggatttggtacacatctgacttgtacatgtacacgttttcagataaaaaatgctcatttttatttgcattgcaggctgtactatcagcattgagttggaggtggttgctggcattgtcttcccttccatgcttcctcttgcttcttttcttcagaatcacacctgagtcaccacgctatctttgcgcacaaaatagaatgactgatgcaaggtttgtcctggagagaatggccattgcaaaccaagcagctcttcctatgggagttctcacataccaccaagaaacaaaaactgaatgcattactcatgtttctgaggatgaacatcttattccagtcagagagaaggaacatacagataggaatgctattagttccaaatctggtgctgttgctgtattgcacaagctattatcacataacttgctcaaatcaactctacttctttggtttgtttactatgccagttccttcgcttattatgggataacattgctgacatcacaactaagtgatgtgaatagaagctgtaaatctgatctggtctttgaagtgcaccaaaataatggcaatctttataaagatacttttatcactagtttagcagctcgtgcttgtggcaccggtgccactacaactttatgtctatatgcccccgaggtgtatccgacatatgttcgctcaacaggggtcgggatcgcaaccgccatcggtaagatcggcggggttatttgccccctcgtcgccgtgggcatgctgcggagctgccatcagatggaagcggtgctggtgtttgagctggtgctgttcctcgctggggtctcctgcatcctcttccctgtggagaccaagggccgagaaatggactgagcacgcacggtggtggtagctcagcacatttgggcatccagatgggcttgtggttcatcttgattctgtataaacacaactctactacatccgcgacaagcttagcggatatgcaaaggggtgtaaacaggagctatagtaattacgagaaagaactggcaatgagcaatatttgtaacaggattattgttatagaacttcctcatcatcagtcaggaggtaaataaatatgtgaagttaaatagtaaccatgtggtggacagtgattataaacgaggatattctcgtggtgctggatatgcccaacgtcaattcgttgcgggcaacacacaacctaacgcgtgcctccaaacagctatcaattaattatcattacttg

SEQ ID NO: 4662 - DNA, 2175 bp, Zea Mays
gttactcgttcgtcttaccgcctcccaacaaacagcgagcggcgcgacctaagccgctctgcgcccaccggccagccggggcggagagggaccgaccgctcctccgttcgaagtgccggtcctgagtcaccggcgtcgcccgcatccgctgctcagctcgcccgccagcctggtggcgatcggcatcctcttttactccagaaaaataaagatcttctcgcaaaagaaaaaaaggaaaaaaaagagaaaatgtcaatgcactgcaatggttgattctgaaacttggatcagatagacactgatactcattctactcatcaaataagcgttgtcagatcacggtgctacacacactggttcagtgaatctgcaggtgctgctcatatggaaacatacactactgatgacgctcttacgctcatggggtttggaaagttccaagcacttgtccttgcatatgcaggaatgggctgggttgcagaagccatggaggtcatgctattgtcattccttggaccagtggtgcgggaagagtggaatgtctctccccaagacgagagtctgctatccagtgttgtgtttgctggcatgctaatcggagcttgtgcttggggctttatttccgacagatacggaagaaagactgttttattgctttcgactctgcttactagtggattgggtcttctaagtgctctatctattaactacttgtgcttgctggttcttcggttttttgtcggcataggagtgggcagtgggcatgtattttcatcttggttcttggagttcgttcctgcaggaaatcgtggcacttggatggttattttttcctttttttggactattggcacagtcttggaggcttcacttgcatgggctgtactatcagcattgagttggaggtggttgctggcattgtcttcccttccatgcttcctcttgcttcttttcttcagaatcacacctgagtcaccacgctatctttgcgcacaaaatagaatgactgatgcaaggtttgtcctggagagaatggccattgcaaaccaagcagctcttcctatgggagttctcacataccaccaagaaacaaaaactgaatgcattactcatgtttctgaggatgaacatcttattccagtcagagagaaggaacatacagataggaatgctattagttccaaatctggtgctgttgctgtattgcacaagctattatcacataacttgctcaaatcaactctacttctttggtttgtttactatgccagttccttcgcttattatgggataacattgctgacatcacaactaagtgatgtgaatagaagctgtaaatctgatctggtctttgaagtgcaccaaaataatggcaatctttataaagatacttttatcactagtttagcagagatcccaggcttgattttatccgctttgcttgttgatcggtttggccggaaagctactatgtcgtgcctgatgtttgcatgttgtgctttccttgggccactcgtacttcatcagaatgagttgctgacaactactcttttattcggagctcgtgcttgtggcaccggtgccactacaactttatgtctatatgcccccgaggggtcgggatcgcaaccgccatcggtaagatcggcggggttatttgccccctcgtcgccgtgggcatgctgcggagctgccatcagatggaagcggtgctggtgtttgagctggtgctgttcctcgctggggtctcctgcatcctcttccctgtggagaccaagggccgagaaatggactgagcacgcacggtggtggtagctcagcacatttgggcatccagatgggcttgtggttcatcttgattctgtataaacacaactctactacatccgcgacaagcttagcggatatgcaaaggggtgtaaacaggagctatagtaattacgagaaagaactggcaatgagcaatatttgtaacaggattattgttatagaacttcctcatcatcagtcaggaggtaaataaatatgtgaagttaaatagtaaccatgtggtggacagtgattataaacgaggatattctcgtggtgctggatatgcccaacgtcaattcgttgcgggcaacacacaacctaacgcgtgcctccaaacagctatcaattaattatcattacttg

SEQ ID NO: 4663 - DNA, 2196 bp, Zea Mays
gttcgtcttaccgcctcccaacaaacagcgagcggcgcgacctaagccgctctgcgcccaccggccagccggggcggagagggaccgaccgctcctccgttcgaagtgccggtcctgagtcaccggcgtcgcccgcatccgctgctcagctcgcccgccagcctggtggcgatcggcatcctcttttactccagaaaaataaagatcttctcgcaaaagaaaaaaaggaaaaaaaagagaaaatgtcaatgcactgcaatggttgattctgaaacttggatcagatagacactgatactcattctactcatcaaataagcgttgtcagatcacggtgctacacacactggttcagtgaatctgcaggtgctgctcatatggaaacatacactactgatgacgctcttacgctcatggggtttggaaagttccaagcacttgtccttgcatatgcaggaatgggctgggttgcagaagccatggaggtcatgctattgtcattccttggaccagtggtgcgggaagagtggaatgtctctccccaagacgagagtctgctatccagtgttgtgtttgctggcatgctaatcggagcttgtgcttggggctttatttccgacagatacggaagaaagactgttttattgctttcgactctgcttactagtggattgggtcttctaagtgctctatctattaactacttgtgcttgctggttcttcggttttttgtcggcataggagtgggcagtgggcatgtattttcatcttggttcttggagttcgttcctgcaggaaatcgtggcacttggatggttattttttcctttttttggactattggcacagtcttggaggcttcacttgcatgggctgtactatcagcattgagttggaggtggttgctggcattgtcttcccttccatgcttcctcttgcttcttttcttcagaatcacacctgagtcaccacgctatctttgcgcacaaaatagaatgactgatgcaaggtttgtcctggagagaatggccattgcaaaccaagcagctcttcctatgggagttctcacataccaccaagaaacaaaaactgaatgcattactcatgtttctgaggatgaacatcttattccagtcagagagaaggaacatacagataggaatgctattagttccaaatctggtgctgttgctgtattgcacaagctattatcacataacttgctcaaatcaactctacttctttggtttgtttactatgccagttccttcgcttattatgggataacattgctgacatcacaactaagtgatgtgaatagaagctgtaaatctgatctggtctttgaagtgcaccaaaataatggcaatctttataaagatacttttatcactagtttagcagagatcccaggcttgattttatccgctttgcttgttgatcggtttggccggaaagctactatgtcgtgcctgatgtttgcatgttgtgctttccttgggccactcgtacttcatcagaatgagttgctgacaactactcttttattcggagctcgtgcttgtggcaccggtgccactacaactttatgtctatatgcccccgaggtgtatccgacatatgttcgctcaacaggggtcgggatcgcaaccgccatcggtaagatcggcggggttatttgccccctcgtcgccgtgggcatgctgcggagctgccatcagatggaagcggtgctggtgtttgagctggtgctgttcctcgctggggtctcctgcatcctcttccctgtggagaccaagggccgagaaatggactgagcacgcacggtggtggtagctcagcacatttgggcatccagatgggcttgtggttcatcttgattctgtataaacacaactctactacatccgcgacaagcttagcggatatgcaaaggggtgtaaacaggagctatagtaattacgagaaagaactggcaatgagcaatatttgtaacaggattattgttatagaacttcctcatcatcagtcaggaggtaaataaatatgtgaagttaaatagtaaccatgtggtggacagtgattataaacgaggatattctcgtggtgctggatatgcccaacgtcaattcgttgcgggcaacacacaacctaacgcgtgcctccaaacagctatcaattaattatcattacttg

SEQ ID NO: 4664 - DNA, 2139 bp, Zea Mays
gttcgtcttaccgcctcccaacaaacagcgagcggcgcgacctaagccgctctgcgcccaccggccagccggggcggagagggaccgaccgctcctccgttcgaagtgccggtcctgagtcaccggcgtcgcccgcatccgctgctcagctcgcccgccagcctggtggcgatcggcatcctcttttactccagaaaaataaagatcttctcgcaaaagaaaaaaaggaaaaaaaagagaaaatgtcaatgcactgcaatggttgattctgaaacttggatcagatagacactgatactcattctactcatcaaataagcgttgtcagatcacggtgctacacacactggttcagtgaatctgcaggtgctgctcatatggaaacatacactactgatgacgctcttacgctcatggggtttggaaagttccaagcacttgtccttgcatatgcaggaatgggctgggttgcagaagccatggaggtcatgctattgtcattccttggaccagtggtgcgggaagagtggaatgtctctccccaagacgagagtctgctatccagtgttgtgtttgctggcatgctaatcggagcttgtgcttggggctttatttccgacagatacggaagaaagactgttttattgctttcgactctgcttactagtggattgggtcttctaagtgctctatctattaactacttgtgcttgctggttcttcggttttttgtcggcataggagtgggcagtgggcatgtattttcatcttggttcttggagttcgttcctgcaggaaatcgtggcacttggatggctgtactatcagcattgagttggaggtggttgctggcattgtcttcccttccatgcttcctcttgcttcttttcttcagaatcacacctgagtcaccacgctatctttgcgcacaaaatagaatgactgatgcaaggtttgtcctggagagaatggccattgcaaaccaagcagctcttcctatgggagttctcacataccaccaagaaacaaaaactgaatgcattactcatgtttctgaggatgaacatcttattccagtcagagagaaggaacatacagataggaatgctattagttccaaatctggtgctgttgctgtattgcacaagctattatcacataacttgctcaaatcaactctacttctttggtttgtttactatgccagttccttcgcttattatgggataacattgctgacatcacaactaagtgatgtgaatagaagctgtaaatctgatctggtctttgaagtgcaccaaaataatggcaatctttataaagatacttttatcactagtttagcagagatcccaggcttgattttatccgctttgcttgttgatcggtttggccggaaagctactatgtcgtgcctgatgtttgcatgttgtgctttccttgggccactcgtacttcatcagaatgagttgctgacaactactcttttattcggagctcgtgcttgtggcaccggtgccactacaactttatgtctatatgcccccgaggtgtatccgacatatgttcgctcaacaggggtcgggatcgcaaccgccatcggtaagatcggcggggttatttgccccctcgtcgccgtgggcatgctgcggagctgccatcagatggaagcggtgctggtgtttgagctggtgctgttcctcgctggggtctcctgcatcctcttccctgtggagaccaagggccgagaaatggactgagcacgcacggtggtggtagctcagcacatttgggcatccagatgggcttgtggttcatcttgattctgtataaacacaactctactacatccgcgacaagcttagcggatatgcaaaggggtgtaaacaggagctatagtaattacgagaaagaactggcaatgagcaatatttgtaacaggattattgttatagaacttcctcatcatcagtcaggaggtaaataaatatgtgaagttaaatagtaaccatgtggtggacagtgattataaacgaggatattctcgtggtgctggatatgcccaacgtcaattcgttgcgggcaacacacaacctaacgcgtgcctccaaacagctatcaattaattatcattacttg

SEQ ID NO: 4665 - DNA, 1989 bp, Zea Mays
gttcgtcttaccgcctcccaacaaacagcgagcggcgcgacctaagccgctctgcgcccaccggccagccggggcggagagggaccgaccgctcctccgttcgaagtgccggtcctgagtcaccggcgtcgcccgcatccgctgctcagctcgcccgccagcctggtggcgatcggcatcctcttttactccagaaaaataaagatcttctcgcaaaagaaaaaaaggaaaaaaaagagaaaatgtcaatgcactgcaatggttgattctgaaacttggatcagatagacactgatactcattctactcatcaaataagcgttgtcagatcacggtgctacacacactggttcagtgaatctgcaggtgctgctcatatggaaacatacactactgatgacgctcttacgctcatggggtttggaaagttccaagcacttgtccttgcatatgcaggaatgggctgggttgcagaagccatggaggtcatgctattgtcattccttggaccagtggtgcgggaagagtggaatgtctctccccaagacgagagtctgctatccagtgttgtgtttgctggcatgctaatcggagcttgtgcttggggctttatttccgacagatacggaagaaagactgttttattgctttcgactctgcttactagtggattgggtcttctaagtgctctatctattaactacttgtgcttgctggttcttcggttttttgtcggcataggagtgggcagtgggcatgtattttcatcttggttcttggagttcgttcctgcaggaaatcgtggcacttggatggctgtactatcagcattgagttggaggtggttgctggcattgtcttcccttccatgcttcctcttgcttcttttcttcagaatcacacctgagtcaccacgctatctttgcgcacaaaatagaatgactgatgcaaggtttgtcctggagagaatggccattgcaaaccaagcagctcttcctatgggagttctcacataccaccaagaaacaaaaactgaatgcattactcatgtttctgaggatgaacatcttattccagtcagagagaaggaacatacagataggaatgctattagttccaaatctggtgctgttgctgtattgcacaagctattatcacataacttgctcaaatcaactctacttctttggtttgtttactatgccagttccttcgcttattatgggataacattgctgacatcacaactaagtgatgtgaatagaagctgtaaatctgatctggtctttgaagtgcaccaaaataatggcaatctttataaagatacttttatcactagtttagcagctcgtgcttgtggcaccggtgccactacaactttatgtctatatgcccccgaggtgtatccgacatatgttcgctcaacaggggtcgggatcgcaaccgccatcggtaagatcggcggggttatttgccccctcgtcgccgtgggcatgctgcggagctgccatcagatggaagcggtgctggtgtttgagctggtgctgttcctcgctggggtctcctgcatcctcttccctgtggagaccaagggccgagaaatggactgagcacgcacggtggtggtagctcagcacatttgggcatccagatgggcttgtggttcatcttgattctgtataaacacaactctactacatccgcgacaagcttagcggatatgcaaaggggtgtaaacaggagctatagtaattacgagaaagaactggcaatgagcaatatttgtaacaggattattgttatagaacttcctcatcatcagtcaggaggtaaataaatatgtgaagttaaatagtaaccatgtggtggacagtgattataaacgaggatattctcgtggtgctggatatgcccaacgtcaattcgttgcgggcaacacacaacctaacgcgtgcctccaaacagctatcaattaattatcattacttg

SEQ ID NO: 4666 - DNA, 2046 bp, Zea Mays
gttcgtcttaccgcctcccaacaaacagcgagcggcgcgacctaagccgctctgcgcccaccggccagccggggcggagagggaccgaccgctcctccgttcgaagtgccggtcctgagtcaccggcgtcgcccgcatccgctgctcagctcgcccgccagcctggtggcgatcggcatcctcttttactccagaaaaataaagatcttctcgcaaaagaaaaaaaggaaaaaaaagagaaaatgtcaatgcactgcaatggttgattctgaaacttggatcagatagacactgatactcattctactcatcaaataagcgttgtcagatcacggtgctacacacactggttcagtgaatctgcaggtgctgctcatatggaaacatacactactgatgacgctcttacgctcatggggtttggaaagttccaagcacttgtccttgcatatgcaggaatgggctgggttgcagaagccatggaggtcatgctattgtcattccttggaccagtggtgcgggaagagtggaatgtctctccccaagacgagagtctgctatccagtgttgtgtttgctggcatgctaatcggagcttgtgcttggggctttatttccgacagatacggaagaaagactgttttattgctttcgactctgcttactagtggattgggtcttctaagtgctctatctattaactacttgtgcttgctggttcttcggttttttgtcggcataggagtgggcagtgggcatgtattttcatcttggttcttggagttcgttcctgcaggaaatcgtggcacttggatggttattttttcctttttttggactattggcacagtcttggaggcttcacttgcatgggctgtactatcagcattgagttggaggtggttgctggcattgtcttcccttccatgcttcctcttgcttcttttcttcagaatcacacctgagtcaccacgctatctttgcgcacaaaatagaatgactgatgcaaggtttgtcctggagagaatggccattgcaaaccaagcagctcttcctatgggagttctcacataccaccaagaaacaaaaactgaatgcattactcatgtttctgaggatgaacatcttattccagtcagagagaaggaacatacagataggaatgctattagttccaaatctggtgctgttgctgtattgcacaagctattatcacataacttgctcaaatcaactctacttctttggtttgtttactatgccagttccttcgcttattatgggataacattgctgacatcacaactaagtgatgtgaatagaagctgtaaatctgatctggtctttgaagtgcaccaaaataatggcaatctttataaagatacttttatcactagtttagcagctcgtgcttgtggcaccggtgccactacaactttatgtctatatgcccccgaggtgtatccgacatatgttcgctcaacaggggtcgggatcgcaaccgccatcggtaagatcggcggggttatttgccccctcgtcgccgtgggcatgctgcggagctgccatcagatggaagcggtgctggtgtttgagctggtgctgttcctcgctggggtctcctgcatcctcttccctgtggagaccaagggccgagaaatggactgagcacgcacggtggtggtagctcagcacatttgggcatccagatgggcttgtggttcatcttgattctgtataaacacaactctactacatccgcgacaagcttagcggatatgcaaaggggtgtaaacaggagctatagtaattacgagaaagaactggcaatgagcaatatttgtaacaggattattgttatagaacttcctcatcatcagtcaggaggtaaataaatatgtgaagttaaatagtaaccatgtggtggacagtgattataaacgaggatattctcgtggtgctggatatgcccaacgtcaattcgttgcgggcaacacacaacctaacgcgtgcctccaaacagctatcaattaattatcattacttg

SEQ ID NO: 4667 - DNA, 2089 bp, Zea Mays
gttcgtcttaccgcctcccaacaaacagcgagcggcgcgacctaagccgctctgcgcccaccggccagccggggcggagagggaccgaccgctcctccgttcgaagtgccggtcctgagtcaccggcgtcgcccgcatccgctgctcagctcgcccgccagcctggtggcgatcggcatcctcttttactccagaaaaataaagatcttctcgcaaaagaaaaaaaggaaaaaaaagagaaaatgtcaatgcactgcaatggttgattctgaaacttggatcagatagacactgatactcattctactcatcaaataagcgttgtcagatcacggtgctacacacactggttcagtgaatctgcaggtgctgctcatatggaaacatacactactgatgacgctcttacgctcatggggtttggaaagttccaagcacttgtccttgcatatgcaggaatgggctgggttgcagaagccatggaggtcatgctattgtcattccttggaccagtggtgcgggaagagtggaatgtctctccccaagacgagagtctgctatccagtgttgtgtttgctggcatgctaatcggagcttgtgcttggggctttatttccgacagatacggaagaaagagtgggcagtgggcatgtattttcatcttggttcttggagttcgttcctgcaggaaatcgtggcacttggatggttattttttcctttttttggactattggcacagtcttggaggcttcacttgcatgggctgtactatcagcattgagttggaggtggttgctggcattgtcttcccttccatgcttcctcttgcttcttttcttcagaatcacacctgagtcaccacgctatctttgcgcacaaaatagaatgactgatgcaaggtttgtcctggagagaatggccattgcaaaccaagcagctcttcctatgggagttctcacataccaccaagaaacaaaaactgaatgcattactcatgtttctgaggatgaacatcttattccagtcagagagaaggaacatacagataggaatgctattagttccaaatctggtgctgttgctgtattgcacaagctattatcacataacttgctcaaatcaactctacttctttggtttgtttactatgccagttccttcgcttattatgggataacattgctgacatcacaactaagtgatgtgaatagaagctgtaaatctgatctggtctttgaagtgcaccaaaataatggcaatctttataaagatacttttatcactagtttagcagagatcccaggcttgattttatccgctttgcttgttgatcggtttggccggaaagctactatgtcgtgcctgatgtttgcatgttgtgctttccttgggccactcgtacttcatcagaatgagttgctgacaactactcttttattcggagctcgtgcttgtggcaccggtgccactacaactttatgtctatatgcccccgaggtgtatccgacatatgttcgctcaacaggggtcgggatcgcaaccgccatcggtaagatcggcggggttatttgccccctcgtcgccgtgggcatgctgcggagctgccatcagatggaagcggtgctggtgtttgagctggtgctgttcctcgctggggtctcctgcatcctcttccctgtggagaccaagggccgagaaatggactgagcacgcacggtggtggtagctcagcacatttgggcatccagatgggcttgtggttcatcttgattctgtataaacacaactctactacatccgcgacaagcttagcggatatgcaaaggggtgtaaacaggagctatagtaattacgagaaagaactggcaatgagcaatatttgtaacaggattattgttatagaacttcctcatcatcagtcaggaggtaaataaatatgtgaagttaaatagtaaccatgtggtggacagtgattataaacgaggatattctcgtggtgctggatatgcccaacgtcaattcgttgcgggcaacacacaacctaacgcgtgcctccaaacagctatcaattaattatcattacttg

SEQ ID NO: 4668 - DNA, 2788 bp, Zea Mays
gttcgtcttaccgcctcccaacaaacagcgagcggcgcgacctaagccgctctgcgcccaccggccagccggggcggagagggaccgaccgctcctccgttcgaagtgccggtcctgagtcaccggcgtcgcccgcatccgctgctcagctcgcccgccagcctggtggcgatcggcatcctcttttactccagaaaaataaagatcttctcgcaaaagaaaaaaaggaaaaaaaagagaaaatgtcaatgcactgcaatggttgattctgaaacttggatcagatagacactgatactcattctactcatcaaataagcgttgtcagatcacggtgctacacacactggttcagtgaatctgcaggtgctgctcatatggaaacatacactactgatgacgctcttacgctcatggggtttggaaagttccaagcacttgtccttgcatatgcaggaatgggctgggttgcagaagccatggaggtcatgctattgtcattccttggaccagtggtgcgggaagagtggaatgtctctccccaagacgagagtctgctatccagtgttgtgtttgctggcatgctaatcggagcttgtgcttggggctttatttccgacagatacggaagaaagtaaggatctgctccagcaaactctttatgtttcaatttacaggccttggcttcttaaggcaggcaggaataatttcaagtcctttaggattcacaggaaactgatttcatttctcactagtctgaagatattggatctaatcacacctacgtccaaataaccaatacagttttgacagtggtcgtggtactggtattagttttactatgtgacctgtggttggaatcagttcactgagtcaataaaccaatgagtcatttcagttagcgacctcatgtagtgaatcagcacggtaaaaggcaagcaatttgttcttctctttcgtctagtttgcacctctctcttttatcttccctcttgctacctgtaaaataataaaaccagagtgggatgcctcataaacggccagatttgcataaacaatttgataacccccagcactgctaaatagtgattttgccttcacaaagtcaggacgattatggttttcagtatagggtatagtttgtactagttgtcgttttagctcttttttatgtctatattcaaatacatgaagatgaacctagacacatatataaaacacatacatcaagtgttgtatgaacctactaattaattaaaacgaattttaatctgggacagagggagcattggttataccctattttttactatgattcttctctatgtttgatttgtgccaaacatacatgaaataaaccttgtattttttgtcaggactgttttattgctttcgactctgcttactagtggattgggtcttctaagtgctctatctattaactacttgtgcttgctggttcttcggttttttgtcggcataggagtgggcagtgggcatgtattttcatcttggttcttggagttcgttcctgcaggaaatcgtggcacttggatggttattttttcctttttttggactattggcacagtcttggaggcttcacttgcatgggctgtactatcagcattgagttggaggtggttgctggcattgtcttcccttccatgcttcctcttgcttcttttcttcagaatcacacctgagtcaccacgctatctttgcgcacaaaatagaatgactgatgcaaggtttgtcctggagagaatggccattgcaaaccaagcagctcttcctatgggagttctcacataccaccaagaaacaaaaactgaatgcattactcatgtttctgaggatgaacatcttattccagtcagagagaaggaacatacagataggaatgctattagttccaaatctggtgctgttgctgtattgcacaagctattatcacataacttgctcaaatcaactctacttctttggtttgtttactatgccagttccttcgcttattatgggataacattgctgacatcacaactaagtgatgtgaatagaagctgtaaatctgatctggtctttgaagtgcaccaaaataatggcaatctttataaagatacttttatcactagtttagcagctcgtgcttgtggcaccggtgccactacaactttatgtctatatgcccccgaggtgtatccgacatatgttcgctcaacaggggtcgggatcgcaaccgccatcggtaagatcggcggggttatttgccccctcgtcgccgtgggcatgctgcggagctgccatcagatggaagcggtgctggtgtttgagctggtgctgttcctcgctggggtctcctgcatcctcttccctgtggagaccaagggccgagaaatggactgagcacgcacggtggtggtagctcagcacatttgggcatccagatgggcttgtggttcatcttgattctgtataaacacaactctactacatccgcgacaagcttagcggatatgcaaaggggtgtaaacaggagctatagtaattacgagaaagaactggcaatgagcaatatttgtaacaggattattgttatagaacttcctcatcatcagtcaggaggtaaataaatatgtgaagttaaatagtaaccatgtggtggacagtgattataaacgaggatattctcgtggtgctggatatgcccaacgtcaattcgttgcgggcaacacacaacctaacgcgtgcctccaaacagctatcaattaattatcattacttg

SEQ ID NO: 4669 - DNA, 2881 bp, Zea Mays
gttcgtcttaccgcctcccaacaaacagcgagcggcgcgacctaagccgctctgcgcccaccggccagccggggcggagagggaccgaccgctcctccgttcgaagtgccggtcctgagtcaccggcgtcgcccgcatccgctgctcagctcgcccgccagcctggtggcgatcggcatcctcttttactccagaaaaataaagatcttctcgcaaaagaaaaaaaggaaaaaaaagagaaaatgtcaatgcactgcaatggttgattctgaaacttggatcagatagacactgatactcattctactcatcaaataagcgttgtcagatcacggtgctacacacactggttcagtgaatctgcaggtgctgctcatatggaaacatacactactgatgacgctcttacgctcatggggtttggaaagttccaagcacttgtccttgcatatgcaggaatgggctgggttgcagaagccatggaggtcatgctattgtcattccttggaccagtggtgcgggaagagtggaatgtctctccccaagacgagagtctgctatccagtgttgtgtttgctggcatgctaatcggagcttgtgcttggggctttatttccgacagatacggaagaaagtaaggatctgctccagcaaactctttatgtttcaatttacaggccttggcttcttaaggcaggcaggaataatttcaagtcctttaggattcacaggaaactgatttcatttctcactagtctgaagatattggatctaatcacacctacgtccaaataaccaatacagttttgacagtggtcgtggtactggtattagttttactatgtgacctgtggttggaatcagttcactgagtcaataaaccaatgagtcatttcagttagcgacctcatgtagtgaatcagcacggtaaaaggcaagcaatttgttcttctctttcgtctagtttgcacctctctcttttatcttccctcttgctacctgtaaaataataaaaccagagtgggatgcctcataaacggccagatttgcataaacaatttgataacccccagcactgctaaatagtgattttgccttcacaaagtcaggacgattatggttttcagtatagggtatagtttgtactagttgtcgttttagctcttttttatgtctatattcaaatacatgaagatgaacctagacacatatataaaacacatacatcaagtgttgtatgaacctactaattaattaaaacgaattttaatctgggacagagggagcattggttataccctattttttactatgattcttctctatgtttgatttgtgccaaacatacatgaaataaaccttgtattttttgtcaggactgttttattgctttcgactctgcttactagtggattgggtcttctaagtgctctatctattaactacttgtgcttgctggttcttcggttttttgtcggcataggagtgggcagtgggcatgtattttcatcttggttcttggagttcgttcctgcaggaaatcgtggcacttggatggctgtactatcagcattgagttggaggtggttgctggcattgtcttcccttccatgcttcctcttgcttcttttcttcagaatcacacctgagtcaccacgctatctttgcgcacaaaatagaatgactgatgcaaggtttgtcctggagagaatggccattgcaaaccaagcagctcttcctatgggagttctcacataccaccaagaaacaaaaactgaatgcattactcatgtttctgaggatgaacatcttattccagtcagagagaaggaacatacagataggaatgctattagttccaaatctggtgctgttgctgtattgcacaagctattatcacataacttgctcaaatcaactctacttctttggtttgtttactatgccagttccttcgcttattatgggataacattgctgacatcacaactaagtgatgtgaatagaagctgtaaatctgatctggtctttgaagtgcaccaaaataatggcaatctttataaagatacttttatcactagtttagcagagatcccaggcttgattttatccgctttgcttgttgatcggtttggccggaaagctactatgtcgtgcctgatgtttgcatgttgtgctttccttgggccactcgtacttcatcagaatgagttgctgacaactactcttttattcggagctcgtgcttgtggcaccggtgccactacaactttatgtctatatgcccccgaggtgtatccgacatatgttcgctcaacaggggtcgggatcgcaaccgccatcggtaagatcggcggggttatttgccccctcgtcgccgtgggcatgctgcggagctgccatcagatggaagcggtgctggtgtttgagctggtgctgttcctcgctggggtctcctgcatcctcttccctgtggagaccaagggccgagaaatggactgagcacgcacggtggtggtagctcagcacatttgggcatccagatgggcttgtggttcatcttgattctgtataaacacaactctactacatccgcgacaagcttagcggatatgcaaaggggtgtaaacaggagctatagtaattacgagaaagaactggcaatgagcaatatttgtaacaggattattgttatagaacttcctcatcatcagtcaggaggtaaataaatatgtgaagttaaatagtaaccatgtggtggacagtgattataaacgaggatattctcgtggtgctggatatgcccaacgtcaattcgttgcgggcaacacacaacctaacgcgtgcctccaaacagctatcaattaattatcattacttg

SEQ ID NO: 4670 - DNA, 1978 bp, Zea Mays
gttcgtcttaccgcctcccaacaaacagcgagcggcgcgacctaagccgctctgcgcccaccggccagccggggcggagagggaccgaccgctcctccgttcgaagtgccggtcctgagtcaccggcgtcgcccgcatccgctgctcagctcgcccgccagcctggtggcgatcggcatcctcttttactccagaaaaataaagatcttctcgcaaaagaaaaaaaggaaaaaaaagagaaaatgtcaatgcactgcaatggttgattctgaaacttggatcagatagacactgatactcattctactcatcaaataagcgttgtcagatcacggtgctacacacactggttcagtgaatctgcaggtgctgctcatatggaaacatacactactgatgacgctcttacgctcatggggtttggaaagttccaagcacttgtccttgcatatgcaggaatgggctgggttgcagaagccatggaggtcatgctattgtcattccttggaccagtggtgcgggaagagtggaatgtctctccccaagacgagagtctgctatccagtgttgtgtttgctggcatgctaatcggagcttgtgcttggggctttatttccgacagatacggaagaaagaaatcgtggcacttggatggctgtactatcagcattgagttggaggtggttgctggcattgtcttcccttccatgcttcctcttgcttcttttcttcagaatcacacctgagtcaccacgctatctttgcgcacaaaatagaatgactgatgcaaggtttgtcctggagagaatggccattgcaaaccaagcagctcttcctatgggagttctcacataccaccaagaaacaaaaactgaatgcattactcatgtttctgaggatgaacatcttattccagtcagagagaaggaacatacagataggaatgctattagttccaaatctggtgctgttgctgtattgcacaagctattatcacataacttgctcaaatcaactctacttctttggtttgtttactatgccagttccttcgcttattatgggataacattgctgacatcacaactaagtgatgtgaatagaagctgtaaatctgatctggtctttgaagtgcaccaaaataatggcaatctttataaagatacttttatcactagtttagcagagatcccaggcttgattttatccgctttgcttgttgatcggtttggccggaaagctactatgtcgtgcctgatgtttgcatgttgtgctttccttgggccactcgtacttcatcagaatgagttgctgacaactactcttttattcggagctcgtgcttgtggcaccggtgccactacaactttatgtctatatgcccccgaggtgtatccgacatatgttcgctcaacaggggtcgggatcgcaaccgccatcggtaagatcggcggggttatttgccccctcgtcgccgtgggcatgctgcggagctgccatcagatggaagcggtgctggtgtttgagctggtgctgttcctcgctggggtctcctgcatcctcttccctgtggagaccaagggccgagaaatggactgagcacgcacggtggtggtagctcagcacatttgggcatccagatgggcttgtggttcatcttgattctgtataaacacaactctactacatccgcgacaagcttagcggatatgcaaaggggtgtaaacaggagctatagtaattacgagaaagaactggcaatgagcaatatttgtaacaggattattgttatagaacttcctcatcatcagtcaggaggtaaataaatatgtgaagttaaatagtaaccatgtggtggacagtgattataaacgaggatattctcgtggtgctggatatgcccaacgtcaattcgttgcgggcaacacacaacctaacgcgtgcctccaaacagctatcaattaattatcattacttg

SEQ ID NO: 4671 - DNA, 2938 bp, Zea Mays
gttcgtcttaccgcctcccaacaaacagcgagcggcgcgacctaagccgctctgcgcccaccggccagccggggcggagagggaccgaccgctcctccgttcgaagtgccggtcctgagtcaccggcgtcgcccgcatccgctgctcagctcgcccgccagcctggtggcgatcggcatcctcttttactccagaaaaataaagatcttctcgcaaaagaaaaaaaggaaaaaaaagagaaaatgtcaatgcactgcaatggttgattctgaaacttggatcagatagacactgatactcattctactcatcaaataagcgttgtcagatcacggtgctacacacactggttcagtgaatctgcaggtgctgctcatatggaaacatacactactgatgacgctcttacgctcatggggtttggaaagttccaagcacttgtccttgcatatgcaggaatgggctgggttgcagaagccatggaggtcatgctattgtcattccttggaccagtggtgcgggaagagtggaatgtctctccccaagacgagagtctgctatccagtgttgtgtttgctggcatgctaatcggagcttgtgcttggggctttatttccgacagatacggaagaaagtaaggatctgctccagcaaactctttatgtttcaatttacaggccttggcttcttaaggcaggcaggaataatttcaagtcctttaggattcacaggaaactgatttcatttctcactagtctgaagatattggatctaatcacacctacgtccaaataaccaatacagttttgacagtggtcgtggtactggtattagttttactatgtgacctgtggttggaatcagttcactgagtcaataaaccaatgagtcatttcagttagcgacctcatgtagtgaatcagcacggtaaaaggcaagcaatttgttcttctctttcgtctagtttgcacctctctcttttatcttccctcttgctacctgtaaaataataaaaccagagtgggatgcctcataaacggccagatttgcataaacaatttgataacccccagcactgctaaatagtgattttgccttcacaaagtcaggacgattatggttttcagtatagggtatagtttgtactagttgtcgttttagctcttttttatgtctatattcaaatacatgaagatgaacctagacacatatataaaacacatacatcaagtgttgtatgaacctactaattaattaaaacgaattttaatctgggacagagggagcattggttataccctattttttactatgattcttctctatgtttgatttgtgccaaacatacatgaaataaaccttgtattttttgtcaggactgttttattgctttcgactctgcttactagtggattgggtcttctaagtgctctatctattaactacttgtgcttgctggttcttcggttttttgtcggcataggagtgggcagtgggcatgtattttcatcttggttcttggagttcgttcctgcaggaaatcgtggcacttggatggttattttttcctttttttggactattggcacagtcttggaggcttcacttgcatgggctgtactatcagcattgagttggaggtggttgctggcattgtcttcccttccatgcttcctcttgcttcttttcttcagaatcacacctgagtcaccacgctatctttgcgcacaaaatagaatgactgatgcaaggtttgtcctggagagaatggccattgcaaaccaagcagctcttcctatgggagttctcacataccaccaagaaacaaaaactgaatgcattactcatgtttctgaggatgaacatcttattccagtcagagagaaggaacatacagataggaatgctattagttccaaatctggtgctgttgctgtattgcacaagctattatcacataacttgctcaaatcaactctacttctttggtttgtttactatgccagttccttcgcttattatgggataacattgctgacatcacaactaagtgatgtgaatagaagctgtaaatctgatctggtctttgaagtgcaccaaaataatggcaatctttataaagatacttttatcactagtttagcagagatcccaggcttgattttatccgctttgcttgttgatcggtttggccggaaagctactatgtcgtgcctgatgtttgcatgttgtgctttccttgggccactcgtacttcatcagaatgagttgctgacaactactcttttattcggagctcgtgcttgtggcaccggtgccactacaactttatgtctatatgcccccgaggtgtatccgacatatgttcgctcaacaggggtcgggatcgcaaccgccatcggtaagatcggcggggttatttgccccctcgtcgccgtgggcatgctgcggagctgccatcagatggaagcggtgctggtgtttgagctggtgctgttcctcgctggggtctcctgcatcctcttccctgtggagaccaagggccgagaaatggactgagcacgcacggtggtggtagctcagcacatttgggcatccagatgggcttgtggttcatcttgattctgtataaacacaactctactacatccgcgacaagcttagcggatatgcaaaggggtgtaaacaggagctatagtaattacgagaaagaactggcaatgagcaatatttgtaacaggattattgttatagaacttcctcatcatcagtcaggaggtaaataaatatgtgaagttaaatagtaaccatgtggtggacagtgattataaacgaggatattctcgtggtgctggatatgcccaacgtcaattcgttgcgggcaacacacaacctaacgcgtgcctccaaacagctatcaattaattatcattacttg

SEQ ID NO: 4672 - DNA, 2581 bp, Zea Mays
cggccacgcaactcttgcgaccacacgggcatttggtctcctccattcgttgagtgcgcgcgcggcgcggcgcggcggcttgccattacccgtcctctctcttaccccgtcgtcctcttcacctgcaattgagcatttgcttgctccccctccccgacaaaaaccccctgtcccgtcgagcctcgcatccctagttccctacaagcaaggaaggaaacccgggcaacacgacaccggcggtgccagtgccacggaaaattagccggctccctccccgacgtccggcggcggccgagcaacggtgctggctcccaacatggagacatataccacagacgacgcgcttaccattatggggtttggaaaattccaagcgcttgttcttttctacgctggaatgggctgggttgcagaagctatggagctcatgctcttgtcgtttctcgggccattcatacgagaggagtggaacgtctccccagagaacgagagcctcctttcgagtgttgtctttgctggcatgctgctaggtgcctgtgcttggggctttgtttccgacaaatatggacggagcggtattggtagtggtttgctcatggcatccggctggactagatttgcttcgtcagcaaactaactagccatgtcagcaatctacctcatacaatgattcacaaggattacagggtaaaagcatagataattttccttcatttcctgtttgtgttctctctgctttttctatatctgaacgccaaggacggattcagaacaacattacaatatcactttgagaactatcttgaagatttagttgtataatgctttggcttggaaattgggtactacaaaactaatttttgcagaggatctaatcagaactttcatgaaactagaaagggataagttggatattttcttttcttccaatgccattccttactctatttcaacctcctcctctgtttcaagcataagtgagataaaacttacatttcccctatttcaggactggtttaatattttcaactctatttactagtggaatgggttttctaagcgctttatctcctaactacttatgcttggtggctcttcggtttctggttggagtaggagtgggtggcagccatgtgtttatatcttggtttttggagtttgttcctgcacaaaatcgtggcacttggatggttattttctcccttttctggactctcggcacgatcttggaagcttcacttgcatgggtcgtattgccagcattgaattggaggtggctgctagtcttcaccgcccttccatgcttcctcttgcttcctttctttggactaacacctgagtctccgcgctacctttgtgcacaaaatagaatgtctgatgccacatctgttctagagagaatggccaacgcaaaccaatcagctcttcccccgggagttctcacgtacaatagacaaacaaaatgtgaccacgacgttctcgctcccgagagtgaatgtcttcttcctgtcagagagaaggaatgcacagttgacaatgccaagagctccgaatctggcagtcttgctgcactgcgcatgctattatcgcgcgaactgctcagatcaactctgcttctttggtttgttttctatgcaaattcctttgcttattacgggttagtattgctgacatcgcagttgagtgatgcaaataaaagttgtgcatctggtgtgtcttttggtctgcgccaaaaggaaatcaatctttacaaagacactttcatcactagtttagcagaaatcccaggtttatttttgtctgctgttcttgttgattggtttggtcgaaaagcttcgatgtggtctatgatgttcgcatgctgtgctttccttggaccacttgtacttcaacagactgagttgttgacaactattcttctatttggtgcccgtgcatgtgccatggggagctttacagtcttgtgcctttatgctccagaggtgtatccaacatttgtccggtcaaccggtgcaggaattgcgaccgccattggtaggattggtggggttgtttgccctctcgttgctgtcgccatgctgcggagctgccatcagatggaagcactcattgtgtttgaggtgatattatgccttgctgcagttgcctgcatgttcttccctgtagagaccaagggccgtggaatggactgatgcaatatcaggcttcagcatctagatgagcttgtagttcatcactgtttgttttatgccatcattatgtacagagaatatacatgtaacatggtgtggatagttcctcaaaatatgtgcaggactttccaaatttgtaagacagattttgtactgaaagacagctggttctgtactgccaaaacactgaaagacagagttgtattactcctcaaaaaaaaaagaaaaaagaaaaaaagctaacaaaaaaaaaaaaaaacggcttgcatatgtcaatcgtcagcccacccgtaacccgtggatacataattatgatcccaaatccttttagcacttgagacaaaagcggcacaccccggcggggggcgtgtgagtaggaacgaaccccg

SEQ ID NO: 4673 - DNA, 2185 bp, Zea Mays
cggccacgcaactcttgcgaccacacgggcatttggtctcctccattcgttgagtgcgcgcgcggcgcggcgcggcggcttgccattacccgtcctctctcttaccccgtcgtcctcttcacctgcaattgagcatttgcttgctccccctccccgacaaaaaccccctgtcccgtcgagcctcgcatccctagttccctacaagcaaggaaggaaacccgggcaacacgacaccggcggtgccagtgccacggaaaattagccggctccctccccgacgtccggcggcggccgagcaacggtgctggctcccaacatggagacgagagcctcctttcgagtgttgtctttgctggcatgctgctaggtgcctgtgcttggggctttgtttccgacaaatatggacggaggattttgaagcataaagaaatgtgtgcttgatatgatgtgattataaccgcaactgcttaccaaattacaacatcaatgctgaataatgtaattcagtaacaagttaccagcacatttaaacctaatggcaaatttgacaaaaaaaatgaaggaatatgcaatgttttctctagcataaattctactttcatgcaacggtattggtagtggtttgctcatggcatccggctggactagatttgcttcgtcagcaaactaactagccatgtcagcaatctacctcatacaatgattcacaaggattacagggagtgggtggcagccatgtgtttatatcttggtttttggagtttgttcctgcacaaaatcgtggcacttggatggttattttctcccttttctggactctcggcacgatcttggaagcttcacttgcatgggtcgtattgccagcattgaattggaggtggctgctagtcttcaccgcccttccatgcttcctcttgcttcctttctttggactaacacctgagtctccgcgctacctttgtgcacaaaatagaatgtctgatgccacatctgttctagagagaatggccaacgcaaaccaatcagctcttcccccgggagttctcacgtacaatagacaaacaaaatgtgaccacgacgttctcgctcccgagagtgaatgtcttcttcctgtcagagagaaggaatgcacagttgacaatgccaagagctccgaatctggcagtcttgctgcactgcgcatgctattatcgcgcgaactgctcagatcaactctgcttctttggtttgttttctatgcaaattcctttgcttattacgggttagtattgctgacatcgcagttgagtgatgcaaataaaagttgtgcatctggtgtgtcttttggtctgcgccaaaaggaaatcaatctttacaaagacactttcatcactagtttagcagaaatcccaggtttatttttgtctgctgttcttgttgattggtttggtcgaaaagcttcgatgtggtctatgatgttcgcatgctgtgctttccttggaccacttgtacttcaacagactgagttgttgacaactattcttctatttggtgcccgtgcatgtgccatggggagctttacagtcttgtgcctttatgctccagaggtgtatccaacatttgtccggtcaaccggtgcaggaattgcgaccgccattggtaggattggtggggttgtttgccctctcgttgctgtcgccatgctgcggagctgccatcagatggaagcactcattgtgtttgaggtgatattatgccttgctgcagttgcctgcatgttcttccctgtagagaccaagggccgtggaatggactgatgcaatatcaggcttcagcatctagatgagcttgtagttcatcactgtttgttttatgccatcattatgtacagagaatatacatgtaacatggtgtggatagttcctcaaaatatgtgcaggactttccaaatttgtaagacagattttgtactgaaagacagctggttctgtactgccaaaacactgaaagacagagttgtattactcctcaaaaaaaaaagaaaaaagaaaaaaagctaacaaaaaaaaaaaaaaacggcttgcatatgtcaatcgtcagcccacccgtaacccgtggatacataattatgatcccaaatccttttagcacttgagacaaaagcggcacaccccggcggggggcgtgtgagtaggaacgaaccccg

SEQ ID NO: 4674 - DNA, 2820 bp, Zea Mays
ctcctccattcgttgagtgcgcgcgcggcgcggcgcggcggcttgccattacccgtcctctctcttaccccgtcgtcctcttcacctgcaattgagcatttgcttgctccccctccccgacaaaaaccccctgtcccgtcgagcctcgcatccctagttccctacaagcaaggaaggaaacccgggcaacacgacaccggcggtgccagtgccacggaaaattagccggctccctccccgacgtccggcggcggccgagcaacggtgctggctcccaacatggagacatataccacagacgacgcgcttaccattatggggtttggaaaattccaagcgcttgttcttttctacgctggaatgggctgggttgcagaagctatggagctcatgctcttgtcgtttctcgggccattcatacgagaggagtggaacgtctccccagagaacgagagcctcctttcgagtgttgtctttgctggcatgctgctaggtgcctgtgcttggggctttgtttccgacaaatatggacggaggattttgaagcataaagaaatgtgtgcttgatatgatgtgattataaccgcaactgcttaccaaattacaacatcaatgctgaataatgtaattcagtaacaagttaccagcacatttaaacctaatggcaaatttgacaaaaaaaatgaaggaatatgcaatgttttctctagcataaattctactttcatgcaagtacgtttggacctttttactacaaaagcatctatttatcatctcaaatttgagaaccaatgcaattttcatctttacagcggtattggtagtggtttgctcatggcatccggctggactagatttgcttcgtcagcaaactaactagccatgtcagcaatctacctcatacaatgattcacaaggattacagggtaaaagcatagataattttccttcatttcctgtttgtgttctctctgctttttctatatctgaacgccaaggacggattcagaacaacattacaatatcactttgagaactatcttgaagatttagttgtataatgctttggcttggaaattgggtactacaaaactaatttttgcagaggatctaatcagaactttcatgaaactagaaagggataagttggatattttcttttcttccaatgccattccttactctatttcaacctcctcctctgtttcaagcataagtgagataaaacttacatttcccctatttcaggactggtttaatattttcaactctatttactagtggaatgggttttctaagcgctttatctcctaactacttatgcttggtggctcttcggtttctggttggagtaggagtgggtggcagccatgtgtttatatcttggtttttggagtttgttcctgcacaaaatcgtggcacttggatggttattttctcccttttctggactctcggcacgatcttggaagcttcacttgcatgggtcgtattgccagcattgaattggaggtggctgctagtcttcaccgcccttccatgcttcctcttgcttcctttctttggactaacacctgagtctccgcgctacctttgtgcacaaaatagaatgtctgatgccacatctgttctagagagaatggccaacgcaaaccaatcagctcttcccccgggagttctcacgtacaatagacaaacaaaatgtgaccacgacgttctcgctcccgagagtgaatgtcttcttcctgtcagagagaaggaatgcacagttgacaatgccaagagctccgaatctggcagtcttgctgcactgcgcatgctattatcgcgcgaactgctcagatcaactctgcttctttggtttgttttctatgcaaattcctttgcttattacgggttagtattgctgacatcgcagttgagtgatgcaaataaaagttgtgcatctggtgtgtcttttggtctgcgccaaaaggaaatcaatctttacaaagacactttcatcactagtttagcagaaatcccaggtttatttttgtctgctgttcttgttgattggtttggtcgaaaagcttcgatgtggtctatgatgttcgcatgctgtgctttccttggaccacttgtacttcaacagactgagttgttgacaactattcttctatttggtgcccgtgcatgtgccatggggagctttacagtcttgtgcctttatgctccagaggtgtatccaacatttgtccggtcaaccggtgcaggaattgcgaccgccattggtaggattggtggggttgtttgccctctcgttgctgtcgccatgctgcggagctgccatcagatggaagcactcattgtgtttgaggtgatattatgccttgctgcagttgcctgcatgttcttccctgtagagaccaagggccgtggaatggactgatgcaatatcaggcttcagcatctagatgagcttgtagttcatcactgtttgttttatgccatcattatgtacagagaatatacatgtaacatggtgtggatagttcctcaaaatatgtgcaggactttccaaatttgtaagacagattttgtactgaaagacagctggttctgtactgccaaaacactgaaagacagagttgtattactcctcaaaaaaaaaagaaaaaagaaaaaaagctaacaaaaaaaaaaaaaaacggcttgcatatgtcaatcgtcagcccacccgtaacccgtggatacataattatgatcccaaatccttttagcacttgagacaaaagcggcacaccccggcggggggcgtgtgagtaggaacgaaccccg

SEQ ID NO: 4675 - DNA, 1863 bp, Zea Mays
attcgttgagtgcgcgcgcggcgcggcgcggcggcttgccattacccgtcctctctcttaccccgtcgtcctcttcacctgcaattgagcatttgcttgctccccctccccgacaaaaaccccctgtcccgtcgagcctcgcatccctagttccctacaagcaaggaaggaaacccgggcaacacgacaccggcggtgccagtgccacggaaaattagccggctccctccccgacgtccggcggcggccgagcaacggtgctggctcccaacatggagacatataccacagacgacgcgcttaccattatggggtttggaaaattccaagcgcttgttcttttctacgctggaatgggctgggttgcagaagctatggagctcatgctcttgtcgtttctcgggccattcatacgagaggagtggaacgtctccccagagaacgagagcctcctttcgagtgttgtctttgctggcatgctgctaggtgcctgtgcttggggctttgtttccgacaaatatggacggaggtcgtattgccagcattgaattggaggtggctgctagtcttcaccgcccttccatgcttcctcttgcttcctttctttggactaacacctgagtctccgcgctacctttgtgcacaaaatagaatgtctgatgccacatctgttctagagagaatggccaacgcaaaccaatcagctcttcccccgggagttctcacgtacaatagacaaacaaaatgtgaccacgacgttctcgctcccgagagtgaatgtcttcttcctgtcagagagaaggaatgcacagttgacaatgccaagagctccgaatctggcagtcttgctgcactgcgcatgctattatcgcgcgaactgctcagatcaactctgcttctttggtttgttttctatgcaaattcctttgcttattacgggttagtattgctgacatcgcagttgagtgatgcaaataaaagttgtgcatctggtgtgtcttttggtctgcgccaaaaggaaatcaatctttacaaagacactttcatcactagtttagcagaaatcccaggtttatttttgtctgctgttcttgttgattggtttggtcgaaaagcttcgatgtggtctatgatgttcgcatgctgtgctttccttggaccacttgtacttcaacagactgagttgttgacaactattcttctatttggtgcccgtgcatgtgccatggggagctttacagtcttgtgcctttatgctccagaggtgtatccaacatttgtccggtcaaccggtgcaggaattgcgaccgccattggtaggattggtggggttgtttgccctctcgttgctgtcgccatgctgcggagctgccatcagatggaagcactcattgtgtttgaggtgatattatgccttgctgcagttgcctgcatgttcttccctgtagagaccaagggccgtggaatggactgatgcaatatcaggcttcagcatctagatgagcttgtagttcatcactgtttgttttatgccatcattatgtacagagaatatacatgtaacatggtgtggatagttcctcaaaatatgtgcaggactttccaaatttgtaagacagattttgtactgaaagacagctggttctgtactgccaaaacactgaaagacagagttgtattactcctcaaaaaaaaaagaaaaaagaaaaaaagctaacaaaaaaaaaaaaaaacggcttgcatatgtcaatcgtcagcccacccgtaacccgtggatacataattatgatcccaaatccttttagcacttgagacaaaagcggcacaccccggcggggggcgtgtgagtaggaacgaaccccg

SEQ ID NO: 4676 - DNA, 3277 bp, Zea Mays
attcgttgagtgcgcgcgcggcgcggcgcggcggcttgccattacccgtcctctctcttaccccgtcgtcctcttcacctgcaattgagcatttgcttgctccccctccccgacaaaaaccccctgtcccgtcgagcctcgcatccctagttccctacaagcaaggaaggaaacccgggcaacacgacaccggcggtgccagtgccacggaaaattagccggctccctccccgacgtccggcggcggccgagcaacggtgctggctcccaacatggagacatataccacagacgacgcgcttaccattatggggtttggaaaattccaagcgcttgttcttttctacgctggaatgggctgggttgcagaagctatggagctcatgctcttgtcgtttctcgggccattcatacgagaggagtggaacgtctccccagagaacgagagcctcctttcgagtgttgtctttgctggcatgctgctaggtgcctgtgcttggggctttgtttccgacaaatatggacggaggtaaaagatttcctggtacaaacgctctcatggtttggctgccaactgcaaaccttcctgaccttgagtttatcataacctcaaattaaacacatcaattcttaaggctcaatctacatgtttctgaattctgatatcctgctatccaactatgacatatgtgctgataggatattcttctttgtaggattttgaagcataaagaaatgtgtgcttgatatgatgtgattataaccgcaactgcttaccaaattacaacatcaatgctgaataatgtaattcagtaacaagttaccagcacatttaaacctaatggcaaatttgacaaaaaaaatgaaggaatatgcaatgttttctctagcataaattctactttcatgcaagtacgtttggacctttttactacaaaagcatctatttatcatctcaaatttgagaaccaatgcaattttcatctttacagcggtattggtagtggtttgctcatggcatccggctggactagatttgcttcgtcagcaaactaactagccatgtcagcaatctacctcatacaatgattcacaaggattacagggtaaaagcatagataattttccttcatttcctgtttgtgttctctctgctttttctatatctgaacgccaaggacggattcagaacaacattacaatatcactttgagaactatcttgaagatttagttgtataatgctttggcttggaaattgggtactacaaaactaatttttgcagaggatctaatcagaactttcatgaaactagaaagggataagttggatattttcttttcttccaatgccattccttactctatttcaacctcctcctctgtttcaagcataagtgagataaaacttacatttcccctatttcaggactggtttaatattttcaactctatttactagtggaatgggttttctaagcgctttatctcctaactacttatgcttggtggctcttcggtttctggttggagtaggagtgggtggcagccatgtgtttatatcttggtttttggagtttgttcctgcacaaaatcgtggcacttggatggttattttctcccttttctggactctcggcacgatcttggaagcttcacttgcatgggtcgtattgccagcattgaattggaggtggctgctagtcttcaccgcccttccatgcttcctcttgcttcctttctttggactaacacctgagtctccgcgctacctttgtgcacaaaatagaatgtctgatgccacatctgttctagagagaatggccaacgcaaaccaatcagctcttcccccgggagttctcacgtacaatagacaaacaaaatgtgaccacgacgttctcgctcccgagagtgaatgtcttcttcctgtcagagagaaggaatgcacagttgacaatgccaagagctccgaatctggcagtcttgctgcactgcgcatgctattatcgcgcgaactgctcagatcaactctgcttctttggtttgttttctatgcaaattcctttgcttattacgggttagtattgctgacatcgcagttgagtgatgcaaataaaagttgtgcatctggtgtgtcttttggtctgcgccaaaaggaaatcaatctttacaaagacactttcatcactagtttagcagaaatcccaggtttatttttgtctgctgttcttgttgattggtttggtcgaaaagcttcgatgtggtctatgatgttcgcatgctgtgctttccttggaccacttgtacttcaacagactgagttgttgacaactattcttctatttggtgcccgtgcatgtgccatggggagctttacagtcttgtgcctttatgctccagaggtttgtatcagggtcttatggcgtataatattagttatataacatgcttaattgatctgtaaaactgccatcaattaagaatcatagaacaggttcaataccagagtatcccatccatttggaattttggatctactcgttctactttactgatcgcctttttatgtgtgcctatggttctttagactctaaacatgctttgccagtttcgttggtcaagttgtgttgcagttgcagcagagtatgccttcagctaattcccttctttcttttctaggtgtatccaacatttgtccggtcaaccggtgcaggaattgcgaccgccattggtaggattggtggggttgtttgccctctcgttgctgtcgccatgctgcggagctgccatcagatggaagcactcattgtgtttgaggtgatattatgccttgctgcagttgcctgcatgttcttccctgtagagaccaagggccgtggaatggactgatgcaatatcaggcttcagcatctagatgagcttgtagttcatcactgtttgttttatgccatcattatgtacagagaatatacatgtaacatggtgtggatagttcctcaaaatatgtgcaggactttccaaatttgtaagacagattttgtactgaaagacagctggttctgtactgccaaaacactgaaagacagagttgtattactcctcaaaaaaaaaagaaaaaagaaaaaaagctaacaaaaaaaaaaaaaaacggcttgcatatgtcaatcgtcagcccacccgtaacccgtggatacataattatgatcccaaatccttttagcacttgagacaaaagcggcacaccccggcggggggcgtgtgagtaggaacgaaccccg

SEQ ID NO: 4677 - DNA, 1994 bp, Zea Mays
attcgttgagtgcgcgcgcggcgcggcgcggcggcttgccattacccgtcctctctcttaccccgtcgtcctcttcacctgcaattgagcatttgcttgctccccctccccgacaaaaaccccctgtcccgtcgagcctcgcatccctagttccctacaagcaaggaaggaaacccgggcaacacgacaccggcggtgccagtgccacggaaaattagccggctccctccccgacgtccggcggcggccgagcaacggtgctggctcccaacatggagacatataccacagacgacgcgcttaccattatggggtttggaaaattccaagcgcttgttcttttctacgctggaatgggctgggttgcagaagctatggagctcatgctcttgtcgtttctcgggccattcatacgagaggagtggaacgtctccccagagaacgagagcctcctttcgagtgttgtctttgctggcatgctgctaggtgcctgtgcttggggctttgtttccgacaaatatggacggaggagtgggtggcagccatgtgtttatatcttggtttttggagtttgttcctgcacaaaatcgtggcacttggatggttattttctcccttttctggactctcggcacgatcttggaagcttcacttgcatgggtcgtattgccagcattgaattggaggtggctgctagtcttcaccgcccttccatgcttcctcttgcttcctttctttggactaacacctgagtctccgcgctacctttgtgcacaaaatagaatgtctgatgccacatctgttctagagagaatggccaacgcaaaccaatcagctcttcccccgggagttctcacgtacaatagacaaacaaaatgtgaccacgacgttctcgctcccgagagtgaatgtcttcttcctgtcagagagaaggaatgcacagttgacaatgccaagagctccgaatctggcagtcttgctgcactgcgcatgctattatcgcgcgaactgctcagatcaactctgcttctttggtttgttttctatgcaaattcctttgcttattacgggttagtattgctgacatcgcagttgagtgatgcaaataaaagttgtgcatctggtgtgtcttttggtctgcgccaaaaggaaatcaatctttacaaagacactttcatcactagtttagcagaaatcccaggtttatttttgtctgctgttcttgttgattggtttggtcgaaaagcttcgatgtggtctatgatgttcgcatgctgtgctttccttggaccacttgtacttcaacagactgagttgttgacaactattcttctatttggtgcccgtgcatgtgccatggggagctttacagtcttgtgcctttatgctccagaggtgtatccaacatttgtccggtcaaccggtgcaggaattgcgaccgccattggtaggattggtggggttgtttgccctctcgttgctgtcgccatgctgcggagctgccatcagatggaagcactcattgtgtttgaggtgatattatgccttgctgcagttgcctgcatgttcttccctgtagagaccaagggccgtggaatggactgatgcaatatcaggcttcagcatctagatgagcttgtagttcatcactgtttgttttatgccatcattatgtacagagaatatacatgtaacatggtgtggatagttcctcaaaatatgtgcaggactttccaaatttgtaagacagattttgtactgaaagacagctggttctgtactgccaaaacactgaaagacagagttgtattactcctcaaaaaaaaaagaaaaaagaaaaaaagctaacaaaaaaaaaaaaaaacggcttgcatatgtcaatcgtcagcccacccgtaacccgtggatacataattatgatcccaaatccttttagcacttgagacaaaagcggcacaccccggcggggggcgtgtgagtaggaacgaaccccg

SEQ ID NO: 4678 - DNA, 2848 bp, Zea Mays
attcgttgagtgcgcgcgcggcgcggcgcggcggcttgccattacccgtcctctctcttaccccgtcgtcctcttcacctgcaattgagcatttgcttgctccccctccccgacaaaaaccccctgtcccgtcgagcctcgcatccctagttccctacaagcaaggaaggaaacccgggcaacacgacaccggcggtgccagtgccacggaaaattagccggctccctccccgacgtccggcggcggccgagcaacggtgctggctcccaacatggagacatataccacagacgacgcgcttaccattatggggtttggaaaattccaagcgcttgttcttttctacgctggaatgggctgggttgcagaagctatggagctcatgctcttgtcgtttctcgggccattcatacgagaggagtggaacgtctccccagagaacgagagcctcctttcgagtgttgtctttgctggcatgctgctaggtgcctgtgcttggggctttgtttccgacaaatatggacggaggtaaaagatttcctggtacaaacgctctcatggtttggctgccaactgcaaaccttcctgaccttgagtttatcataacctcaaattaaacacatcaattcttaaggctcaatctacatgtttctgaattctgatatcctgctatccaactatgacatatgtgctgataggatattcttctttgtaggattttgaagcataaagaaatgtgtgcttgatatgatgtgattataaccgcaactgcttaccaaattacaacatcaatgctgaataatgtaattcagtaacaagttaccagcacatttaaacctaatggcaaatttgacaaaaaaaatgaaggaatatgcaatgttttctctagcataaattctactttcatgcaagtacgtttggacctttttactacaaaagcatctatttatcatctcaaatttgagaaccaatgcaattttcatctttacagcggtattggtagtggtttgctcatggcatccggctggactagatttgcttcgtcagcaaactaactagccatgtcagcaatctacctcatacaatgattcacaaggattacagggagtgggtggcagccatgtgtttatatcttggtttttggagtttgttcctgcacaaaatcgtggcacttggatggttattttctcccttttctggactctcggcacgatcttggaagcttcacttgcatgggtcgtattgccagcattgaattggaggtggctgctagtcttcaccgcccttccatgcttcctcttgcttcctttctttggactaacacctgagtctccgcgctacctttgtgcacaaaatagaatgtctgatgccacatctgttctagagagaatggccaacgcaaaccaatcagctcttcccccgggagttctcacgtacaatagacaaacaaaatgtgaccacgacgttctcgctcccgagagtgaatgtcttcttcctgtcagagagaaggaatgcacagttgacaatgccaagagctccgaatctggcagtcttgctgcactgcgcatgctattatcgcgcgaactgctcagatcaactctgcttctttggtttgttttctatgcaaattcctttgcttattacgggttagtattgctgacatcgcagttgagtgatgcaaataaaagttgtgcatctggtgtgtcttttggtctgcgccaaaaggaaatcaatctttacaaagacactttcatcactagtttagcagaaatcccaggtttatttttgtctgctgttcttgttgattggtttggtcgaaaagcttcgatgtggtctatgatgttcgcatgctgtgctttccttggaccacttgtacttcaacagactgagttgttgacaactattcttctatttggtgcccgtgcatgtgccatggggagctttacagtcttgtgcctttatgctccagaggtttgtatcagggtcttatggcgtataatattagttatataacatgcttaattgatctgtaaaactgccatcaattaagaatcatagaacaggttcaataccagagtatcccatccatttggaattttggatctactcgttctactttactgatcgcctttttatgtgtgcctatggttctttagactctaaacatgctttgccagtttcgttggtcaagttgtgttgcagttgcagcagagtatgccttcagctaattcccttctttcttttctaggtgtatccaacatttgtccggtcaaccggtgcaggaattgcgaccgccattggtaggattggtggggttgtttgccctctcgttgctgtcgccatgctgcggagctgccatcagatggaagcactcattgtgtttgaggtgatattatgccttgctgcagttgcctgcatgttcttccctgtagagaccaagggccgtggaatggactgatgcaatatcaggcttcagcatctagatgagcttgtagttcatcactgtttgttttatgccatcattatgtacagagaatatacatgtaacatggtgtggatagttcctcaaaatatgtgcaggactttccaaatttgtaagacagattttgtactgaaagacagctggttctgtactgccaaaacactgaaagacagagttgtattactcctcaaaaaaaaaagaaaaaagaaaaaaagctaacaaaaaaaaaaaaaaacggcttgcatatgtcaatcgtcagcccacccgtaacccgtggatacataattatgatcccaaatccttttagcacttgagacaaaagcggcacaccccggcggggggcgtgtgagtaggaacgaaccccg

SEQ ID NO: 4679 - DNA, 2215 bp, Zea Mays
attcgttgagtgcgcgcgcggcgcggcgcggcggcttgccattacccgtcctctctcttaccccgtcgtcctcttcacctgcaattgagcatttgcttgctccccctccccgacaaaaaccccctgtcccgtcgagcctcgcatccctagttccctacaagcaaggaaggaaacccgggcaacacgacaccggcggtgccagtgccacggaaaattagccggctccctccccgacgtccggcggcggccgagcaacggtgctggctcccaacatggagacatataccacagacgacgcgcttaccattatggggtttggaaaattccaagcgcttgttcttttctacgctggaatgggctgggttgcagaagctatggagctcatgctcttgtcgtttctcgggccattcatacgagaggagtggaacgtctccccagagaacgagagcctcctttcgagtgttgtctttgctggcatgctgctaggtgcctgtgcttggggctttgtttccgacaaatatggacggagcggtattggtagtggtttgctcatggcatccggctggactagatttgcttcgtcagcaaactaactagccatgtcagcaatctacctcatacaatgattcacaaggattacagggactggtttaatattttcaactctatttactagtggaatgggttttctaagcgctttatctcctaactacttatgcttggtggctcttcggtttctggttggagtaggagtgggtggcagccatgtgtttatatcttggtttttggagtttgttcctgcacaaaatcgtggcacttggatggttattttctcccttttctggactctcggcacgatcttggaagcttcacttgcatgggtcgtattgccagcattgaattggaggtggctgctagtcttcaccgcccttccatgcttcctcttgcttcctttctttggactaacacctgagtctccgcgctacctttgtgcacaaaatagaatgtctgatgccacatctgttctagagagaatggccaacgcaaaccaatcagctcttcccccgggagttctcacgtacaatagacaaacaaaatgtgaccacgacgttctcgctcccgagagtgaatgtcttcttcctgtcagagagaaggaatgcacagttgacaatgccaagagctccgaatctggcagtcttgctgcactgcgcatgctattatcgcgcgaactgctcagatcaactctgcttctttggtttgttttctatgcaaattcctttgcttattacgggttagtattgctgacatcgcagttgagtgatgcaaataaaagttgtgcatctggtgtgtcttttggtctgcgccaaaaggaaatcaatctttacaaagacactttcatcactagtttagcagaaatcccaggtttatttttgtctgctgttcttgttgattggtttggtcgaaaagcttcgatgtggtctatgatgttcgcatgctgtgctttccttggaccacttgtacttcaacagactgagttgttgacaactattcttctatttggtgcccgtgcatgtgccatggggagctttacagtcttgtgcctttatgctccagaggtgtatccaacatttgtccggtcaaccggtgcaggaattgcgaccgccattggtaggattggtggggttgtttgccctctcgttgctgtcgccatgctgcggagctgccatcagatggaagcactcattgtgtttgaggtgatattatgccttgctgcagttgcctgcatgttcttccctgtagagaccaagggccgtggaatggactgatgcaatatcaggcttcagcatctagatgagcttgtagttcatcactgtttgttttatgccatcattatgtacagagaatatacatgtaacatggtgtggatagttcctcaaaatatgtgcaggactttccaaatttgtaagacagattttgtactgaaagacagctggttctgtactgccaaaacactgaaagacagagttgtattactcctcaaaaaaaaaagaaaaaagaaaaaaagctaacaaaaaaaaaaaaaaacggcttgcatatgtcaatcgtcagcccacccgtaacccgtggatacataattatgatcccaaatccttttagcacttgagacaaaagcggcacaccccggcggggggcgtgtgagtaggaacgaaccccg

SEQ ID NO: 4680 - DNA, 2350 bp, Zea Mays
attcgttgagtgcgcgcgcggcgcggcgcggcggcttgccattacccgtcctctctcttaccccgtcgtcctcttcacctgcaattgagcatttgcttgctccccctccccgacaaaaaccccctgtcccgtcgagcctcgcatccctagttccctacaagcaaggaaggaaacccgggcaacacgacaccggcggtgccagtgccacggaaaattagccggctccctccccgacgtccggcggcggccgagcaacggtgctggctcccaacatggagacatataccacagacgacgcgcttaccattatggggtttggaaaattccaagcgcttgttcttttctacgctggaatgggctgggttgcagaagctatggagctcatgctcttgtcgtttctcgggccattcatacgagaggagtggaacgtctccccagagaacgagagcctcctttcgagtgttgtctttgctggcatgctgctaggtgcctgtgcttggggctttgtttccgacaaatatggacggaggactggtttaatattttcaactctatttactagtggaatgggttttctaagcgctttatctcctaactacttatgcttggtggctcttcggtttctggttggagtaggagtgggtggcagccatgtgtttatatcttggtttttggagtttgttcctgcacaaaatcgtggcacttggatggttattttctcccttttctggactctcggcacgatcttggaagcttcacttgcatgggtaatgataagttttgttccttttagatgcaattcttagcattctaaattgttcccagtcacatggtcatgatgtttaacaaaatagaatccgaatgaagagtaaattatagttataatgcgtatatagaaccagaaagaaccttgagtgcagtttctgaaaccatgtggaatgtgattcaagcatgtttctgaaaccatgtgcctgtgccagaatacaatgcttcgtgtcaagcacatatgtcataatgtcgtattgccagcattgaattggaggtggctgctagtcttcaccgcccttccatgcttcctcttgcttcctttctttggactaacacctgagtctccgcgctacctttgtgcacaaaatagaatgtctgatgccacatctgttctagagagaatggccaacgcaaaccaatcagctcttcccccgggagttctcacgtacaatagacaaacaaaatgtgaccacgacgttctcgctcccgagagtgaatgtcttcttcctgtcagagagaaggaatgcacagttgacaatgccaagagctccgaatctggcagtcttgctgcactgcgcatgctattatcgcgcgaactgctcagatcaactctgcttctttggtttgttttctatgcaaattcctttgcttattacgggttagtattgctgacatcgcagttgagtgatgcaaataaaagttgtgcatctggtgtgtcttttggtctgcgccaaaaggaaatcaatctttacaaagacactttcatcactagtttagcagaaatcccaggtttatttttgtctgctgttcttgttgattggtttggtcgaaaagcttcgatgtggtctatgatgttcgcatgctgtgctttccttggaccacttgtacttcaacagactgagttgttgacaactattcttctatttggtgcccgtgcatgtgccatggggagctttacagtcttgtgcctttatgctccagaggtgtatccaacatttgtccggtcaaccggtgcaggaattgcgaccgccattggtaggattggtggggttgtttgccctctcgttgctgtcgccatgctgcggagctgccatcagatggaagcactcattgtgtttgaggtgatattatgccttgctgcagttgcctgcatgttcttccctgtagagaccaagggccgtggaatggactgatgcaatatcaggcttcagcatctagatgagcttgtagttcatcactgtttgttttatgccatcattatgtacagagaatatacatgtaacatggtgtggatagttcctcaaaatatgtgcaggactttccaaatttgtaagacagattttgtactgaaagacagctggttctgtactgccaaaacactgaaagacagagttgtattactcctcaaaaaaaaaagaaaaaagaaaaaaagctaacaaaaaaaaaaaaaaacggcttgcatatgtcaatcgtcagcccacccgtaacccgtggatacataattatgatcccaaatccttttagcacttgagacaaaagcggcacaccccggcggggggcgtgtgagtaggaacgaaccccg

SEQ ID NO: 4681 - DNA, 2243 bp, Zea Mays
attcgttgagtgcgcgcgcggcgcggcgcggcggcttgccattacccgtcctctctcttaccccgtcgtcctcttcacctgcaattgagcatttgcttgctccccctccccgacaaaaaccccctgtcccgtcgagcctcgcatccctagttccctacaagcaaggaaggaaacccgggcaacacgacaccggcggtgccagtgccacggaaaattagccggctccctccccgacgtccggcggcggccgagcaacggtgctggctcccaacatggagacatataccacagacgacgcgcttaccattatggggtttggaaaattccaagcgcttgttcttttctacgctggaatgggctgggttgcagaagctatggagctcatgctcttgtcgtttctcgggccattcatacgagaggagtggaacgtctccccagagaacgagagcctcctttcgagtgttgtctttgctggcatgctgctaggtgcctgtgcttggggctttgtttccgacaaatatggacggaggagtgggtggcagccatgtgtttatatcttggtttttggagtttgttcctgcacaaaatcgtggcacttggatggttattttctcccttttctggactctcggcacgatcttggaagcttcacttgcatgggtaatgataagttttgttccttttagatgcaattcttagcattctaaattgttcccagtcacatggtcatgatgtttaacaaaatagaatccgaatgaagagtaaattatagttataatgcgtatatagaaccagaaagaaccttgagtgcagtttctgaaaccatgtggaatgtgattcaagcatgtttctgaaaccatgtgcctgtgccagaatacaatgcttcgtgtcaagcacatatgtcataatgtcgtattgccagcattgaattggaggtggctgctagtcttcaccgcccttccatgcttcctcttgcttcctttctttggactaacacctgagtctccgcgctacctttgtgcacaaaatagaatgtctgatgccacatctgttctagagagaatggccaacgcaaaccaatcagctcttcccccgggagttctcacgtacaatagacaaacaaaatgtgaccacgacgttctcgctcccgagagtgaatgtcttcttcctgtcagagagaaggaatgcacagttgacaatgccaagagctccgaatctggcagtcttgctgcactgcgcatgctattatcgcgcgaactgctcagatcaactctgcttctttggtttgttttctatgcaaattcctttgcttattacgggttagtattgctgacatcgcagttgagtgatgcaaataaaagttgtgcatctggtgtgtcttttggtctgcgccaaaaggaaatcaatctttacaaagacactttcatcactagtttagcagaaatcccaggtttatttttgtctgctgttcttgttgattggtttggtcgaaaagcttcgatgtggtctatgatgttcgcatgctgtgctttccttggaccacttgtacttcaacagactgagttgttgacaactattcttctatttggtgcccgtgcatgtgccatggggagctttacagtcttgtgcctttatgctccagaggtgtatccaacatttgtccggtcaaccggtgcaggaattgcgaccgccattggtaggattggtggggttgtttgccctctcgttgctgtcgccatgctgcggagctgccatcagatggaagcactcattgtgtttgaggtgatattatgccttgctgcagttgcctgcatgttcttccctgtagagaccaagggccgtggaatggactgatgcaatatcaggcttcagcatctagatgagcttgtagttcatcactgtttgttttatgccatcattatgtacagagaatatacatgtaacatggtgtggatagttcctcaaaatatgtgcaggactttccaaatttgtaagacagattttgtactgaaagacagctggttctgtactgccaaaacactgaaagacagagttgtattactcctcaaaaaaaaaagaaaaaagaaaaaaagctaacaaaaaaaaaaaaaaacggcttgcatatgtcaatcgtcagcccacccgtaacccgtggatacataattatgatcccaaatccttttagcacttgagacaaaagcggcacaccccggcggggggcgtgtgagtaggaacgaaccccg

SEQ ID NO: 4682 - DNA, 2994 bp, Zea Mays
gttagacaataaaccaaacaactggggttcttcaactcaaacgaaaagctgtggcttcttaagcaggaaaccaactagtaggcaagtaaagcagccaacctttttgacagatgaaaatcgaggacccacatgtatgaagatgactggcaatcatcttgggcatgactggcaataatctcgagcgcatgccgtatgcgaaagaaaaaatctctcgtctgcagtccagcttggaccgtggggaagcagcatatcctttgcggccgcaagagacgcggcgtagaacaaaggagccgccaagacggcaaggcgccaaggcgaccggacaggcctaggcgaagcgggcgcagctcctgccggtggtgggtagtggccctagcaataaacatcttgcccaaccggctctcgctacgcgcctacgcttcgtcaacaccggaaccgcccccaccccgccccgagcgccaattgcaccgccgctcccggccaaaccggccaagtcaacggcgcatccacttctccttaccatcccggaggtaatcttgcgccgattcggtgccgatttgcgccatccgcgaccggaggctccgccgggtcttgtgttcttgcggggcgggggctcaggacaacctggcctctgcttgattggattcggggcgttcggcgcctccagctcgcgatctttcctgccggtttcgtcgaccgctggtcaacctggccggtcggtcccgggggctcttcacctccgtgctgcctgccaccgtcgctttagtcaagtctcggccaagattttagctatctccggtcaaaaggctttaccgattcttggattggtggcttcttgggggcgagaagccggttcctgtttcgtctcttgtgctccagcatgttctgtagcacaccggttccccatctccagtgaaggtgttcgtgtgctcttggttttgtgcctcccggaatcgttcccggaaagctacttttggccgctgcggcgatggcgtcgagcaccagcgagatggccgaggggaaggagaagctgaagaggtccggcagcttgggaagcaacgatacgtatgtgcgtgcagacaagattgatcttacgagcctcgacatccagctggagaaccagctcaccaagacctggggcaaagccaatctcaaatcccaggggccaaaggaggagtgggagatcgaccttgcaaagctggagatccgctatgtcatcgctcaggggacgtatggcacggtctaccggggcacctacgatggacaggacgtcgcagtgaagcttttggattggggagaagatggttttgccacagaggctgaaactgctgctttacgaacatcatttaagacggaggttgctgtttggcataagctcagccaccctaatgttacaaagtttgttggtgcatctatggggaccacagaccttaagattccatcaaacaattccaatggtgctgcacgtacaaatttgccagcaagagcatgttgtgttgtggtagagtatcttgctggaggaactttgaagcaatatttgataaagaatagccgacggaagcttgcttataaagttgtggtccagcttgcattggatttggccagaggattgagctatctgcactccagaaagattgtacatcgggatgtgaaaagcgaaaacatgctgcttactccacagagaaaccttaagattgccgatttcggtgttgctcgtgttgaggctcagaatccaaaggacatgactggtgcaacaggcacacttggttatatggctccagaggttcttgatggtaagccatacaacaggaagtgtgatgtttatagttttggcatttgtttatgggaaatctattgctgtgacatgccttacccagacctaagttttgccgatgtctcatctgccgttgttcaccagaatttgcgcccagacattcctcgctgctgcccaagcgcatttgcgaatgttatgcggaaatgctgggatgcaaaccctgataaacgccctgatatggatgaagtggtgcagcttttagaggctctggacacgagcaaaggcggtggcatgatacctgatggccaatcatcaggatgcttatgcttcacaaaggctcgtggtccatagatacttttcatggccattttgagacatgctggtgctgtggctattgttgttcttttcgcccttaaatgtagtagaatcagttcattagttatgagactcaatgtcggctggctaaactgcactttctaaaactcgctcgttatggcacttctctcatcgcttggaataaggtcacttgtctaaagaacaaaggtggtcttggagtgcttaatccgagaattcagaatgtggcccttctgatgaaatttgttcataagttttacaatagactggacattccttgggtccatatggtgcgggactcctactattcttcggtcagatcccccactgctctcataagaaagggcccttctggtggagagatgttacacaattactcacctacttcagaggatatgccatgcctcgtgtgggtgatggaagcattatcctcttttggcaggatgtttggaacaatcacgcccccatgacggctttcccctgcctctattccttagcaaaaaaaaataaggaatccacaatgctggcattcatcagtaatgtctttagaagataattttcacactcctctgtcatgcaggctcaggaatacattatcttttcatatatgatcgaatgctggaagctagggaagagacggataaatggatttacccttaggaaacaacaagttcatctcctcgaaattctataatatcatctttgcatccatcaatcctctcgcgattttttttatggatttggtctcatctttcggctgactgcctgactgcgtaacccaaacgctgtattaggattcccatcttttgcatatccttattggagttaacctaatgttggttaataaagttatgcgacaacttgtc

SEQ ID NO: 4683 - DNA, 3198 bp, Zea Mays
gtggcttcttaagcaggaaaccaactagtaggcaagtaaagcagccaacctttttgacagatgaaaatcgaggacccacatgtatgaagatgactggcaatcatcttgggcatgactggcaataatctcgagcgcatgccgtatgcgaaagaaaaaatctctcgtctgcagtccagcttggaccgtggggaagcagcatatcctttgcggccgcaagagacgcggcgtagaacaaaggagccgccaagacggcaaggcgccaaggcgaccggacaggcctaggcgaagcgggcgcagctcctgccggtggtgggtagtggccctagcaataaacatcttgcccaaccggctctcgctacgcgcctacgcttcgtcaacaccggaaccgcccccaccccgccccgagcgccaattgcaccgccgctcccggccaaaccggccaagtcaacggcgcatccacttctccttaccatcccggaggtaatcttgcgccgattcggtgccgatttgcgccatccgcgaccggaggctccgccgggtcttgtgttcttgcggggcgggggctcaggacaacctggcctctgcttgattggattcggggcgttcggcgcctccagctcgcgatctttcctgccggtttcgtcgaccgctggtcaacctggccggtcggtcccgggggctcttcacctccgtgctgcctgccaccgtcgctttaggtcggtatagtacagctgcatcctctctttacttgttggattggatccaccggtgtctatctcctctcctgccaggtcacggcctaattcgtggaattttgtttggtggtgcatatctccagtcaagtctcggccaagattttagctatctccggtcaaaaggctttaccgattcttggattggtggcttcttgggggcgagaagccggttcctgtttcgtctcttgtgctccagcatgttctgtagcacaccggttccccatctccagtgaaggtgttcgtgtgctcttggttttgtgcctcccggaatcgttcccggaaagctacttttggccgctgcggcgatggcgtcgagcaccagcgagatggccgaggggaaggagaagctgaagaggtccggcagcttgggaagcaacgatacgtatgtgcgtgcagacaagattgatcttacgagcctcgacatccagctggagaaccagctcaccaagacctggggcaaagccaatctcaaatcccaggggccaaaggaggagtgggagatcgaccttgcaaagctggagatccgctatgtcatcgctcaggggacgtatggcacggtctaccggggcacctacgatggacaggacgtcgcagtgaagcttttggattggggagaagatggttttgccacagaggctgaaactgctgctttacgaacatcatttaagacggaggttgctgtttggcataagctcagccaccctaatgttacaaaggtgaatattttcatgaattcctgtgcatgttcatgtctgtaactccggatagatgcttgtttatgtagtaaagctgttgatccttagcttgctgattattaccaaaatttgcccatgaccagttcatagcagtttgttggtgcatctatggggaccacagaccttaagattccatcaaacaattccaatggtgctgcacgtacaaatttgccagcaagagcatgttgtgttgtggtagagtatcttgctggaggaactttgaagcaatatttgataaagaatagccgacggaagcttgcttataaagttgtggtccagcttgcattggatttggccagaggattgagctatctgcactccagaaagattgtacatcgggatgtgaaaagcgaaaacatgctgcttactccacagagaaaccttaagattgccgatttcggtgttgctcgtgttgaggctcagaatccaaaggacatgactggtgcaacaggcacacttggttatatggctccagaggttcttgatggtaagccatacaacaggaagtgtgatgtttatagttttggcatttgtttatgggaaatctattgctgtgacatgccttacccagacctaagttttgccgatgtctcatctgccgttgttcaccagaatttgcgcccagacattcctcgctgctgcccaagcgcatttgcgaatgttatgcggaaatgctgggatgcaaaccctgataaacgccctgatatggatgaagtggtgcagcttttagaggctctggacacgagcaaaggcggtggcatgatacctgatggccaatcatcaggatgcttatgcttcacaaaggctcgtggtccatagatacttttcatggccattttgagacatgctggtgctgtggctattgttgttcttttcgcccttaaatgtagtagaatcagttcattagttatgagactcaatgtcggctggctaaactgcactttctaaaactcgctcgttatggcacttctctcatcgcttggaataaggtcacttgtctaaagaacaaaggtggtcttggagtgcttaatccgagaattcagaatgtggcccttctgatgaaatttgttcataagttttacaatagactggacattccttgggtccatatggtgcgggactcctactattcttcggtcagatcccccactgctctcataagaaagggcccttctggtggagagatgttacacaattactcacctacttcagaggatatgccatgcctcgtgtgggtgatggaagcattatcctcttttggcaggatgtttggaacaatcacgcccccatgacggctttcccctgcctctattccttagcaaaaaaaaataaggaatccacaatgctggcattcatcagtaatgtctttagaagataattttcacactcctctgtcatgcaggctcaggaatacattatcttttcatatatgatcgaatgctggaagctagggaagagacggataaatggatttacccttaggaaacaacaagttcatctcctcgaaattctataatatcatctttgcatccatcaatcctctcgcgattttttttatggatttggtctcatctttcggctgactgcctgactgcgtaacccaaacgctgtattaggattcccatcttttgcatatccttattggagttaacctaatgttggttaataaagttatgcgacaacttgtc

SEQ ID NO: 4684 - DNA, 1782 bp, Zea Mays
gtgtatgataatgttgcagacaggctcactttggtaaaagtcttatgctgtcttatggattcaagtgaagcttttggattggggagaagatggttttgccacagaggctgaaactgctgctttacgaacatcatttaagacggaggttgctgtttggcataagctcagccaccctaatgttacaaagtttgttggtgcatctatggggaccacagaccttaagattccatcaaacaattccaatggtgctgcacgtacaaatttgccagcaagagcatgttgtgttgtggtagagtatcttgctggaggaactttgaagcaatatttgataaagaatagccgacggaagcttgcttataaagttgtggtccagcttgcattggatttggccagaggattgagctatctgcactccagaaagattgtacatcgggatgtgaaaagcgaaaacatgctgcttactccacagagaaaccttaagattgccgatttcggtgttgctcgtgttgaggctcagaatccaaaggacatgactggtgcaacaggcacacttggttatatggctccagaggttcttgatggtaagccatacaacaggaagtgtgatgtttatagttttggcatttgtttatgggaaatctattgctgtgacatgccttacccagacctaagttttgccgatgtctcatctgccgttgttcaccagaatttgcgcccagacattcctcgctgctgcccaagcgcatttgcgaatgttatgcggaaatgctgggatgcaaaccctgataaacgccctgatatggatgaagtggtgcagcttttagaggctctggacacgagcaaaggcggtggcatgatacctgatggccaatcatcaggatgcttatgcttcacaaaggctcgtggtccatagatacttttcatggccattttgagacatgctggtgctgtggctattgttgttcttttcgcccttaaatgtagtagaatcagttcattagttatgagactcaatgtcggctggctaaactgcactttctaaaactcgctcgttatggcacttctctcatcgcttggaataaggtcacttgtctaaagaacaaaggtggtcttggagtgcttaatccgagaattcagaatgtggcccttctgatgaaatttgttcataagttttacaatagactggacattccttgggtccatatggtgcgggactcctactattcttcggtcagatcccccactgctctcataagaaagggcccttctggtggagagatgttacacaattactcacctacttcagaggatatgccatgcctcgtgtgggtgatggaagcattatcctcttttggcaggatgtttggaacaatcacgcccccatgacggctttcccctgcctctattccttagcaaaaaaaaataaggaatccacaatgctggcattcatcagtaatgtctttagaagataattttcacactcctctgtcatgcaggctcaggaatacattatcttttcatatatgatcgaatgctggaagctagggaagagacggataaatggatttacccttaggaaacaacaagttcatctcctcgaaattctataatatcatctttgcatccatcaatcctctcgcgattttttttatggatttggtctcatctttcggctgactgcctgactgcgtaacccaaacgctgtattaggattcccatcttttgcatatccttattggagttaacctaatgttggttaataaagttatgcgacaacttgtc

SEQ ID NO: 4685 - DNA, 2005 bp, Zea Mays
gtctgtaactccggatagatgcttgtttatgtagtaaagctgttgatccttagcttgctgattattaccaaaatttgcccatgaccagttcatagcagtttgttggtgcatctatggggaccacagaccttaagattccatcaaacaattccaatggtgctgcacgtacaaatttgccagcaagagcatgttgtgttgtggtagagtatcttgctggaggaactttgaagcaatatttgataaagaatagccgacggaagcttgcttataaagttgtggtccagcttgcattggatttggccagaggattgagctatctgcactccagaaagattgtacatcgggatgtgaaaagcgaaaacatgctgcttactccacagagaaaccttaagattgccgatttcggtgttgctcgtgttgaggctcagaatccaaaggacatgactggtgcaacaggcacacttggttatatggctccagaggttcttgatggtaagccatacaacaggaagtgtgatgtttctaagttttgccgatgtctcatctgccgttgttcaccagaatttgcgcccagacattcctcgctgctgcccaagcgcatttgcgaatgttatgcggaaatgctgggatgcaaaccctgataaacgccctgatatggatgaagtggtgcagcttttagaggctctggacacgagcaaaggcggtggcatgatacctgatggccaatcatcaggatgcttatgcttcacaaaggctcgtggtccatagatacttttcatggtactcccttcccttggcaacactttccccgtgtaaatgactgggccacagcatgcttctctttgcacgacctgtgcagtcgtcgcttacagttctccatagctgccttgcgatcattgcgtgtcaacctgtagctctcatacgatttttgctgtcctctgtcgacaatcttttcatatactagtgtgctgctgtaattgtggttctaaaagagatttggcatacgcgttacactcttgaaactgctgtatgatcagtataaatctttactctgattattatttccatttgtgctaagaattgagtacaagaatggcctgaaataaattcgtgtttagctgatcctgtgcttttgttcatttgttcaggccattttgagacatgctggtgctgtggctattgttgttcttttcgcccttaaatgtagtagaatcagttcattagttatgagactcaatgtcggctggctaaactgcactttctaaaactcgctcgttatggcacttctctcatcgcttggaataaggtcacttgtctaaagaacaaaggtggtcttggagtgcttaatccgagaattcagaatgtggcccttctgatgaaatttgttcataagttttacaatagactggacattccttgggtccatatggtgcgggactcctactattcttcggtcagatcccccactgctctcataagaaagggcccttctggtggagagatgttacacaattactcacctacttcagaggatatgccatgcctcgtgtgggtgatggaagcattatcctcttttggcaggatgtttggaacaatcacgcccccatgacggctttcccctgcctctattccttagcaaaaaaaaataaggaatccacaatgctggcattcatcagtaatgtctttagaagataattttcacactcctctgtcatgcaggctcaggaatacattatcttttcatatatgatcgaatgctggaagctagggaagagacggataaatggatttacccttaggaaacaacaagttcatctcctcgaaattctataatatcatctttgcatccatcaatcctctcgcgattttttttatggatttggtctcatctttcggctgactgcctgactgcgtaacccaaacgctgtattaggattcccatcttttgcatatccttattggagttaacctaatgttggttaataaagttatgcgacaacttgtc

SEQ ID NO: 4686 - DNA, 5013 bp, Zea Mays
  misc_feature (5012)..(5013): n is a, c, g, or t
gagatagaatcttttaaaaaagactgtaaaggacggatatagaggatatatatagaggacgttgctgtagacagtcttacaattccatttccctggccggctggctcctgggttaggcaggcgcctaggctaggctggtcccgccggacagcctcagtactactcgggtacgttcaagagagagagagagagagaagcgaggaagaaatcatcgcgcgcccgcgcccgtcgccgtcggccggcccccaacccccacgcacagacaagacgagctgctggggcgcacacacacatcaccgccgcggcgcgccagccatatccagcccagaaaactcgccagaaacaaatccgtttccctttttctgtgttcctaccccgcccaccaagaaccctgcgcgtgcgaacaagccgacgattcatcaatcgccgtcgccacctcccgctgcccctcggcctccgatcccgagacccgttgccgccgctgagctgccgcatttgctttgggggtggagggtctgagatggcgccgtagcggtgggacggggagcagcagcagctggatctcttctgggttgcagctgccgccgccgccgccgccgccgccctccctgcaagcaacccttcgcgctctcgccttgctcgtgctcgtggtaatttgactgctgttagattgtgatttcttcttgctgctttcgcccttcactgttgctggaattacagaagatcaggctctttctttgtcagaagttaggaacattgcttctctttggcttctggtaatatggcagcgacgtcgccaaacaacataaggcgcaagtactcgtggtggtgggacagtcatatctgcccaaaaaactcgaaatggttgcaagaaaatctttcagatatggatagtaaaattaagctgatgatcaagatcattgaagaagatgctgaatcatttgcaaaaagagctgaaatgtactaccgacggcggcctgagctgatgaccttacttgaggagctgtaccgtgcataccgagctttagcagaaagatatgaccatgcggcaggagaactccgtcaagcacatcgaaaaatagcagaagcatttcctgatcaggttctaatggacttggatgatgaccttccagcagaaactgcttccattgaaactgacatggacaatccagacatggctccatatttcctctctttcatcaacgctagtgatttgaaaaggaatgctaaagatgaccaagattttgagagactgcagaaagaactagcaagcttgtcacaggaaaaccaagacctcaaggacaggatctcgtccatgttagagcaaggcaacaaggctgagtgcgagatccttcgcctcaaggagtcccttgctcaacaagaagcagaaaaggagtctgcagtttcactatgccagcaatcaactgctagactacaaaacctgaagtctgaaattatgcatacccaggagaaattcaacaggctgaaagaagagatgcaaactgaactacaacctttgaggaaaggagatgaacatttatttttacttgaaagagctaatcaggacttgcacttggagctagataacctgaaacttctgttgaaacagaagcatggcgaagtaaatgaaaagcaagatgagttggaaaagcttcatatctctacagaagaagagcatctcaagcgtatgcaagcagaaatggcacagctttctttggaaaaacagttatcactggcacaagacaaactgaggcatttgactcttgagaagcaggttgaagcacacaagataaaggaggtcgaaacgagcaaagttgtgattcagaaagaactggagaagattcttgaagagaaccaaaggttgaatgaccaaagtcactcttcttcagcagtgataattcgtctgcaggatgagataatttccatgaaaaatgtgcaacgaagattagaggaagagatttttcagcatgtggaggaaaagaagacacttcaacatgagctttcttatcttaaagaggataggagtgacttggagaggaaacactctacaatcaaggaacagataggatctatgaacttgaatttggaatctctacaagcactagcacaagagctgagggatggcaatgttgagctgaaagagattgtcaagaaccatgagagcattgaacttgtgcatatcgataacctaagaaagttggagaggatgtcagagacaaatgcacatttagagaagtctttgtcagctgcaacaactgagcttgagggactgagggagagcaaggtggcattagaagaatcatgcatgcacttcagatccacgattaacactcatcagtctgagcgagctgtgcttgtagcgcagattgaggtaatttctcagaccatggaggagctactggagaagaatgttttcttggagaattccttatctgacgctaatgctgaacttgagagtttaagaatgaagttcaaagaactaaaagaatcttcagaagcactccaaaatcagaattctgtacttcaatctgataagagaactcttgtccaccaggttgagggcatcactgtaactctgctgaatttggaaaggcaatacaaagaactcggaaggcggcactcagatctgcagaaggagaaggacttggtgcttgatgaagtgatcaagatacaggaacagataaggcttgagaggaaggagcatgaagattgtacacagtcaagcaacattagatttgatgctctacagaagaagattagtctattgctagaagagggcaggagtagagaggtgcagcttggtgaggaggagctcaagattgtcaaagctgagatagagatatttgtcttgcagcagtgtttgaatgacatgacagaagtaaattctgaaatcgcagaacaactgcgaaagaataaagaaatatgcaaggtccaggagggaaaaatctacagcttatcacagcataatcagaaactaactgaagggattgattcagtagtgagagtattgcatctggatcataagtatgaatccttaggccaaatgaagcttgaaatcattgtgcagctcatcttaaatgagatcagctgcctgctgaataacatatctgatgcccaggatgtgaagcagaaggagcttgttgagaaatcacttgtagttacacttctggagcatttcgggcaagaggtggctgacttgaggtcagagcggaatgtcttgaggcaagatcagcagataaagattgaggaactgctccagctgcagagagaaaaggaggaacttatgaagataagtgatgaattcttggaagaggtggaggctcgtaatcacaaagtggatgagctaaaggctgaggcgaagttcttggttgtaaggttctccgaactgcaagagtctaggaggtcattgcaaagcgagatcaccaagctattacaatcgaactcttttctatcaaatgaactaaatgattccattgaaaaacagaagaggtttgaacatgatttcagcaatcttgttagtgaagcagttagtaaagatatcctcagtgtgatctttagaagccttcatgaagagaggacattgcagctgaagtctttgcataataactttggctgtcttcaaacagcaggcggtgagctttatcaggagatcaagatgatgaacaagaggcttggagacatagaaatggagaacaagtaccttggcaaagaactaagtagaactatgagtgtttatggtggatctattgtgcaaacagcaacaggaaaaggaaatccagggcgaagagatgccaaccttctgaattcaaacaggaaaatccaacaagattgtcatgtaaatctggaggtggaacaagaggaagtttgcaatgctgattttcaggagtcaaatgaaacactacaggatgaggtccgtaagttaaggagcgaagtggaaatgcttaggagcaaggagaaggctgtgttcaacatcaaatcctgtgatgaagagatcatgaaattgctggctaacatgcaaatggctatcatgaatgcagctctgttcaaagagaaggttcttgagctcatcataacatgcgagagttttgagataagtgccatggtacagaaggaggttctgaaggaagaaatcatacaaagaaattcatatgtagatgagctgaaggacaaactaaatgctgttgagattgaaaacagaagactgaaggtcgacctaaatggtgatttcacaatgttagggtcattgcagactgaagtcagtgccctggaggagcaaaccttatctctcgctaacgaccacttgcatacaaataagctcaggatggaggaaaatgcattatctccacaccttgtgaagaccacaacaagatccagtggcgaagaaaatgcattgaggatggtgaaggggatggagctgcaaaaattgcatggaacaatcaaagcccttcagaaggtggtcacagatactggtgtcctccttgaacaagagaggcttgatttcaatgccaatttaaaagaagcaaagaagcagatcgaggtgctaaagctcaaggagatcttggatgatgatataattgaaatgaactacgagcaaatgttaaaagacatacagcttgacctcattcaaacttcttcaggccagaaaaccagtccgtttggtcaggaaaagaaaaatgtagcacaagtagatgacaagatggtaaactcacgcggttctattgggccgagccatggacatgtggctgacgacctaagaccgccgcaaagtgagtcatttgggagagagaacaatttaatggtcgtgaaagagctcagcattgacaagcaagagttaccgaggtcgcttgctatggagccacacgaggagtggagaaacaaggtcgtagaaaggttggcttctgatgcccagcgactcagtgccctccagtccagcatccaagaacttaaaacgaacgccgaaacatccgaagaggtagagctcgggagtgtcaggtaccaaataacagaagctnn

SEQ ID NO: 4687 - DNA, 4681 bp, Zea Mays
  misc_feature (4680)..(4681): n is a, c, g, or t
ccggcccccaacccccacgcacagacaagacgagctgctggggcgcacacacacatcaccgccgcggcgcgccagccatatccagcccagaaaactcgccagaaacaaatccgtttccctttttctgtgttcctaccccgcccaccaagaaccctgcgcgtgcgaacaagccgacgattcatcaatcgccgtcgccacctcccgctgcccctcggcctccgatcccgagacccgttgccgccgctgagctgccgcatttgctttgggggtggagggtctgagatggcgccgtagcggtgggacggggagcagcagcagctggatctcttctgggttgcagctgccgccgccgccgccgccgccgccctccctgcaagcaacccttcgcgctctcgccttgctcgtgctcgtgaagttaggaacattgcttctctttggcttctggtaatatggcagcgacgtcgccaaacaacataaggcgcaagtactcgtggtggtgggacagtcatatctgcccaaaaaactcgaaatggttgcaagaaaatctttcagatatggatagtaaaattaagctgatgatcaagatcattgaagaagatgctgaatcatttgcaaaaagagctgaaatgtactaccgacggcggcctgagctgatgaccttacttgaggagctgtaccgtgcataccgagctttagcagaaagatatgaccatgcggcaggagaactccgtcaagcacatcgaaaaatagcagaagcatttcctgatcaggttctaatggacttggatgatgaccttccagcagaaactgcttccattgaaactgacatggacaatccagacatggctccatatttcctctctttcatcaacgctagtgatttgaaaaggaatgctaaagatgaccaagattttgagagactgcagaaagaactagcaagcttgtcacaggaaaaccaagacctcaaggacaggatctcgtccatgttagagcaaggcaacaaggctgagtgcgagatccttcgcctcaaggagtcccttgctcaacaagaagcagaaaaggagtctgcagtttcactatgccagcaatcaactgctagactacaaaacctgaagtctgaaattatgcatacccaggagaaattcaacaggctgaaagaagagatgcaaactgaactacaacctttgaggaaaggagatgaacatttatttttacttgaaagagctaatcaggacttgcacttggagctagataacctgaaacttctgttgaaacagaagcatggcgaagtaaatgaaaagcaagatgagttggaaaagcttcatatctctacagaagaagagcatctcaagcgtatgcaagcagaaatggcacagctttctttggaaaaacagttatcactggcacaagacaaactgaggcatttgactcttgagaagcaggttgaagcacacaagataaaggaggtcgaaacgagcaaagttgtgattcagaaagaactggagaagattcttgaagagaaccaaaggttgaatgaccaaagtcactcttcttcagcagtgataattcgtctgcaggatgagataatttccatgaaaaatgtgcaacgaagattagaggaagagatttttcagcatgtggaggaaaagaagacacttcaacatgagctttcttatcttaaagaggataggagtgacttggagaggaaacactctacaatcaaggaacagataggatctatgaacttgaatttggaatctctacaagcactagcacaagagctgagggatggcaatgttgagctgaaagagattgtcaagaaccatgagagcattgaacttgtgcatatcgataacctaagaaagttggagaggatgtcagagacaaatgcacatttagagaagtctttgtcagctgcaacaactgagcttgagggactgagggagagcaaggtggcattagaagaatcatgcatgcacttcagatccacgattaacactcatcagtctgagcgagctgtgcttgtagcgcagattgaggtaatttctcagaccatggaggagctactggagaagaatgttttcttggagaattccttatctgacgctaatgctgaacttgagagtttaagaatgaagttcaaagaactaaaagaatcttcagaagcactccaaaatcagaattctgtacttcaatctgataagagaactcttgtccaccaggttgagggcatcactgtaactctgctgaatttggaaaggcaatacaaagaactcggaaggcggcactcagatctgcagaaggagaaggacttggtgcttgatgaagtgatcaagatacaggaacagataaggcttgagaggaaggagcatgaagattgtacacagtcaagcaacattagatttgatgctctacagaagaagattagtctattgctagaagagggcaggagtagagaggtgcagcttggtgaggaggagctcaagattgtcaaagctgagatagagatatttgtcttgcagcagtgtttgaatgacatgacagaagtaaattctgaaatcgcagaacaactgcgaaagaataaagaaatatgcaaggtccaggagggaaaaatctacagcttatcacagcataatcagaaactaactgaagggattgattcagtagtgagagtattgcatctggatcataagtatgaatccttaggccaaatgaagcttgaaatcattgtgcagctcatcttaaatgagatcagctgcctgctgaataacatatctgatgcccaggatgtgaagcagaaggagcttgttgagaaatcacttgtagttacacttctggagcatttcgggcaagaggtggctgacttgaggtcagagcggaatgtcttgaggcaagatcagcagataaagattgaggaactgctccagctgcagagagaaaaggaggaacttatgaagataagtgatgaattcttggaagaggtggaggctcgtaatcacaaagtggatgagctaaaggctgaggcgaagttcttggttgtaaggttctccgaactgcaagagtctaggaggtcattgcaaagcgagatcaccaagctattacaatcgaactcttttctatcaaatgaactaaatgattccattgaaaaacagaagaggtttgaacatgatttcagcaatcttgttagtgaagcagttagtaaagatatcctcagtgtgatctttagaagccttcatgaagagaggacattgcagctgaagtctttgcataataactttggctgtcttcaaacagcaggcggtgagctttatcaggagatcaagatgatgaacaagaggcttggagacatagaaatggagaacaagtaccttggcaaagaactaagtagaactatgagtgtttatggtggatctattgtgcaaacagcaacaggaaaaggaaatccagggcgaagagatgccaaccttctgaattcaaacaggaaaatccaacaagattgtcatgtaaatctggaggtggaacaagaggaagtttgcaatgctgattttcaggagtcaaatgaaacactacaggatgaggtccgtaagttaaggagcgaagtggaaatgcttaggagcaaggagaaggctgtgttcaacatcaaatcctgtgatgaagagatcatgaaattgctggctaacatgcaaatggctatcatgaatgcagctctgttcaaagagaaggttcttgagctcatcataacatgcgagagttttgagataagtgccatggtacagaaggaggttctgaaggaagaaatcatacaaagaaattcatatgtagatgagctgaaggacaaactaaatgctgttgagattgaaaacagaagactgaaggtcgacctaaatggtgatttcacaatgttagggtcattgcagactgaagtcagtgccctggaggagcaaaccttatctctcgctaacgaccacttgcatacaaataagctcaggatggaggaaaatgcattatctccacaccttgtgaagaccacaacaagatccagtggcgaagaaaatgcattgaggatggtgaaggggatggagctgcaaaaattgcatggaacaatcaaagcccttcagaaggtggtcacagatactggtgtcctccttgaacaagagaggcttgatttcaatgccaatttaaaagaagcaaagaagcagatcgaggtgctaaagctcaaggagatcttggatgatgatataattgaaatgaactacgagcaaatgttaaaagacatacagcttgacctcattcaaacttcttcaggccagaaaaccagtccgtttggtcaggaaaagaaaaatgtagcacaagtagatgacaagatggtaaactcacgcggttctattgggccgagccatggacatgtggctgacgacctaagaccgccgcaaagtgagtcatttgggagagagaacaatttaatggtcgtgaaagagctcagcattgacaagcaagagttaccgaggtcgcttgctatggagccacacgaggagtggagaaacaaggtcgtagaaaggttggcttctgatgcccagcgactcagtgccctccagtccagcatccaagaacttaaaacgaacgccgaaacatccgaagaggtagagctcgggagtgtcaggtaccaaataacagaagctnn

SEQ ID NO: 4688 - DNA, 4697 bp, Zea Mays
  misc_feature (4696)..(4697): n is a, c, g, or t
ccggcccccaacccccacgcacagacaagacgagctgctggggcgcacacacacatcaccgccgcggcgcgccagccatatccagcccagaaaactcgccagaaacaaatccgtttccctttttctgtgttcctaccccgcccaccaagaaccctgcgcgtgcgaacaagccgacgattcatcaatcgccgtcgccacctcccgctgcccctcggcctccgatcccgagacccgttgccgccgctgagctgccgcatttgctttgggggtggagggtctgagatggcgccgtagcggtgggacggggagcagcagcagctggatctcttctgggttgcagctgccgccgccgccgccgccgccgccctccctgcaagcaacccttcgcgctctcgccttgctcgtgctcgtggctctttctttgtcagaagttaggaacattgcttctctttggcttctggtaatatggcagcgacgtcgccaaacaacataaggcgcaagtactcgtggtggtgggacagtcatatctgcccaaaaaactcgaaatggttgcaagaaaatctttcagatatggatagtaaaattaagctgatgatcaagatcattgaagaagatgctgaatcatttgcaaaaagagctgaaatgtactaccgacggcggcctgagctgatgaccttacttgaggagctgtaccgtgcataccgagctttagcagaaagatatgaccatgcggcaggagaactccgtcaagcacatcgaaaaatagcagaagcatttcctgatcaggttctaatggacttggatgatgaccttccagcagaaactgcttccattgaaactgacatggacaatccagacatggctccatatttcctctctttcatcaacgctagtgatttgaaaaggaatgctaaagatgaccaagattttgagagactgcagaaagaactagcaagcttgtcacaggaaaaccaagacctcaaggacaggatctcgtccatgttagagcaaggcaacaaggctgagtgcgagatccttcgcctcaaggagtcccttgctcaacaagaagcagaaaaggagtctgcagtttcactatgccagcaatcaactgctagactacaaaacctgaagtctgaaattatgcatacccaggagaaattcaacaggctgaaagaagagatgcaaactgaactacaacctttgaggaaaggagatgaacatttatttttacttgaaagagctaatcaggacttgcacttggagctagataacctgaaacttctgttgaaacagaagcatggcgaagtaaatgaaaagcaagatgagttggaaaagcttcatatctctacagaagaagagcatctcaagcgtatgcaagcagaaatggcacagctttctttggaaaaacagttatcactggcacaagacaaactgaggcatttgactcttgagaagcaggttgaagcacacaagataaaggaggtcgaaacgagcaaagttgtgattcagaaagaactggagaagattcttgaagagaaccaaaggttgaatgaccaaagtcactcttcttcagcagtgataattcgtctgcaggatgagataatttccatgaaaaatgtgcaacgaagattagaggaagagatttttcagcatgtggaggaaaagaagacacttcaacatgagctttcttatcttaaagaggataggagtgacttggagaggaaacactctacaatcaaggaacagataggatctatgaacttgaatttggaatctctacaagcactagcacaagagctgagggatggcaatgttgagctgaaagagattgtcaagaaccatgagagcattgaacttgtgcatatcgataacctaagaaagttggagaggatgtcagagacaaatgcacatttagagaagtctttgtcagctgcaacaactgagcttgagggactgagggagagcaaggtggcattagaagaatcatgcatgcacttcagatccacgattaacactcatcagtctgagcgagctgtgcttgtagcgcagattgaggtaatttctcagaccatggaggagctactggagaagaatgttttcttggagaattccttatctgacgctaatgctgaacttgagagtttaagaatgaagttcaaagaactaaaagaatcttcagaagcactccaaaatcagaattctgtacttcaatctgataagagaactcttgtccaccaggttgagggcatcactgtaactctgctgaatttggaaaggcaatacaaagaactcggaaggcggcactcagatctgcagaaggagaaggacttggtgcttgatgaagtgatcaagatacaggaacagataaggcttgagaggaaggagcatgaagattgtacacagtcaagcaacattagatttgatgctctacagaagaagattagtctattgctagaagagggcaggagtagagaggtgcagcttggtgaggaggagctcaagattgtcaaagctgagatagagatatttgtcttgcagcagtgtttgaatgacatgacagaagtaaattctgaaatcgcagaacaactgcgaaagaataaagaaatatgcaaggtccaggagggaaaaatctacagcttatcacagcataatcagaaactaactgaagggattgattcagtagtgagagtattgcatctggatcataagtatgaatccttaggccaaatgaagcttgaaatcattgtgcagctcatcttaaatgagatcagctgcctgctgaataacatatctgatgcccaggatgtgaagcagaaggagcttgttgagaaatcacttgtagttacacttctggagcatttcgggcaagaggtggctgacttgaggtcagagcggaatgtcttgaggcaagatcagcagataaagattgaggaactgctccagctgcagagagaaaaggaggaacttatgaagataagtgatgaattcttggaagaggtggaggctcgtaatcacaaagtggatgagctaaaggctgaggcgaagttcttggttgtaaggttctccgaactgcaagagtctaggaggtcattgcaaagcgagatcaccaagctattacaatcgaactcttttctatcaaatgaactaaatgattccattgaaaaacagaagaggtttgaacatgatttcagcaatcttgttagtgaagcagttagtaaagatatcctcagtgtgatctttagaagccttcatgaagagaggacattgcagctgaagtctttgcataataactttggctgtcttcaaacagcaggcggtgagctttatcaggagatcaagatgatgaacaagaggcttggagacatagaaatggagaacaagtaccttggcaaagaactaagtagaactatgagtgtttatggtggatctattgtgcaaacagcaacaggaaaaggaaatccagggcgaagagatgccaaccttctgaattcaaacaggaaaatccaacaagattgtcatgtaaatctggaggtggaacaagaggaagtttgcaatgctgattttcaggagtcaaatgaaacactacaggatgaggtccgtaagttaaggagcgaagtggaaatgcttaggagcaaggagaaggctgtgttcaacatcaaatcctgtgatgaagagatcatgaaattgctggctaacatgcaaatggctatcatgaatgcagctctgttcaaagagaaggttcttgagctcatcataacatgcgagagttttgagataagtgccatggtacagaaggaggttctgaaggaagaaatcatacaaagaaattcatatgtagatgagctgaaggacaaactaaatgctgttgagattgaaaacagaagactgaaggtcgacctaaatggtgatttcacaatgttagggtcattgcagactgaagtcagtgccctggaggagcaaaccttatctctcgctaacgaccacttgcatacaaataagctcaggatggaggaaaatgcattatctccacaccttgtgaagaccacaacaagatccagtggcgaagaaaatgcattgaggatggtgaaggggatggagctgcaaaaattgcatggaacaatcaaagcccttcagaaggtggtcacagatactggtgtcctccttgaacaagagaggcttgatttcaatgccaatttaaaagaagcaaagaagcagatcgaggtgctaaagctcaaggagatcttggatgatgatataattgaaatgaactacgagcaaatgttaaaagacatacagcttgacctcattcaaacttcttcaggccagaaaaccagtccgtttggtcaggaaaagaaaaatgtagcacaagtagatgacaagatggtaaactcacgcggttctattgggccgagccatggacatgtggctgacgacctaagaccgccgcaaagtgagtcatttgggagagagaacaatttaatggtcgtgaaagagctcagcattgacaagcaagagttaccgaggtcgcttgctatggagccacacgaggagtggagaaacaaggtcgtagaaaggttggcttctgatgcccagcgactcagtgccctccagtccagcatccaagaacttaaaacgaacgccgaaacatccgaagaggtagagctcgggagtgtcaggtaccaaataacagaagctnn

SEQ ID NO: 4689 - DNA, 4821 bp, Zea Mays
  misc_feature (4820)..(4821): n is a, c, g, or t
ccggcccccaacccccacgcacagacaagacgagctgctggggcgcacacacacatcaccgccgcggcgcgccagccatatccagcccagaaaactcgccagaaacaaatccgtttccctttttctgtgttcctaccccgcccaccaagaaccctgcgcgtgcgaacaagccgacgattcatcaatcgccgtcgccacctcccgctgcccctcggcctccgatcccgagacccgttgccgccgctgagctgccgcatttgctttgggggtggagggtctgagatggcgccgtagcggtgggacggggagcagcagcagctggatctcttctgggttgcagctgccgccgccgccgccgccgccgccctccctgcaagcaacccttcgcgctctcgccttgctcgtgctcgtggtaatttgactgctgttagattgtgatttcttcttgctgctttcgcccttcactgttgctggaattacagaagatcaggctctttctttgtcagaagttaggaacattgcttctctttggcttctggtaatatggcagcgacgtcgccaaacaacataaggcgcaagtactcgtggtggtgggacagtcatatctgcccaaaaaactcgaaatggttgcaagaaaatctttcagatatggatagtaaaattaagctgatgatcaagatcattgaagaagatgctgaatcatttgcaaaaagagctgaaatgtactaccgacggcggcctgagctgatgaccttacttgaggagctgtaccgtgcataccgagctttagcagaaagatatgaccatgcggcaggagaactccgtcaagcacatcgaaaaatagcagaagcatttcctgatcaggttctaatggacttggatgatgaccttccagcagaaactgcttccattgaaactgacatggacaatccagacatggctccatatttcctctctttcatcaacgctagtgatttgaaaaggaatgctaaagatgaccaagattttgagagactgcagaaagaactagcaagcttgtcacaggaaaaccaagacctcaaggacaggatctcgtccatgttagagcaaggcaacaaggctgagtgcgagatccttcgcctcaaggagtcccttgctcaacaagaagcagaaaaggagtctgcagtttcactatgccagcaatcaactgctagactacaaaacctgaagtctgaaattatgcatacccaggagaaattcaacaggctgaaagaagagatgcaaactgaactacaacctttgaggaaaggagatgaacatttatttttacttgaaagagctaatcaggacttgcacttggagctagataacctgaaacttctgttgaaacagaagcatggcgaagtaaatgaaaagcaagatgagttggaaaagcttcatatctctacagaagaagagcatctcaagcgtatgcaagcagaaatggcacagctttctttggaaaaacagttatcactggcacaagacaaactgaggcatttgactcttgagaagcaggttgaagcacacaagataaaggaggtcgaaacgagcaaagttgtgattcagaaagaactggagaagattcttgaagagaaccaaaggttgaatgaccaaagtcactcttcttcagcagtgataattcgtctgcaggatgagataatttccatgaaaaatgtgcaacgaagattagaggaagagatttttcagcatgtggaggaaaagaagacacttcaacatgagctttcttatcttaaagaggataggagtgacttggagaggaaacactctacaatcaaggaacagataggatctatgaacttgaatttggaatctctacaagcactagcacaagagctgagggatggcaatgttgagctgaaagagattgtcaagaaccatgagagcattgaacttgtgcatatcgataacctaagaaagttggagaggatgtcagagacaaatgcacatttagagaagtctttgtcagctgcaacaactgagcttgagggactgagggagagcaaggtggcattagaagaatcatgcatgcacttcagatccacgattaacactcatcagtctgagcgagctgtgcttgtagcgcagattgaggtaatttctcagaccatggaggagctactggagaagaatgttttcttggagaattccttatctgacgctaatgctgaacttgagagtttaagaatgaagttcaaagaactaaaagaatcttcagaagcactccaaaatcagaattctgtacttcaatctgataagagaactcttgtccaccagctctcagaaaaaacggtccatctcagtaattacactgttattttaggttgagggcatcactgtaactctgctgaatttggaaaggcaatacaaagaactcggaaggcggcactcagatctgcagaaggagaaggacttggtgcttgatgaagtgatcaagatacaggaacagataaggcttgagaggaaggagcatgaagattgtacacagtcaagcaacattagatttgatgctctacagaagaagattagtctattgctagaagagggcaggagtagagaggtgcagcttggtgaggaggagctcaagattgtcaaagctgagatagagatatttgtcttgcagcagtgtttgaatgacatgacagaagtaaattctgaaatcgcagaacaactgcgaaagaataaagaaatatgcaaggtccaggagggaaaaatctacagcttatcacagcataatcagaaactaactgaagggattgattcagtagtgagagtattgcatctggatcataagtatgaatccttaggccaaatgaagcttgaaatcattgtgcagctcatcttaaatgagatcagctgcctgctgaataacatatctgatgcccaggatgtgaagcagaaggagcttgttgagaaatcacttgtagttacacttctggagcatttcgggcaagaggtggctgacttgaggtcagagcggaatgtcttgaggcaagatcagcagataaagattgaggaactgctccagctgcagagagaaaaggaggaacttatgaagataagtgatgaattcttggaagaggtggaggctcgtaatcacaaagtggatgagctaaaggctgaggcgaagttcttggttgtaaggttctccgaactgcaagagtctaggaggtcattgcaaagcgagatcaccaagctattacaatcgaactcttttctatcaaatgaactaaatgattccattgaaaaacagaagaggtttgaacatgatttcagcaatcttgttagtgaagcagttagtaaagatatcctcagtgtgatctttagaagccttcatgaagagaggacattgcagctgaagtctttgcataataactttggctgtcttcaaacagcaggcggtgagctttatcaggagatcaagatgatgaacaagaggcttggagacatagaaatggagaacaagtaccttggcaaagaactaagtagaactatgagtgtttatggtggatctattgtgcaaacagcaacaggaaaaggaaatccagggcgaagagatgccaaccttctgaattcaaacaggaaaatccaacaagattgtcatgtaaatctggaggtggaacaagaggaagtttgcaatgctgattttcaggagtcaaatgaaacactacaggatgaggtccgtaagttaaggagcgaagtggaaatgcttaggagcaaggagaaggctgtgttcaacatcaaatcctgtgatgaagagatcatgaaattgctggctaacatgcaaatggctatcatgaatgcagctctgttcaaagagaaggttcttgagctcatcataacatgcgagagttttgagataagtgccatggtacagaaggaggttctgaaggaagaaatcatacaaagaaattcatatgtagatgagctgaaggacaaactaaatgctgttgagattgaaaacagaagactgaaggtcgacctaaatggtgatttcacaatgttagggtcattgcagactgaagtcagtgccctggaggagcaaaccttatctctcgctaacgaccacttgcatacaaataagctcaggatggaggaaaatgcattatctccacaccttgtgaagaccacaacaagatccagtggcgaagaaaatgcattgaggatggtgaaggggatggagctgcaaaaattgcatggaacaatcaaagcccttcagaaggtggtcacagatactggtgtcctccttgaacaagagaggcttgatttcaatgccaatttaaaagaagcaaagaagcagatcgaggtgctaaagctcaaggagatcttggatgatgatataattgaaatgaactacgagcaaatgttaaaagacatacagcttgacctcattcaaacttcttcaggccagaaaaccagtccgtttggtcaggaaaagaaaaatgtagcacaagtagatgacaagatggtaaactcacgcggttctattgggccgagccatggacatgtggctgacgacctaagaccgccgcaaagtgagtcatttgggagagagaacaatttaatggtcgtgaaagagctcagcattgacaagcaagagttaccgaggtcgcttgctatggagccacacgaggagtggagaaacaaggtcgtagaaaggttggcttctgatgcccagcgactcagtgccctccagtccagcatccaagaacttaaaacgaacgccgaaacatccgaagaggtagagctcgggagtgtcaggtaccaaataacagaagctnn

SEQ ID NO: 4690 - DNA, 4469 bp, Zea Mays
  misc_feature (4468)..(4469): n is a, c, g, or t
ttttcatgcttttttagtccagcggtgatttccgagcgaattggtgaaggaccttgatttcctcaacttttggagtagccactagtccacttacagcatcgttttggtaatttgactgctgttagattgtgatttcttcttgctgctttcgcccttcactgttgctggaattacagaagatcaggctctttctttgtcagaagttaggaacattgcttctctttggcttctggtaatatggcagcgacgtcgccaaacaacataaggcgcaagtactcgtggtggtgggacagtcatatctgcccaaaaaactcgaaatggttgcaagaaaatctttcagatatggatagtaaaattaagctgatgatcaagatcattgaagaagatgctgaatcatttgcaaaaagagctgaaatgtactaccgacggcggcctgagctgatgaccttacttgaggagctgtaccgtgcataccgagctttagcagaaagatatgaccatgcggcaggagaactccgtcaagcacatcgaaaaatagcagaagcatttcctgatcaggttctaatggacttggatgatgaccttccagcagaaactgcttccattgaaactgacatggacaatccagacatggctccatatttcctctctttcatcaacgctagtgatttgaaaaggaatgctaaagatgaccaagattttgagagactgcagaaagaactagcaagcttgtcacaggaaaaccaagacctcaaggacaggatctcgtccatgttagagcaaggcaacaaggctgagtgcgagatccttcgcctcaaggagtcccttgctcaacaagaagcagaaaaggagtctgcagtttcactatgccagcaatcaactgctagactacaaaacctgaagtctgaaattatgcatacccaggagaaattcaacaggctgaaagaagagatgcaaactgaactacaacctttgaggaaaggagatgaacatttatttttacttgaaagagctaatcaggacttgcacttggagctagataacctgaaacttctgttgaaacagaagcatggcgaagtaaatgaaaagcaagatgagttggaaaagcttcatatctctacagaagaagagcatctcaagcgtatgcaagcagaaatggcacagctttctttggaaaaacagttatcactggcacaagacaaactgaggcatttgactcttgagaagcaggttgaagcacacaagataaaggaggtcgaaacgagcaaagttgtgattcagaaagaactggagaagattcttgaagagaaccaaaggttgaatgaccaaagtcactcttcttcagcagtgataattcgtctgcaggatgagataatttccatgaaaaatgtgcaacgaagattagaggaagagatttttcagcatgtggaggaaaagaagacacttcaacatgagctttcttatcttaaagaggataggagtgacttggagaggaaacactctacaatcaaggaacagataggatctatgaacttgaatttggaatctctacaagcactagcacaagagctgagggatggcaatgttgagctgaaagagattgtcaagaaccatgagagcattgaacttgtgcatatcgataacctaagaaagttggagaggatgtcagagacaaatgcacatttagagaagtctttgtcagctgcaacaactgagcttgagggactgagggagagcaaggtggcattagaagaatcatgcatgcacttcagatccacgattaacactcatcagtctgagcgagctgtgcttgtagcgcagattgaggtaatttctcagaccatggaggagctactggagaagaatgttttcttggagaattccttatctgacgctaatgctgaacttgagagtttaagaatgaagttcaaagaactaaaagaatcttcagaagcactccaaaatcagaattctgtacttcaatctgataagagaactcttgtccaccaggttgagggcatcactgtaactctgctgaatttggaaaggcaatacaaagaactcggaaggcggcactcagatctgcagaaggagaaggacttggtgcttgatgaagtgatcaagatacaggaacagataaggcttgagaggaaggagcatgaagattgtacacagtcaagcaacattagatttgatgctctacagaagaagattagtctattgctagaagagggcaggagtagagaggtgcagcttggtgaggaggagctcaagattgtcaaagctgagatagagatatttgtcttgcagcagtgtttgaatgacatgacagaagtaaattctgaaatcgcagaacaactgcgaaagaataaagaaatatgcaaggtccaggagggaaaaatctacagcttatcacagcataatcagaaactaactgaagggattgattcagtagtgagagtattgcatctggatcataagtatgaatccttaggccaaatgaagcttgaaatcattgtgcagctcatcttaaatgagatcagctgcctgctgaataacatatctgatgcccaggatgtgaagcagaaggagcttgttgagaaatcacttgtagttacacttctggagcatttcgggcaagaggtggctgacttgaggtcagagcggaatgtcttgaggcaagatcagcagataaagattgaggaactgctccagctgcagagagaaaaggaggaacttatgaagataagtgatgaattcttggaagaggtggaggctcgtaatcacaaagtggatgagctaaaggctgaggcgaagttcttggttgtaaggttctccgaactgcaagagtctaggaggtcattgcaaagcgagatcaccaagctattacaatcgaactcttttctatcaaatgaactaaatgattccattgaaaaacagaagaggtttgaacatgatttcagcaatcttgttagtgaagcagttagtaaagatatcctcagtgtgatctttagaagccttcatgaagagaggacattgcagctgaagtctttgcataataactttggctgtcttcaaacagcaggcggtgagctttatcaggagatcaagatgatgaacaagaggcttggagacatagaaatggagaacaagtaccttggcaaagaactaagtagaactatgagtgtttatggtggatctattgtgcaaacagcaacaggaaaaggaaatccagggcgaagagatgccaaccttctgaattcaaacaggaaaatccaacaagattgtcatgtaaatctggaggtggaacaagaggaagtttgcaatgctgattttcaggagtcaaatgaaacactacaggatgaggtccgtaagttaaggagcgaagtggaaatgcttaggagcaaggagaaggctgtgttcaacatcaaatcctgtgatgaagagatcatgaaattgctggctaacatgcaaatggctatcatgaatgcagctctgttcaaagagaaggttcttgagctcatcataacatgcgagagttttgagataagtgccatggtacagaaggaggttctgaaggaagaaatcatacaaagaaattcatatgtagatgagctgaaggacaaactaaatgctgttgagattgaaaacagaagactgaaggtcgacctaaatggtgatttcacaatgttagggtcattgcagactgaagtcagtgccctggaggagcaaaccttatctctcgctaacgaccacttgcatacaaataagctcaggatggaggaaaatgcattatctccacaccttgtgaagaccacaacaagatccagtggcgaagaaaatgcattgaggatggtgaaggggatggagctgcaaaaattgcatggaacaatcaaagcccttcagaaggtggtcacagatactggtgtcctccttgaacaagagaggcttgatttcaatgccaatttaaaagaagcaaagaagcagatcgaggtgctaaagctcaaggagatcttggatgatgatataattgaaatgaactacgagcaaatgttaaaagacatacagcttgacctcattcaaacttcttcaggccagaaaaccagtccgtttggtcaggaaaagaaaaatgtagcacaagtagatgacaagatggtaaactcacgcggttctattgggccgagccatggacatgtggctgacgacctaagaccgccgcaaagtgagtcatttgggagagagaacaatttaatggtcgtgaaagagctcagcattgacaagcaagagttaccgaggtcgcttgctatggagccacacgaggagtggagaaacaaggtcgtagaaaggttggcttctgatgcccagcgactcagtgccctccagtccagcatccaagaacttaaaacgaacgccgaaacatccgaagaggtagagctcgggagtgtcaggtaccaaataacagaagctnn

SEQ ID NO: 4691 - DNA, 4398 bp, Zea Mays
  misc_feature (4397)..(4398): n is a, c, g, or t
ctccgactctgtaattaaaacagtcgcaaactatggtaatttgactgctgttagattgtgatttcttcttgctgctttcgcccttcactgttgctggaattacagaagatcaggctctttctttgtcagaagttaggaacattgcttctctttggcttctggtaatatggcagcgacgtcgccaaacaacataaggcgcaagtactcgtggtggtgggacagtcatatctgcccaaaaaactcgaaatggttgcaagaaaatctttcagatatggatagtaaaattaagctgatgatcaagatcattgaagaagatgctgaatcatttgcaaaaagagctgaaatgtactaccgacggcggcctgagctgatgaccttacttgaggagctgtaccgtgcataccgagctttagcagaaagatatgaccatgcggcaggagaactccgtcaagcacatcgaaaaatagcagaagcatttcctgatcaggttctaatggacttggatgatgaccttccagcagaaactgcttccattgaaactgacatggacaatccagacatggctccatatttcctctctttcatcaacgctagtgatttgaaaaggaatgctaaagatgaccaagattttgagagactgcagaaagaactagcaagcttgtcacaggaaaaccaagacctcaaggacaggatctcgtccatgttagagcaaggcaacaaggctgagtgcgagatccttcgcctcaaggagtcccttgctcaacaagaagcagaaaaggagtctgcagtttcactatgccagcaatcaactgctagactacaaaacctgaagtctgaaattatgcatacccaggagaaattcaacaggctgaaagaagagatgcaaactgaactacaacctttgaggaaaggagatgaacatttatttttacttgaaagagctaatcaggacttgcacttggagctagataacctgaaacttctgttgaaacagaagcatggcgaagtaaatgaaaagcaagatgagttggaaaagcttcatatctctacagaagaagagcatctcaagcgtatgcaagcagaaatggcacagctttctttggaaaaacagttatcactggcacaagacaaactgaggcatttgactcttgagaagcaggttgaagcacacaagataaaggaggtcgaaacgagcaaagttgtgattcagaaagaactggagaagattcttgaagagaaccaaaggttgaatgaccaaagtcactcttcttcagcagtgataattcgtctgcaggatgagataatttccatgaaaaatgtgcaacgaagattagaggaagagatttttcagcatgtggaggaaaagaagacacttcaacatgagctttcttatcttaaagaggataggagtgacttggagaggaaacactctacaatcaaggaacagataggatctatgaacttgaatttggaatctctacaagcactagcacaagagctgagggatggcaatgttgagctgaaagagattgtcaagaaccatgagagcattgaacttgtgcatatcgataacctaagaaagttggagaggatgtcagagacaaatgcacatttagagaagtctttgtcagctgcaacaactgagcttgagggactgagggagagcaaggtggcattagaagaatcatgcatgcacttcagatccacgattaacactcatcagtctgagcgagctgtgcttgtagcgcagattgaggtaatttctcagaccatggaggagctactggagaagaatgttttcttggagaattccttatctgacgctaatgctgaacttgagagtttaagaatgaagttcaaagaactaaaagaatcttcagaagcactccaaaatcagaattctgtacttcaatctgataagagaactcttgtccaccaggttgagggcatcactgtaactctgctgaatttggaaaggcaatacaaagaactcggaaggcggcactcagatctgcagaaggagaaggacttggtgcttgatgaagtgatcaagatacaggaacagataaggcttgagaggaaggagcatgaagattgtacacagtcaagcaacattagatttgatgctctacagaagaagattagtctattgctagaagagggcaggagtagagaggtgcagcttggtgaggaggagctcaagattgtcaaagctgagatagagatatttgtcttgcagcagtgtttgaatgacatgacagaagtaaattctgaaatcgcagaacaactgcgaaagaataaagaaatatgcaaggtccaggagggaaaaatctacagcttatcacagcataatcagaaactaactgaagggattgattcagtagtgagagtattgcatctggatcataagtatgaatccttaggccaaatgaagcttgaaatcattgtgcagctcatcttaaatgagatcagctgcctgctgaataacatatctgatgcccaggatgtgaagcagaaggagcttgttgagaaatcacttgtagttacacttctggagcatttcgggcaagaggtggctgacttgaggtcagagcggaatgtcttgaggcaagatcagcagataaagattgaggaactgctccagctgcagagagaaaaggaggaacttatgaagataagtgatgaattcttggaagaggtggaggctcgtaatcacaaagtggatgagctaaaggctgaggcgaagttcttggttgtaaggttctccgaactgcaagagtctaggaggtcattgcaaagcgagatcaccaagctattacaatcgaactcttttctatcaaatgaactaaatgattccattgaaaaacagaagaggtttgaacatgatttcagcaatcttgttagtgaagcagttagtaaagatatcctcagtgtgatctttagaagccttcatgaagagaggacattgcagctgaagtctttgcataataactttggctgtcttcaaacagcaggcggtgagctttatcaggagatcaagatgatgaacaagaggcttggagacatagaaatggagaacaagtaccttggcaaagaactaagtagaactatgagtgtttatggtggatctattgtgcaaacagcaacaggaaaaggaaatccagggcgaagagatgccaaccttctgaattcaaacaggaaaatccaacaagattgtcatgtaaatctggaggtggaacaagaggaagtttgcaatgctgattttcaggagtcaaatgaaacactacaggatgaggtccgtaagttaaggagcgaagtggaaatgcttaggagcaaggagaaggctgtgttcaacatcaaatcctgtgatgaagagatcatgaaattgctggctaacatgcaaatggctatcatgaatgcagctctgttcaaagagaaggttcttgagctcatcataacatgcgagagttttgagataagtgccatggtacagaaggaggttctgaaggaagaaatcatacaaagaaattcatatgtagatgagctgaaggacaaactaaatgctgttgagattgaaaacagaagactgaaggtcgacctaaatggtgatttcacaatgttagggtcattgcagactgaagtcagtgccctggaggagcaaaccttatctctcgctaacgaccacttgcatacaaataagctcaggatggaggaaaatgcattatctccacaccttgtgaagaccacaacaagatccagtggcgaagaaaatgcattgaggatggtgaaggggatggagctgcaaaaattgcatggaacaatcaaagcccttcagaaggtggtcacagatactggtgtcctccttgaacaagagaggcttgatttcaatgccaatttaaaagaagcaaagaagcagatcgaggtgctaaagctcaaggagatcttggatgatgatataattgaaatgaactacgagcaaatgttaaaagacatacagcttgacctcattcaaacttcttcaggccagaaaaccagtccgtttggtcaggaaaagaaaaatgtagcacaagtagatgacaagatggtaaactcacgcggttctattgggccgagccatggacatgtggctgacgacctaagaccgccgcaaagtgagtcatttgggagagagaacaatttaatggtcgtgaaagagctcagcattgacaagcaagagttaccgaggtcgcttgctatggagccacacgaggagtggagaaacaaggtcgtagaaaggttggcttctgatgcccagcgactcagtgccctccagtccagcatccaagaacttaaaacgaacgccgaaacatccgaagaggtagagctcgggagtgtcaggtaccaaataacagaagctnn

SEQ ID NO: 4692 - DNA, 4553 bp, Zea Mays
  misc_feature (4552)..(4553): n is a, c, g, or t
ctcatttctaatttagaaatttgaaatcaagatatttagtcttttgatacacattttgaagcgtaaaagaataattttgctttcagactttcagagcatttaaatctatgacacttgtttacactttatgtggcacttgctaaaagcagtaggcagcctcaaatcattttttgcttattaccaatctgtcatcactttatggttccaagtataagtttgagaggttttttttttcattttttaatgaaaaatattgtttttggagctccttttaaatatgatattaaaatagctttgcactgataaggtaccagtagagaagtcataagaatattgacaaagcacatgggcatatttaattctggcatataacatacaatttaggacttcagccttctccttcggggggcgggggtactgcaagatatggatagtaaaattaagctgatgatcaagatcattgaagaagatgctgaatcatttgcaaaaagagctgaaatgtactaccgacggcggcctgagctgatgaccttacttgaggagctgtaccgtgcataccgagctttagcagaaagatatgaccatgcggcaggagaactccgtcaagcacatcgaaaaatagcagaagcatttcctgatcaggttctaatggacttggatgatgaccttccagcagaaactgcttccattgaaactgacatggacaatccagacatggctccatatttcctctctttcatcaacgctagtgatttgaaaaggaatgctaaagatgaccaagattttgagagactgcagaaagaactagcaagcttgtcacaggaaaaccaagacctcaaggacaggatctcgtccatgttagagcaaggcaacaaggctgagtgcgagatccttcgcctcaaggagtcccttgctcaacaagaagcagaaaaggagtctgcagtttcactatgccagcaatcaactgctagactacaaaacctgaagtctgaaattatgcatacccaggagaaattcaacaggctgaaagaagagatgcaaactgaactacaacctttgaggaaaggagatgaacatttatttttacttgaaagagctaatcaggacttgcacttggagctagataacctgaaacttctgttgaaacagaagcatggcgaagtaaatgaaaagcaagatgagttggaaaagcttcatatctctacagaagaagagcatctcaagcgtatgcaagcagaaatggcacagctttctttggaaaaacagttatcactggcacaagacaaactgaggcatttgactcttgagaagcaggttgaagcacacaagataaaggaggtcgaaacgagcaaagttgtgattcagaaagaactggagaagattcttgaagagaaccaaaggttgaatgaccaaagtcactcttcttcagcagtgataattcgtctgcaggatgagataatttccatgaaaaatgtgcaacgaagattagaggaagagatttttcagcatgtggaggaaaagaagacacttcaacatgagctttcttatcttaaagaggataggagtgacttggagaggaaacactctacaatcaaggaacagataggatctatgaacttgaatttggaatctctacaagcactagcacaagagctgagggatggcaatgttgagctgaaagagattgtcaagaaccatgagagcattgaacttgtgcatatcgataacctaagaaagttggagaggatgtcagagacaaatgcacatttagagaagtctttgtcagctgcaacaactgagcttgagggactgagggagagcaaggtggcattagaagaatcatgcatgcacttcagatccacgattaacactcatcagtctgagcgagctgtgcttgtagcgcagattgaggtaatttctcagaccatggaggagctactggagaagaatgttttcttggagaattccttatctgacgctaatgctgaacttgagagtttaagaatgaagttcaaagaactaaaagaatcttcagaagcactccaaaatcagaattctgtacttcaatctgataagagaactcttgtccaccaggttgagggcatcactgtaactctgctgaatttggaaaggcaatacaaagaactcggaaggcggcactcagatctgcagaaggagaaggacttggtgcttgatgaagtgatcaagatacaggaacagataaggcttgagaggaaggagcatgaagattgtacacagtcaagcaacattagatttgatgctctacagaagaagattagtctattgctagaagagggcaggagtagagaggtgcagcttggtgaggaggagctcaagattgtcaaagctgagatagagatatttgtcttgcagcagtgtttgaatgacatgacagaagtaaattctgaaatcgcagaacaactgcgaaagaataaagaaatatgcaaggtccaggagggaaaaatctacagcttatcacagcataatcagaaactaactgaagggattgattcagtagtgagagtattgcatctggatcataagtatgaatccttaggccaaatgaagcttgaaatcattgtgcagctcatcttaaatgagatcagctgcctgctgaataacatatctgatgcccaggatgtgaagcagaaggagcttgttgagaaatcacttgtagttacacttctggagcatttcgggcaagaggtggctgacttgaggtcagagcggaatgtcttgaggcaagatcagcagataaagattgaggaactgctccagctgcagagagaaaaggaggaacttatgaagataagtgatgaattcttggaagaggtggaggctcgtaatcacaaagtggatgagctaaaggctgaggcgaagttcttggttgtaaggttctccgaactgcaagagtctaggaggtcattgcaaagcgagatcaccaagctattacaatcgaactcttttctatcaaatgaactaaatgattccattgaaaaacagaagaggtttgaacatgatttcagcaatcttgttagtgaagcagttagtaaagatatcctcagtgtgatctttagaagccttcatgaagagaggacattgcagctgaagtctttgcataataactttggctgtcttcaaacagcaggcggtgagctttatcaggagatcaagatgatgaacaagaggcttggagacatagaaatggagaacaagtaccttggcaaagaactaagtagaactatgagtgtttatggtggatctattgtgcaaacagcaacaggaaaaggaaatccagggcgaagagatgccaaccttctgaattcaaacaggaaaatccaacaagattgtcatgtaaatctggaggtggaacaagaggaagtttgcaatgctgattttcaggagtcaaatgaaacactacaggatgaggtccgtaagttaaggagcgaagtggaaatgcttaggagcaaggagaaggctgtgttcaacatcaaatcctgtgatgaagagatcatgaaattgctggctaacatgcaaatggctatcatgaatgcagctctgttcaaagagaaggttcttgagctcatcataacatgcgagagttttgagataagtgccatggtacagaaggaggttctgaaggaagaaatcatacaaagaaattcatatgtagatgagctgaaggacaaactaaatgctgttgagattgaaaacagaagactgaaggtcgacctaaatggtgatttcacaatgttagggtcattgcagactgaagtcagtgccctggaggagcaaaccttatctctcgctaacgaccacttgcatacaaataagctcaggatggaggaaaatgcattatctccacaccttgtgaagaccacaacaagatccagtggcgaagaaaatgcattgaggatggtgaaggggatggagctgcaaaaattgcatggaacaatcaaagcccttcagaaggtggtcacagatactggtgtcctccttgaacaagagaggcttgatttcaatgccaatttaaaagaagcaaagaagcagatcgaggtgctaaagctcaaggagatcttggatgatgatataattgaaatgaactacgagcaaatgttaaaagacatacagcttgacctcattcaaacttcttcaggccagaaaaccagtccgtttggtcaggaaaagaaaaatgtagcacaagtagatgacaagatggtaaactcacgcggttctattgggccgagccatggacatgtggctgacgacctaagaccgccgcaaagtgagtcatttgggagagagaacaatttaatggtcgtgaaagagctcagcattgacaagcaagagttaccgaggtcgcttgctatggagccacacgaggagtggagaaacaaggtcgtagaaaggttggcttctgatgcccagcgactcagtgccctccagtccagcatccaagaacttaaaacgaacgccgaaacatccgaagaggtagagctcgggagtgtcaggtaccaaataacagaagctnn

SEQ ID NO: 4693 - DNA, 1072 bp, Zea Mays
ggaatgtcagaagtcagaacagctcgttcgtccgtcaccaactcgccatagatgatagaacgctatcccatcttcacacacaaaaatatccgcgcgaccccgacctcccccctcccactccgggcagcagccagcagccagcaggcatggggatacccgtggtggttcccgtcgcggcggccgggatgtcctccagggcgtcctccttcgtcgggggcagcggaggcgacctcgcggcggtggccgcgtcggtagccgcgcggcccaggagggcgggctccgggggaggcggcgcgctcgggtgcaagtgcctcttcgggctcggcgtgccggagctcgccgtcatcgccggcgtcgccgcgctcgtgttcgggcccaagcagctccccgagatcggccgcagcatcggcaagaccgtcaagagcttccagcagtaaaattgttccgtgatccatccaacttctctcgcaggcggctaaggagtttgaaactgaactgaagaaagagcctggggaaggcggcgatcagcccccacctgcaactcccacagctgtaagtggcggggaggagaaggggcttgaggcatctagtagcaaggagagcgcgtgaggatcaggatctatctagtgttgtttatgaaaattgtattctgggcttctcgagttagcagttcatatccttttaaccgcatcgcggtttcaggccatgtagcgatattgtttgtagtttgtaccgggaataacatatttggttgagcttctacgtattgaagaaacaacttatctgtgaagctgacgcgaacaaattctatttattatctatttttagtttgttctgagaagcagctgttgtagaagtctattgtttggtacatattctgcttaaatatgtgaacaaaatgtgaaataagctgtacaaattctgcttaaatatgtgaagtctaatgtaaaataagctgcttggtacagatttacagttttttaagcagaaatgtatcgaacaagatgtttatgtaacatcttactagttcaattgtttcttaaaataaactaaaagcagagaataaacataa

SEQ ID NO: 4694 - DNA, 679 bp, Zea Mays
aggcctgtagctgtagcaaagataacagttgttacctttagggcctatttggaagctctgtaatttcctagtttcaaggcggctaaggagtttgaaactgaactgaagaaagagcctggggaaggcggcgatcagcccccacctgcaactcccacagctgtaagtggcggggaggagaaggggcttgaggcatctagtagcaaggagagcgcgtgaggatcaggatctatctagtgttgtttatgaaaattgtattctgggcttctcgagttagcagttcatatccttttaaccgcatcgcggtttcaggccatgtagcgatattgtttgtagtttgtaccgggaataacatatttggttgagcttctacgtattgaagaaacaacttatctgtgaagctgacgcgaacaaattctatttattatctatttttagtttgttctgagaagcagctgttgtagaagtctattgtttggtacatattctgcttaaatatgtgaacaaaatgtgaaataagctgtacaaattctgcttaaatatgtgaagtctaatgtaaaataagctgcttggtacagatttacagttttttaagcagaaatgtatcgaacaagatgtttatgtaacatcttactagttcaattgtttcttaaaataaactaaaagcagagaataaacataa

SEQ ID NO: 4695 - DNA, 1269 bp, Zea Mays
tccaaatttatcgcttgcaacgtccccaatccggtgaaagccgggaaaataacgccatggctatcctcgccgttgcctctccgttcaaaaccctaaaccctagcccgccggaccacagccgcacccgcaggcgcctcccctcctccattctccaccttccgctaccggtgccacgatgtcgccgcctccggtgctccgctaagtacagtgaagcggcggcgccgtccgcgtcgacaacgacgccgcggccgtctgagataccttggagcaaggatatctgcaattcggtgcggctcattgggactgtgggcaccgatgtcgagctgcggcagctgcccagtggctccgctgttgcgaggggtcgcctcgccgtatggaagtcggccaccgagactacatgggtaacactacaattctgggatgatatggcaattgtgtcctctgagcatgttaagaagggtgaccgaatatttgttgctggacggcttgtgtcagatactgttgatgaggggcctgagaagcggcacgtttactacaagcttgcagttcaacagttgaatttcatcgagtcccagccagttcgattatatgaatcagatgcaagccaggatgccccagaatagggataacatgagctcttctcggtcaactgaagagctgtggcaagcgttctttgctaatcctcttgactggtgggataacaggacaaataagaagaacccaaggtatccagacttcaagcataagcacactggtgaagcgctatgggttgatgggaggaacaaccctaactgggttacatctcagctggcagttttggactcaagaatgagttctctgcaagacaatgagagaaaaccagtctcttacatgtatgctgacgagttcatgacattggaaggcaatcgataatctttatgaacgaggaagcttcgcagcccccattttttgtgcagcttggctggctgttatgacgattgtgatgtcggagtagctaaccttgctgtctcagttttgttgtacatatctgagcggctctggagggttgttatgagcgtacgtagtatcatgtattcggtagactgtaaggtcgctatgagcctatagcaggcataaacaaatgggagaaacccttgcttcttctgactctgttagtagtattatctggtttgtgacatggtttttaactatgctgttacgtcgagcggttatggtatgtaaaccgtggcctctcatgaagtttttccttttgtcttcggaagaatttgg

SEQ ID NO: 4696 - DNA, 1315 bp, Zea Mays
tccaaatttatcgcttgcaacgtccccaatccggtgaaagccgggaaaataacgccatggctatcctcgccgttgcctctccgttcaaaaccctaaaccctagcccgccggaccacagccgcacccgcaggcgcctcccctcctccattctccaccttccgctaccggtgccacgatgtcgccgcctccggtgctccgctaagtacagtgaagcggcggcgccgtccgcgtcgacaacgacgccgcggccgtctgagataccttggagcaaggatatctgcaattcggtgcggctcattgggactgtgggcaccgatgtcgagctgcggcagctgcccagtggctccgctgttgcgaggggtcgcctcgccgtatggaagtcggccaccgagactacatgggtaacactacaattctgggatgatatggcaattgtgtcctctgagcatgttaagaagggtgaccgaatatttgttgctggacggcttgtgtcagatactgttgatgaggggcctgagaagcggcacgtttactacaagttcaacagttgaatttcatcgagtcccagccagttcgattatatgaatcagatgcaagccaggatgccccaggtggaaggcgtgctgattattttaactttacctctaattcaactgacgaaaagaatagggataacatgagctcttctcggtcaactgaagagctgtggcaagcgttctttgctaatcctcttgactggtgggataacaggacaaataagaagaacccaaggtatccagacttcaagcataagcacactggtgaagcgctatgggttgatgggaggaacaaccctaactgggttacatctcagctggcagttttggactcaagaatgagttctctgcaagacaatgagagaaaaccagtctcttacatgtatgctgacgagttcatgacattggaaggcaatcgataatctttatgaacgaggaagcttcgcagcccccattttttgtgcagcttggctggctgttatgacgattgtgatgtcggagtagctaaccttgctgtctcagttttgttgtacatatctgagcggctctggagggttgttatgagcgtacgtagtatcatgtattcggtagactgtaaggtcgctatgagcctatagcaggcataaacaaatgggagaaacccttgcttcttctgactctgttagtagtattatctggtttgtgacatggtttttaactatgctgttacgtcgagcggttatggtatgtaaaccgtggcctctcatgaagtttttccttttgtcttcggaagaatttgg

SEQ ID NO: 4697 - DNA, 1173 bp, Zea Mays
tccaaatttatcgcttgcaacgtccccaatccggtgaaagccgggaaaataacgccatggctatcctcgccgttgcctctccgttcaaaaccctaaaccctagcccgccggaccacagccgcacccgcaggcgcctcccctcctccattctccaccttccgctaccggtgccacgatgtcgccgcctccggtgctccgctaagtacagtgaagcggcggcgccgtccgcgtcgacaacgacgccgcggccgtctgagataccttggagcaaggatatctgcaattcggtgcggctcattgggactgtgggcaccgatgtcgagctgcggcagctgcccagtggctccgctgttgcgaggggtcgcctcgccgtatggaagtcggccaccgagactacatgggtaacactacaattctgggatgatatggcaattgtgtcctctgagcatgttaagaagggtgaccgaatatttgttgctggacggcttgtgtcagatactgttgatgaggggcctgagaagcggcacgtttactacaagcttgcagttcaacagttgaatttcatcgagtcccagccagttcgattatatgaatcagatgcaagccaggatgccccagaagaacccaaggtatccagacttcaagcataagcacactggtgaagcgctatgggttgatgggaggaacaaccctaactgggttacatctcagctggcagttttggactcaagaatgagttctctgcaagacaatgagagaaaaccagtctcttacatgtatgctgacgagttcatgacattggaaggcaatcgataatctttatgaacgaggaagcttcgcagcccccattttttgtgcagcttggctggctgttatgacgattgtgatgtcggagtagctaaccttgctgtctcagttttgttgtacatatctgagcggctctggagggttgttatgagcgtacgtagtatcatgtattcggtagactgtaaggtcgctatgagcctatagcaggcataaacaaatgggagaaacccttgcttcttctgactctgttagtagtattatctggtttgtgacatggtttttaactatgctgttacgtcgagcggttatggtatgtaaaccgtggcctctcatgaagtttttccttttgtcttcggaagaatttgg

SEQ ID NO: 4698 - DNA, 1166 bp, Zea Mays
tccaaatttatcgcttgcaacgtccccaatccggtgaaagccgggaaaataacgccatggctatcctcgccgttgcctctccgttcaaaaccctaaaccctagcccgccggaccacagccgcacccgcaggcgcctcccctcctccattctccaccttccgctaccggtgccacgatgtcgccgcctccggtgctccgctaagtacagtgaagcggcggcgccgtccgcgtcgacaacgacgccgcggccgtctgagataccttggagcaaggatatctgcaattcggtgcggctcattgggactgtgggcaccgatgtcgagctgcggcagctgcccagtggctccgctgttgcgaggggtcgcctcgccgtatggaagtcggccaccgagactacatgggtaacactacaattctgggatgatatggcaattgtgtcctctgagcatgttaagaagggtgaccgaatatttgttgctggacggcttgtgtcagatactgttgatgaggggcctgagaagcggcacgtttactacaagttcaacagttgaatttcatcgagtcccagccagttcgattatatgaatcagatgcaagccaggatgccccagaagaacccaaggtatccagacttcaagcataagcacactggtgaagcgctatgggttgatgggaggaacaaccctaactgggttacatctcagctggcagttttggactcaagaatgagttctctgcaagacaatgagagaaaaccagtctcttacatgtatgctgacgagttcatgacattggaaggcaatcgataatctttatgaacgaggaagcttcgcagcccccattttttgtgcagcttggctggctgttatgacgattgtgatgtcggagtagctaaccttgctgtctcagttttgttgtacatatctgagcggctctggagggttgttatgagcgtacgtagtatcatgtattcggtagactgtaaggtcgctatgagcctatagcaggcataaacaaatgggagaaacccttgcttcttctgactctgttagtagtattatctggtttgtgacatggtttttaactatgctgttacgtcgagcggttatggtatgtaaaccgtggcctctcatgaagtttttccttttgtcttcggaagaatttgg

SEQ ID NO: 4699 - DNA, 1034 bp, Zea Mays
tccaaatttatcgcttgcaacgtccccaatccggtgaaagccgggaaaataacgccatggctatcctcgccgttgcctctccgttcaaaaccctaaaccctagcccgccggaccacagccgcacccgcaggcgcctcccctcctccattctccaccttccgctaccggtgccacgatgtcgccgcctccggtgctccgctaagtacagtgaagcggcggcgccgtccgcgtcgacaacgacgccgcggccgtctgagataccttggagcaaggatatctgcaattcggtgcggctcattgggactgtgggcaccgatgtcgagctgcggcagctgcccagtggctccgctgttgcgaggggtcgcctcgccgtatggaagtcggccaccgagactacatgcttgcagttcaacagttgaatttcatcgagtcccagccagttcgattatatgaatcagatgcaagccaggatgccccagaagaacccaaggtatccagacttcaagcataagcacactggtgaagcgctatgggttgatgggaggaacaaccctaactgggttacatctcagctggcagttttggactcaagaatgagttctctgcaagacaatgagagaaaaccagtctcttacatgtatgctgacgagttcatgacattggaaggcaatcgataatctttatgaacgaggaagcttcgcagcccccattttttgtgcagcttggctggctgttatgacgattgtgatgtcggagtagctaaccttgctgtctcagttttgttgtacatatctgagcggctctggagggttgttatgagcgtacgtagtatcatgtattcggtagactgtaaggtcgctatgagcctatagcaggcataaacaaatgggagaaacccttgcttcttctgactctgttagtagtattatctggtttgtgacatggtttttaactatgctgttacgtcgagcggttatggtatgtaaaccgtggcctctcatgaagtttttccttttgtcttcggaagaatttgg

SEQ ID NO: 4700 - DNA, 2213 bp, Zea Mays
acgcacgcagacgcaggcgcgcgcacagcgtagggtcgcagcctcccacgcacaggcaggcacaggcaaccgcattttcccttctccacctccatcgcctcctcgatctctcctcccccccgtcccccgctcccccccacccggcgccgactaccaaccgcatgcgccatgcagccggggcccacctcgccgccgcacgaatccccctcgccgccgcacgaggtgacgccacaggaggagcccgcgaccctgcccctgcccggcgaggaggcccagccccagggccaggctgacgacggcgacgcggtcaaagcggcggcgggagcccgggaggaccggaacgacaggagcggcgccaccgcatccgcccgggggaggaagaggcggaggcgcggcggcacctcctccacctccccctcgcccttcccgtcccctgccgccgccgcggggacgacgcggggggtcgtcatggtcaagcgggacctgctcgcgcgctgcatgacgtgcccgctctgccgccgcctcctccgcgacgccaccaccatctccgagtgcctccacacgttttgcagaaagtgtatatatcagaagtttgatgatgaggaagtagaatgctgcccagtatgtaaaattgatcttggctgcacacctactgagaagcttagagccgatcacagcttacaagatgtaagatcaaaactttttccattcaaaagaaagaagattaatgcagaagaagtttcatctagtatttcacttcccactaaaattaaagaaagatctatctcttcattagtcgtcgatacgcctaaagtaaaaccaacaggcttgactggacggcgaacaagagcagttgccagaaaagctgctgctgtcgccactgccactgtcaccttgcatgaacttcgtccagttattgaagatcctgtgaaaaaggaaattgatagttgtgacagccatcctcatgattcaaatttgcctgctagttcaagcaaagcaccacaaataagaagacagatatcacctaacgtggaggcatctaaccgttcctccaacaaagataccgaaggtgatagtaacgatgagctggcagataagtctgagctctggcgtcctttaaattgtttagtagaagctgccaacaggacaaaatcctttaggtcaagttcacagagtccagttgttaagggagagcaacccaatggctctacgagtagtacatttgctagcaaagcaaaggcaagggagaatctggagaagtccaaaattcaggatgacaaaaaagatgttcccatgccaccagtgctgccaaaaagaagagctcaaggtactgcgcggaagaagagagatcgtcttcaagctccaactgatgtgaagcctgatgctgcagttgcacagaatgcaaagaagttcagctccatatggttttcattgattgcctcatttgaccagcaaggagatccacctttaccacagatcccttcccactatttgcgaataaaagacggaaatatccctgcttcatctatcctaaaatacctcatgcaaaagctcagtcttccaagtggaaataaagtgttgcgagcagccagtgaacccttcacaacctctgcgcaatttagtagagctgtggctgaagggaagagcaacacagacaactcagaccatgaccggttcgtccgctaaagagtttgtaatggtgctaacatacggacggccaaaggctcctgcaatgtgaaggcaccatgcaaacattcaggccctcaaacctatttttcctgtgaggcagctatagccagacaattgttggcgaggtcatcaaagataactctccctgacgacacagcctcacaatatgcagtggctggctcacttcagagccagcccaagcccttgatgtcacattcatgtattctttttttatagcatatgttgtttgattcctttaggatgtccttttcttatttattatacatcgatagtggtatatagatagaaagttgtgattgatacttgtaggtatcattgatgttttgattgggccttaaattatatagggagagaaacttgtagtctttgcttgtaagagatgagcagagttgattgcagagtgtttctgctgtaccgtgacttattgtagcactagcaccgaattgtaaccctatattttgtctttgaactcgttagtgacttatttgttcagggggactcat

SEQ ID NO: 4701 - DNA, 1926 bp, Zea Mays
ttcgcggcagagatcgtcgcggctacctgcacagaccttttcttaattttggctcaactaatgatatcatttgccacaacagtcccgttttcaagtttttttttctctgtattcgtggtcgaccagctgcttcttcaagttcattacggtagcatttggataaggtcctatgtccttgggcaatgtaaatgacaatgtcaagctcggcgaccatttgttctatcgttgtgtactttactgaacgcgagcttctaactgggattacagtttgcagaaagtgtatatatcagaagtttgatgatgaggaagtagaatgctgcccagtatgtaaaattgatcttggctgcacacctactgagaagcttagagccgatcacagcttacaagatgtaagatcaaaactttttccattcaaaagaaagaagattaatgcagaagaagtttcatctagtatttcacttcccactaaaattaaagaaagatctatctcttcattagtcgtcgatacgcctaaagtaaaaccaacaggcttgactggacggcgaacaagagcagttgccagaaaagctgctgctgtcgccactgccactgtcaccttgcatgaacttcgtccagttattgaagatcctgtgaaaaaggaaattgatagttgtgacagccatcctcatgattcaaatttgcctgctagttcaagcaaagcaccacaaataagaagacagatatcacctaacgtggaggcatctaaccgttcctccaacaaagataccgaaggtgatagtaacgatgagctggcagataagtctgagctctggcgtcctttaaattgtttagtagaagctgccaacaggacaaaatcctttaggtcaagttcacagagtccagttgttaagggagagcaacccaatggctctacgagtagtacatttgctagcaaagcaaaggcaagggagaatctggagaagtccaaaattcaggatgacaaaaaagatgttcccatgccaccagtgctgccaaaaagaagagctcaaggtactgcgcggaagaagagagatcgtcttcaagctccaactgatgtgaagcctgatgctgcagttgcacagaatgcaaagaagttcagctccatatggttttcattgattgcctcatttgaccagcaaggagatccacctttaccacagatcccttcccactatttgcgaataaaagacggaaatatccctgcttcatctatcctaaaatacctcatgcaaaagctcagtcttccaagtgagtctgaggtggaaataaagtgttgcgagcagccagtgaacccttcacaacctctgcgcaatttagtagagctgtggctgaagggaagagcaacacagacaactcagaccatgaccggttcgtccgctaaagagtttgtaatggtgctaacatacggacggccaaaggctcctgcaatgtgaaggcaccatgcaaacattcaggccctcaaacctatttttcctgtgaggcagctatagccagacaattgttggcgaggtcatcaaagataactctccctgacgacacagcctcacaatatgcagtggctggctcacttcagagccagcccaagcccttgatgtcacattcatgtattctttttttatagcatatgttgtttgattcctttaggatgtccttttcttatttattatacatcgatagtggtatatagatagaaagttgtgattgatacttgtaggtatcattgatgttttgattgggccttaaattatatagggagagaaacttgtagtctttgcttgtaagagatgagcagagttgattgcagagtgtttctgctgtaccgtgacttattgtagcactagcaccgaattgtaaccctatattttgtctttgaactcgttagtgacttatttgttcagggggactcat

SEQ ID NO: 4702 - DNA, 1717 bp, Zea Mays
attcggttcccaacaagtcccaacatcatgccactgttgactgagacgacagtatttgtttgcagaaagtgtatatatcagaagtttgatgatgaggaagtagaatgctgcccagtatgtaaaattgatcttggctgcacacctactgagaagcttagagccgatcacagcttacaagatgtaagatcaaaactttttccattcaaaagaaagaagattaatgcagaagaagtttcatctagtatttcacttcccactaaaattaaagaaagatctatctcttcattagtcgtcgatacgcctaaagtaaaaccaacaggcttgactggacggcgaacaagagcagttgccagaaaagctgctgctgtcgccactgccactgtcaccttgcatgaacttcgtccagttattgaagatcctgtgaaaaaggaaattgatagttgtgacagccatcctcatgattcaaatttgcctgctagttcaagcaaagcaccacaaataagaagacagatatcacctaacgtggaggcatctaaccgttcctccaacaaagataccgaaggtgatagtaacgatgagctggcagataagtctgagctctggcgtcctttaaattgtttagtagaagctgccaacaggacaaaatcctttaggtcaagttcacagagtccagttgttaagggagagcaacccaatggctctacgagtagtacatttgctagcaaagcaaaggcaagggagaatctggagaagtccaaaattcaggatgacaaaaaagatgttcccatgccaccagtgctgccaaaaagaagagctcaaggtactgcgcggaagaagagagatcgtcttcaagctccaactgatgtgaagcctgatgctgcagttgcacagaatgcaaagaagttcagctccatatggttttcattgattgcctcatttgaccagcaaggagatccacctttaccacagatcccttcccactatttgcgaataaaagacggaaatatccctgcttcatctatcctaaaatacctcatgcaaaagctcagtcttccaagtgagtctgaggtggaaataaagtgttgcgagcagccagtgaacccttcacaacctctgcgcaatttagtagagctgtggctgaagggaagagcaacacagacaactcagaccatgaccggttcgtccgctaaagagtttgtaatggtgctaacatacggacggccaaaggctcctgcaatgtgaaggcaccatgcaaacattcaggccctcaaacctatttttcctgtgaggcagctatagccagacaattgttggcgaggtcatcaaagataactctccctgacgacacagcctcacaatatgcagtggctggctcacttcagagccagcccaagcccttgatgtcacattcatgtattctttttttatagcatatgttgtttgattcctttaggatgtccttttcttatttattatacatcgatagtggtatatagatagaaagttgtgattgatacttgtaggtatcattgatgttttgattgggccttaaattatatagggagagaaacttgtagtctttgcttgtaagagatgagcagagttgattgcagagtgtttctgctgtaccgtgacttattgtagcactagcaccgaattgtaaccctatattttgtctttgaactcgttagtgacttatttgttcagggggactcat

SEQ ID NO: 4703 - DNA, 1737 bp, Zea Mays
attgtaccttcagtgagatcatttgaagagttgtttttgagcttccatctttttaacacagtgccccctcccacatagtttgcagaaagtgtatatatcagaagtttgatgatgaggaagtagaatgctgcccagtatgtaaaattgatcttggctgcacacctactgagaagcttagagccgatcacagcttacaagatgtaagatcaaaactttttccattcaaaagaaagaagattaatgcagaagaagtttcatctagtatttcacttcccactaaaattaaagaaagatctatctcttcattagtcgtcgatacgcctaaagtaaaaccaacaggcttgactggacggcgaacaagagcagttgccagaaaagctgctgctgtcgccactgccactgtcaccttgcatgaacttcgtccagttattgaagatcctgtgaaaaaggaaattgatagttgtgacagccatcctcatgattcaaatttgcctgctagttcaagcaaagcaccacaaataagaagacagatatcacctaacgtggaggcatctaaccgttcctccaacaaagataccgaaggtgatagtaacgatgagctggcagataagtctgagctctggcgtcctttaaattgtttagtagaagctgccaacaggacaaaatcctttaggtcaagttcacagagtccagttgttaagggagagcaacccaatggctctacgagtagtacatttgctagcaaagcaaaggcaagggagaatctggagaagtccaaaattcaggatgacaaaaaagatgttcccatgccaccagtgctgccaaaaagaagagctcaaggtactgcgcggaagaagagagatcgtcttcaagctccaactgatgtgaagcctgatgctgcagttgcacagaatgcaaagaagttcagctccatatggttttcattgattgcctcatttgaccagcaaggagatccacctttaccacagatcccttcccactatttgcgaataaaagacggaaatatccctgcttcatctatcctaaaatacctcatgcaaaagctcagtcttccaagtgagtctgaggtggaaataaagtgttgcgagcagccagtgaacccttcacaacctctgcgcaatttagtagagctgtggctgaagggaagagcaacacagacaactcagaccatgaccggttcgtccgctaaagagtttgtaatggtgctaacatacggacggccaaaggctcctgcaatgtgaaggcaccatgcaaacattcaggccctcaaacctatttttcctgtgaggcagctatagccagacaattgttggcgaggtcatcaaagataactctccctgacgacacagcctcacaatatgcagtggctggctcacttcagagccagcccaagcccttgatgtcacattcatgtattctttttttatagcatatgttgtttgattcctttaggatgtccttttcttatttattatacatcgatagtggtatatagatagaaagttgtgattgatacttgtaggtatcattgatgttttgattgggccttaaattatatagggagagaaacttgtagtctttgcttgtaagagatgagcagagttgattgcagagtgtttctgctgtaccgtgacttattgtagcactagcaccgaattgtaaccctatattttgtctttgaactcgttagtgacttatttgttcagggggactcat

SEQ ID NO: 4704 - DNA, 1539 bp, Zea Mays
gcgaatttatttgtttatcaccttttgtttttggggttttcttcccccctcccccctcccctcctctcttcgttcactcctctgcgtccggtcttcttcgtcccctccgtcgccttcacacctgcttgccatttgcgatttcaccgtcccgtcccgtggcgcaacgaccgccgccttccggccacccggtcgcggctcccccggattcgcgcccaccgcgcctccggatcgtctcggaggtgtaccctagaactggagctctcgtcgatgcacagagcgtgcaccccctcggagtcggaggacctcccaagctggtccagcccttgtccgcgcactttcagttcggcagtgtgccggctcggtatcagttcccgaatcagcagcagcagaagttgcacgccgagatgttcaagagaagcaacagcggggttaacctgaagttcgagagcgccagtggcactgctgggacgatgtcgtcggcgaggtccttcttgtcgtctctgagcatggacggtagcgtggctagcctggacgccaagtcatcgtcgttccatttgatcggtggacctgcgatgagcgatccgctgaacgcgcagcagcccccgaggaggcggtgcacgggccgtggggaggatgggaccggcaagtgcgctgttacagggaggtgccactgttcgaagagaagtaggaagttgcgggtgaagaggtcgattaaggttcctgccattagtaacaagattgccgatatacctccggatgaatactcgtggaggaagtatgggcagaagccaattaagggttcccctcatcctaggggttactacaaatgcagtagcgtgaggggctgcccagccaggaagcatgtggaacggtgcgtagatgattcggcgatgctcatcgtgacatatgagggcgagcacaaccacaccagaatgccaacaactcagtcagcacaggtgtaaagaactcatcatcatcgccgcacctccttccgcaagtgccaccagcacggggtcaggtcaacaatgatttgtgcggagacattttcagctgtcgttgagatgtttggccctgctgctactatccacatgatttgtagcgagaatggagtgggtggtgagcacaagattttcttctctcttatggaggttatcacaatgatgacgaggaagaacaagccattagatagataggacagctgagctgttggtcgggattagtgtgaagaggtggaaaggaaagataaaagttggcgggaatgggacagttgtgtaaacttagtagaatggggaagtagagatagtgctgttcttcttggactaatctgattccattcctcactcacctgtatcaagatagcgtcaaaactgaaaagaagtgcacagcacagaggccgccttttgctgttatagcaattcattcgttcaatgatcagcggtgctgccttctattagttcttgtttgggtactcgtttatttaactcaatccgtatttatcctaatccacatgcgtggtttgaagtgaaaattgtaagttct

SEQ ID NO: 4705 - DNA, 1093 bp, Zea Mays
gcgaatttatttgtttatcaccttttgtttttggggttttcttcccccctcccccctcccctcctctcttcgttcactcctctgcgtccggtcttcttcgtcccctccgtcgccttcacacctgcttgccatttgcgatttcaccgtcccgtcccgtggcgcaacgaccgccgccttccggccacccggtcgcggctcccccggattcgcgcccaccgcgcctccggatcgtctcggagtaggaagttgcgggtgaagaggtcgattaaggttcctgccattagtaacaagattgccgatatacctccggatgaatactcgtggaggaagtatgggcagaagccaattaagggttcccctcatcctaggggttactacaaatgcagtagcgtgaggggctgcccagccaggaagcatgtggaacggtgcgtagatgattcggcgatgctcatcgtgacatatgagggcgagcacaaccacaccagaatgccaacaactcagtcagcacaggtgtaaagaactcatcatcatcgccgcacctccttccgcaagtgccaccagcacggggtcaggtcaacaatgatttgtgcggagacattttcagctgtcgttgagatgtttggccctgctgctactatccacatgatttgtagcgagaatggagtgggtggtgagcacaagattttcttctctcttatggaggttatcacaatgatgacgaggaagaacaagccattagatagataggacagctgagctgttggtcgggattagtgtgaagaggtggaaaggaaagataaaagttggcgggaatgggacagttgtgtaaacttagtagaatggggaagtagagatagtgctgttcttcttggactaatctgattccattcctcactcacctgtatcaagatagcgtcaaaactgaaaagaagtgcacagcacagaggccgccttttgctgttatagcaattcattcgttcaatgatcagcggtgctgccttctattagttcttgtttgggtactcgtttatttaactcaatccgtatttatcctaatccacatgcgtggtttgaagtgaaaattgtaagttct

SEQ ID NO: 4706 - DNA, 675 bp, Zea Mays
cttcctcagggagccagaatttgccctagcagcctctcctctcgcacgcagcagcatccacggcgcccacgcgccgccacaggagccctaaaccctgtccacaattctctcacccctacaacttccgaccagtccttggtagggctagggttcctaacaaactgctttgctgattgtggaggaaatctagccaaaaattttggaaggccacaaagaaaagtttcagcagtgctgtggtcttgggagcttggagactatggaatttcaggaatatatgtgtctttgatggtgcctctccatccttgccggctacccaatagttgtttcaatgaagagctgcagatgtggagtttttctgaagctccgaaacttcagaatttactatttgatcgtgtggagggtgtagagtaaattgcctccgtagtcgggttgtgctcttgtgtttatattgcgtgataagcctatgcatttttttcaaaccttcttttatctcctagtggaggtaagtaggttgccctgtatggggtttctttccctcattctctctttagtataaagatgtgcagctctcctccactgtttgagagaaaaaaactaaacctctttctcaccaaattggacagcatatgaagcaccttgttgccacggctttgtaacatgcttcctttggaactg

SEQ ID NO: 4707 - DNA, 1103 bp, Zea Mays
aggcactgcaacatggtaccgccgccgtctcttctgctaaccaagcatcgacgggcgggagcagcaactcacggcaccaaatacccacccaccccccacccccggctcacccggccaaaaatggacgcccggcgatggagatagtccaccagattcggacgaccgacgagggatcggcgtggcggggataggatcgaggctcgacgagacgcacgattcgactgataggataggatttgctttgcggtgcccgaggctcgttgtggcggccgccggaggaagggtttctgaagccgtcgttgaacggattggggaaagaggatgaaacggtggagttcttcgtgtttttgttttttttcccaggagcgtttatttaccttctttgttctcattttttttctatacatattaaaggcgagctgctctcttgagctgtacacgtcatcctttttttctcctccacaggatcgagaatcaactatcggcctcttcgggtatggcccgcttgacggcttgccttccgacgagtccacgggacgcgagcgttccagacgcgaaaaaaacgccgtgccaccgcttgttccagtgctccccctctcccttgctggttccagctgaccagctctgtcggactccatctcgatctcgtcgaaagtcggaccttccctagcaagcgagcgtcgtccgagcgagcgaagcggcagcatgcgaaggcagaacggaggatagaccgacggagcaggcgaggccgcaaaggtgagtttgccgcgcgagcgaacggcggccggtgtccgtgggctgtgcagcaagcagtaagggtactaagggagtctcgcggcggcgagcggtgtgcgtgggctgtgcagcgggcagtaagcgggggctgtgcggcagcgctaagcgggagcgtccgagcgaccctaggcactgttattgagtttgtgacctaaattctgaagaaggcggccaagttggcgagcgaagcggaggcccatcgcctgaagtcttgggcctctataaatatctttgtaagccgcaggagatatctatctcaatggtaaatctcctgcgatctgtaaccacccgaaaatagtgagaagttg

SEQ ID NO: 4708 - DNA, 508 bp, Zea Mays
tactacggcgctcttctcatcaatgggatctggctgggcatgacgctcgggactctgcttcagacggctatcctcgtgttcatctcgtacaggaccaagtgggagaaacaggctatgcgggccgaagaaagggtcagggagtggggagggagggccgacgccctgccgtcggccacgcaggtcgcgccggcggccgaagatgcgggtccaccatcaaatgcgagtgcgacctaagttctaaggtcgtttaggattaattaatggcagtgttatgtgtaggcatcaagactttgctgcagcaacagcccgaacatcgccacagcggaccggacccatgtgtacagattgatcgagtggagcttaattaatttatacagtgctgcccgggacctccgttgtttttcgttttttccccaatcttggcgacttttatccccacgttttttttgttagaagttcatacactatacttaggttcatgttcagtaatcaaacatttagagcaaat

SEQ ID NO: 4709 - DNA, 3218 bp, Zea Mays
caccgcaagtctcccactccagtgtcgtcggtaaaaccgtaacgtccacacgacggcgagtagtactactagtgtacgcggaaaatgatttgactgttctctattccctcgccctctcttctcccagacggccagacgacgccaccgtcacgccccaccaccaccaacctatcccccaccgcgtcacgcgcctccacctccccagatcggcggcgaaccggggggcccggacaggcggcggagagctcgaggcgtcatggcgaagtcgagcgcggacgacgccgagctgcggcgcgcgtgcgccgcggccgtggcggcgtcaggcgcgcgcggggaggaggtggccttctccatccgcgtcgccaagggccgcggcatcttcgagaagctcggcaggctcgccaagccccgtgtcctcgctctcaccgttaaacaatcatcaagaggcgaggcgaacaaagcttttcttcgagtattaaaatattcatctggggcagtgctcgagccagccaaactttacaagctgaaacatctaacaaaggttgaggttatttccaatgatcccagtggttgtacatttgttctgggatttgataaccttaggagtcagagtgttgccccaccacaatggacgatgcgtaacattgatgacagaaatcgtctacttttttgtattctgaatatgtgcaaggagatactcagttatcttccaaaagttgttggaattgatattgtggagctagctctttgggcaaaggaaaacacactgaccatagataatcaagtgagtacccaagatggtcaagaaacatcagttgctactcaaaccgagaggaaagtaacagtaactgttgaaaatgatctcgtgtcccaagcaaaagaggaggaagaagacatggaggcacttcttgacacgtgaagcagatgcattctctgagagattgaagcaggagcttgtggctttggaggctgcaaatgtatatcaattactggaaagcgagcctttaatagaagaggtcttgcagggtctggatgctgctagtgcaactgtagatgatatggatgagtggctacggattttcaatctgaagctgaggcacatgagagaagatattgcatcgattgaatcacgtaacaatggcttggagatgcagtctgtaaataacaaagggcttatggaagagctagataaattgcttgagcgtctgcggattccacaggagtttgcagcatcattaactggaggctcatttgaagagtcacggatgctgaaaaatgttgaggcatgtgaatggttgacaggggccattcgcagtcttgaagttcctaatttggacccatgctatgtcaacatgcgcgctgttagagagaaaaaggcagagctggagaaactgaaaacaacttttgttcgacgagcatcagagtttttgcggaactacttctccagtttggtagacttcatgatcagtgacaaaagctacttttcacagcgtggacaattgaagcggcctgatcatgcagaccttaggtataaatgcaggacatatgcccgacttctgcagcacttaaagagtctggacaagagctgcttaggtcccttaaggaaggcatactgtcattcccttaatttactactacgacgagaggcacgcgaatttgccaatgaacttcgtgcaagtacaaaagcaccgaagaatcctgctgtttggcttgaaggttctggcggctctggtcataatggaagcagttctgatacttcacaggtctcagatgcatactcaaagatgcttacaatatttatcccgcttcttgtggacgagagttccttttttgcacattttatgtgctttgaagtacctgcacttgttccagctggttctcctaatgctaataagagcaaatccggaggaaatgacccggatgatgatctgggtcttatggatccagatggcaacgatctgaaacctgacagtacctctgctgaactgggtacattgaatgaagctcttcaagaattactcgatggaatccaggaagacttctatgcggtcgtagattgggcttataaaattgaccccttgcgttgcatctcaatgcatgggattacagagcgttacctttctggacagaaagctgatgctgcaggatttgttcgcaaactacttgatgacttggaatcaagaatatcagtacagttcagccggtttattgatgaagcatgccatcaaattgagcgtaacgaaagaaatgtgcggcaaactggaattctagcctacattccaagatttgctgtccttgcatcacgtatggaacaatatatccaaggacaatccagggatttaattgataaagcatacacaaagctagttagcacaatgttcgcaactttggagaaaattgcacagagtgatcctaaaactgctgatattgtgttgattgagaattatgctgctttccagaacagtctttatgacttggctaatgttgtgccaacgcttgcaaagttctaccatcaagccagtgaatcatatgaactagcttgcactcgccatatcagctcactcatttatctgcaatttgagaggttatttcaattcaaccggaaagttgacgaattgacttacactattgctgctgaggagataccgtttcagctgggattatcaaaaactgacctaaggagggtactgaaatccagcttatctgggattgataagtcaattagcgccatgtacaggaggttgcaaaagacactgacctccgacgagttgtttccttcgctgtgggacaagtgcaagaaggagtttttggacaaatacgagagctttgttcagatggtaacacggatatatgggaatgagccgatcatgtcagtcaacgaaatgaaagacgtccttgctggtttttagatacaagtacacagcaccatgtatgatttcagagaaatagctatgtattccattcattccattgaattctgcacccacttgcgttactgtgttaggcgccctttttgggttatgtgtgtgtatgtggatgtcctctgtatagaagtgaacgcggcatgcttcccctaatgatgttcctgtgtcgcatcgagccgtcagtgacaatgcaaactgcaaacccggagtaccggaaggaacatgttcatgtttatgacgtcatttgtccaattgccgttccattcacggtcaagaaggtcatgtcttgccaag

SEQ ID NO: 4710 - DNA, 3083 bp, Zea Mays
acgacggcgagtagtactactagtgtacgcggaaaatgatttgactgttctctattccctcgccctctcttctcccagacggccagacgacgccaccgtcacgccccaccaccaccaacctatcccccaccgcgtcacgcgcctccacctccccagatcggcggcgaaccggggggcccggacaggcggcggagagctcgaggcgtcatggcgaagtcgagcgcggacgacgccgagctgcggcgcgcgtgcgccgcggccgtggcggcgtcaggcgcgcgcggggaggaggtggccttctccatccgcgtcgccaagggccgcggcatcttcgagaagctcggcaggctcgccaagccccgtgtcctcgctctcaccgttaaacaatcatcaagaggcgaggcgaacaaagcttttcttcgagtattaaaatattcatctggggcagtgctcgagccagccaaactttacaagctgaaacatctaacaaaggttgaggttatttccaatgatcccagtggttgtacatttgttctgggatttgataaccttaggagtcagagtgttgccccaccacaatggacgatgcgtaacattgatgacaggaaaacacactgaccatagataatcaagtgagtacccaagatggtcaagaaacatcagttgctactcaaaccgagaggaaagtaacagtaactgttgaaaatgatctcgtgtcccaagcaaaagaggaggaagaagacatggaggcacttcttgacacgtatgttatgggaataggtgaagcagatgcattctctgagagattgaagcaggagcttgtggctttggaggctgcaaatgtatatcaattactggaaagcgagcctttaatagaagaggtcttgcagggtctggatgctgctagtgcaactgtagatgatatggatgagtggctacggattttcaatctgaagctgaggcacatgagagaagatattgcatcgattgaatcacgtaacaatggcttggagatgcagtctgtaaataacaaagggcttatggaagagctagataaattgcttgagcgtctgcggattccacaggagtttgcagcatcattaactggaggctcatttgaagagtcacggatgctgaaaaatgttgaggcatgtgaatggttgacaggggccattcgcagtcttgaagttcctaatttggacccatgctatgtcaacatgcgcgctgttagagagaaaaaggcagagctggagaaactgaaaacaacttttgttcgacgagcatcagagtttttgcggaactacttctccagtttggtagacttcatgatcagtgacaaaagctacttttcacagcgtggacaattgaagcggcctgatcatgcagaccttaggtataaatgcaggacatatgcccgacttctgcagcacttaaagagtctggacaagagctgcttaggtcccttaaggaaggcatactgtcattcccttaatttactactacgacgagaggcacgcgaatttgccaatgaacttcgtgcaagtacaaaagcaccgaagaatcctgctgtttggcttgaaggttctggcggctctggtcataatggaagcagttctgatacttcacaggtctcagatgcatactcaaagatgcttacaatatttatcccgcttcttgtggacgagagttccttttttgcacattttatgtgctttgaagtacctgcacttgttccagctggttctcctaatgctaataagagcaaatccggaggaaatgacccggatgatgatctgggtcttatggatccagatggcaacgatctgaaacctgacagtacctctgctgaactgggtacattgaatgaagctcttcaagaattactcgatggaatccaggaagacttctatgcggtcgtagattgggcttataaaattgaccccttgcgttgcatctcaatgcatgggattacagagcgttacctttctggacagaaagctgatgctgcaggatttgttcgcaaactacttgatgacttggaatcaagaatatcagtacagttcagccggtttattgatgaagcatgccatcaaattgagcgtaacgaaagaaatgtgcggcaaactggaattctagcctacattccaagatttgctgtccttgcatcacgtatggaacaatatatccaaggacaatccagggatttaattgataaagcatacacaaagctagttagcacaatgttcgcaactttggagaaaattgcacagagtgatcctaaaactgctgatattgtgttgattgagaattatgctgctttccagaacagtctttatgacttggctaatgttgtgccaacgcttgcaaagttctaccatcaagccagtgaatcatatgaactagcttgcactcgccatatcagctcactcatttatctgcaatttgagaggttatttcaattcaaccggaaagttgacgaattgacttacactattgctgctgaggagataccgtttcagctgggattatcaaaaactgacctaaggagggtactgaaatccagcttatctgggattgataagtcaattagcgccatgtacaggaggttgcaaaagacactgacctccgacgagttgtttccttcgctgtgggacaagtgcaagaaggagtttttggacaaatacgagagctttgttcagatggtaacacggatatatgggaatgagccgatcatgtcagtcaacgaaatgaaagacgtccttgctggtttttagatacaagtacacagcaccatgtatgatttcagagaaatagctatgtattccattcattccattgaattctgcacccacttgcgttactgtgttaggcgccctttttgggttatgtgtgtgtatgtggatgtcctctgtatagaagtgaacgcggcatgcttcccctaatgatgttcctgtgtcgcatcgagccgtcagtgacaatgcaaactgcaaacccggagtaccggaaggaacatgttcatgtttatgacgtcatttgtccaattgccgttccattcacggtcaagaaggtcatgtcttgccaag

SEQ ID NO: 4711 - DNA, 3097 bp, Zea Mays
cttctcccagacggccagacgacgccaccgtcacgccccaccaccaccaacctatcccccaccgcgtcacgcgcctccacctccccagatcggcggcgaaccggggggcccggacaggcggcggagagctcgaggcgtcatggcgaagtcgagcgcggacgacgccgagctgcggcgcgcgtgcgccgcggccgtggcggcgtcaggcgcgcgcggggaggaggtggccttctccatccgcgtcgccaagggccgcggcatcttcgagaagctcggcaggctcgccaagccccgtgtcctcgctctcaccgttaaacaatcatcaagaggcgaggcgaacaaagcttttcttcgagtattaaaatattcatctggggcagtgctcgagccagccaaactttacaagctgaaacatctaacaaaggttgaggttatttccaatgatcccagtggttgtacatttgttctgggatttgataaccttaggagtcagagtgttgccccaccacaatggacgatgcgtaacattgatgacagaaatcgtctacttttttgtattctgaatatgtgcaaggagatactcagttatcttccaaaagttgttggaattgatattgtggagctagctctttgggcaaaggaaaacacactgaccatagataatcaagtgagtacccaagatggtcaagaaacatcagttgctactcaaaccgagaggaaagtaacagtaactgttgaaaatgatctcgtgtcccaagcaaaagaggaggaagaagacatggaggcacttcttgacacgtgaagcagatgcattctctgagagattgaagcaggagcttgtggctttggaggctgcaaatgtatatcaattactggaaagcgagcctttaatagaagaggtcttgcagggtctggatgctgctagtgcaactgtagatgatatggatgagtggctacggattttcaatctgaagctgaggcacatgagagaagatattgcatcgattgaatcacgtaacaatggcttggagatgcagtctgtaaataacaaagggcttatggaagagctagataaattgcttgagcgtctgcggattccacaggagtttgcagcatcattaactggaggctcatttgaagagtcacggatgctgaaaaatgttgaggcatgtgaatggttgacaggggccattcgcagtcttgaagttcctaatttggacccatgctatgtcaacatgcgcgctgttagagagaaaaaggcagagctggagaaactgaaaacaacttttgttcgacgagcatcagagtttttgcggaactacttctccagtttggtagacttcatgatcagtgacaaaagctacttttcacagcgtggacaattgaagcggcctgatcatgcagaccttaggtataaatgcaggacatatgcccgacttctgcagcacttaaagagtctggacaagagctgcttaggtcccttaaggaaggcatactgtcattcccttaatttactactacgacgagaggcacgcgaatttgccaatgaacttcgtgcaagtacaaaagcaccgaagaatcctgctgtttggcttgaaggttctggcggctctggtcataatggaagcagttctgatacttcacaggtctcagatgcatactcaaagatgcttacaatatttatcccgcttcttgtggacgagagttccttttttgcacattttatgtgctttgaagtacctgcacttgttccagctggttctcctaatgctaataagagcaaatccggaggaaatgacccggatgatgatctgggtcttatggatccagatggcaacgatctgaaacctgacagtacctctgctgaactgggtacattgaatgaagctcttcaagaattactcgatggaatccagacttctatgcggtcgtagattgggcttataaaattgaccccttgcgttgcatctcaatgcatgggattacagagcgttacctttctggacagaaagctgatgctgcaggatttgttcgcaaactacttgatgacttggaatcaagaatatcagtacagttcagccggtttattgatgaagcatgccatcaaattgagcgtaacgaaagaaatgtgcggcaaactggaattctagcctacattccaagatttgctgtccttgcatcacgtatggaacaatatatccaaggacaatccagggatttaattgataaagcatacacaaagctagttagcacaatgttcgcaactttggagaaaattgcacagagtgatcctaaaactgctgatattgtgttgattgagaattatgctgctttccagaacagtctttatgacttggctaatgttgtgccaacgcttgcaaagttctaccatcaagccagtgaatcatatgaactagcttgcactcgccatatcagctcactcatttatctgcaatttgagaggttatttcaattcaaccggaaagttgacgaattgacttacactattgctgctgaggagataccgtttcagctgggattatcaaaaactgacctaaggagggtactgaaatccagcttatctgggattgataagtcaattagcgccatgtacaggaggttgcaaaagacactgacctccgacgagttgtttccttcgctgtgggacaagtgcaagaaggagtttttggacaaatacgagagctttgttcagatggtaacacggatatatgggaatgagccgatcatgtcagtcaacgaaatgaaagacgtccttgctggtttttagatacaagtacacagcaccatgtatgatttcagagaaatagctatgtattccattcattccattgaattctgcacccacttgcgttactgtgttaggcgccctttttgggttatgtgtgtgtatgtggatgtcctctgtatagaagtgaacgcggcatgcttcccctaatgatgttcctgtgtcgcatcgagccgtcagtgacaatgcaaactgcaaacccggagtaccggaaggaacatgttcatgtttatgacgtcatttgtccaattgccgttccattcacggtcaagaaggtcatgtcttgccaag

SEQ ID NO: 4712 - DNA, 3015 bp, Zea Mays
cgacgccaccgtcacgccccaccaccaccaacctatcccccaccgcgtcacgcgcctccacctccccagatcggcggcgaaccggggggcccggacaggcggcggagagctcgaggcgtcatggcgaagtcgagcgcggacgacgccgagctgcggcgcgcgtgcgccgcggccgtggcggcgtcaggcgcgcgcggggaggaggtggccttctccatccgcgtcgccaagggccgcggcatcttcgagaagctcggcaggctcgccaagccccgtgtcctcgctctcaccgttaaacaatcatcaagaggcgaggcgaacaaagcttttcttcgagtattaaaatattcatctggggcagtgctcgagccagccaaactttacaagctgaaacatctaacaaaggttgaggttatttccaatgatcccagtggttgtacatttgttctgggatttgataaccttaggagtcagagtgttgccccaccacaatggacgatgcgtaacattgatgacagaaatcgtctacttttttgtattctgaatatgtgcaaggagatactcagttatcttccaaaagttgttggaattgatattgtggagctagctctttgggcaaaggaaaacacactgaccatagataatcaagtgagtacccaagatggtcaagaaacatcagttgctactcaaaccgagaggaaagtaacagtaactgttgaaaatgatctcgtgtcccaagcaaaagaggaggaagaagacatggaggctgcaaatgtatatcaattactggaaagcgagcctttaatagaagaggtcttgcagggtctggatgctgctagtgcaactgtagatgatatggatgagtggctacggattttcaatctgaagctgaggcacatgagagaagatattgcatcgattgaatcacgtaacaatggcttggagatgcagtctgtaaataacaaagggcttatggaagagctagataaattgcttgagcgtctgcggattccacaggagtttgcagcatcattaactggaggctcatttgaagagtcacggatgctgaaaaatgttgaggcatgtgaatggttgacaggggccattcgcagtcttgaagttcctaatttggacccatgctatgtcaacatgcgcgctgttagagagaaaaaggcagagctggagaaactgaaaacaacttttgttcgacgagcatcagagtttttgcggaactacttctccagtttggtagacttcatgatcagtgacaaaagctacttttcacagcgtggacaattgaagcggcctgatcatgcagaccttaggtataaatgcaggacatatgcccgacttctgcagcacttaaagagtctggacaagagctgcttaggtcccttaaggaaggcatactgtcattcccttaatttactactacgacgagaggcacgcgaatttgccaatgaacttcgtgcaagtacaaaagcaccgaagaatcctgctgtttggcttgaaggttctggcggctctggtcataatggaagcagttctgatacttcacaggtctcagatgcatactcaaagatgcttacaatatttatcccgcttcttgtggacgagagttccttttttgcacattttatgtgctttgaagtacctgcacttgttccagctggttctcctaatgctaataagagcaaatccggaggaaatgacccggatgatgatctgggtcttatggatccagatggcaacgatctgaaacctgacagtacctctgctgaactgggtacattgaatgaagctcttcaagaattactcgatggaatccaggaagacttctatgcggtcgtagattgggcttataaaattgaccccttgcgttgcatctcaatgcatgggattacagagcgttacctttctggacagaaagctgatgctgcaggatttgttcgcaaactacttgatgacttggaatcaagaatatcagtacagttcagccggtttattgatgaagcatgccatcaaattgagcgtaacgaaagaaatgtgcggcaaactggaattctagcctacattccaagatttgctgtccttgcatcacgtatggaacaatatatccaaggacaatccagggatttaattgataaagcatacacaaagctagttagcacaatgttcgcaactttggagaaaattgcacagagtgatcctaaaactgctgatattgtgttgattgagaattatgctgctttccagaacagtctttatgacttggctaatgttgtgccaacgcttgcaaagttctaccatcaagccagtgaatcatatgaactagcttgcactcgccatatcagctcactcatttatctgcaatttgagaggttatttcaattcaaccggaaagttgacgaattgacttacactattgctgctgaggagataccgtttcagctgggattatcaaaaactgacctaaggagggtactgaaatccagcttatctgggattgataagtcaattagcgccatgtacaggaggttgcaaaagacactgacctccgacgagttgtttccttcgctgtgggacaagtgcaagaaggagtttttggacaaatacgagagctttgttcagatggtaacacggatatatgggaatgagccgatcatgtcagtcaacgaaatgaaagacgtccttgctggtttttagatacaagtacacagcaccatgtatgatttcagagaaatagctatgtattccattcattccattgaattctgcacccacttgcgttactgtgttaggcgccctttttgggttatgtgtgtgtatgtggatgtcctctgtatagaagtgaacgcggcatgcttcccctaatgatgttcctgtgtcgcatcgagccgtcagtgacaatgcaaactgcaaacccggagtaccggaaggaacatgttcatgtttatgacgtcatttgtccaattgccgttccattcacggtcaagaaggtcatgtcttgccaag

SEQ ID NO: 4713 - DNA, 3130 bp, Zea Mays
ccaccaccaacctatcccccaccgcgtcacgcgcctccacctccccagatcggcggcgaaccggggggcccggacaggcggcggagagctcgaggcgtcatggcgaagtcgagcgcggacgacgccgagctgcggcgcgcgtgcgccgcggccgtggcggcgtcaggcgcgcgcggggaggaggtggccttctccatccgcgtcgccaagggccgcggcatcttcgagaagctcggcaggctcgccaagccccgtgtcctcgctctcaccgttaaacaatcatcaagaggcgaggcgaacaaagcttttcttcgagtattaaaatattcatctggggcagtgctcgagccagccaaactttacaagctgaaacatctaacaaaggttgaggttatttccaatgatcccagtggttgtacatttgttctgggatttgataaccttaggagtcagagtgttgccccaccacaatggacgatgcgtaacattgatgacagaaatcgtctacttttttgtattctgaatatgtgcaaggagatactcagttatcttccaaaagttgttggaattgatattgtggagctagctctttgggcaaaggaaaacacactgaccatagataatcaagtgagtacccaagatggtcaagaaacatcagttgctactcaaaccgagaggaaagtaacagtaactgttgaaaatgatctcgtgtcccaagcaaaagaggaggaagaagacatggaggcacttcttgacacgtatgttatgggaataggtgaagcagatgcattctctgagagattgaagcaggagcttgtggctttggaggctgcaaatgtatatcaattactggaaagcgagcctttaatagaagaggtcttgcagggtctggatgctgctagtgcaactgtagatgatatggatgagtggctacggattttcaatctgaagctgaggcacatgagagaagatattgcatcgattgaatcacgtaacaatggcttggagatgcagtctgtaaataacaaagggcttatggaagagctagataaattgcttgagcgtctgcggattccacaggagtttgcagcatcattaactggaggctcatttgaagagtcacggatgctgaaaaatgttgaggcatgtgaatggttgacaggggccattcgcagtcttgaagttcctaatttggacccatgctatgtcaacatgcgcgctagagaaaaaggcagagctggagaaactgaaaacaacttttgttcgacgagcatcagagtttttgcggaactacttctccagtttggtagacttcatgatcagtgacaaaagctacttttcacagcgtggacaattgaagcggcctgatcatgcagaccttaggtataaatgcaggacatatgcccgacttctgcagcacttaaagagtctggacaagagctgcttaggtcccttaaggaaggcatactgtcattcccttaatttactactacgacgagaggcacgcgaatttgccaatgaacttcgtgcaagtacaaaagcaccgaagaatcctgctgtttggcttgaaggttctggcggctctggtcataatggaagcagttctgatacttcacaggtctcagatgcatactcaaagatgcttacaatatttatcccgcttcttgtggacgagagttccttttttgcacattttatgtgctttgaagtacctgcacttgttccagctggttctcctaatgctaataagagcaaatccggaggaaatgacccggatgatgatctgggtcttatggatccagatggcaacgatctgaaacctgacagtacctctgctgaactgggtacattgaatgaagctcttcaagaattactcgatggaatccaggaagacttctatgcggtcgtagattgggcttataaaattgaccccttgcgttgcatctcaatgcatgggattacagagcgttacctttctggacagaaagctgatgctgcaggatttgttcgcaaactacttgatgacttggaatcaagaatatcagtacagttcagccggtttattgatgaagcatgccatcaaattgagcgtaacgaaagaaatgtgcggcaaactggaattctagcctacattccaagatttgctgtccttgcatcacgtatggaacaatatatccaaggacaatccagggatttaattgataaagcatacacaaagctagttagcacaatgttcgcaactttggagaaaattgcacagagtgatcctaaaactgctgatattgtgttgattgagaattatgctgctttccagaacagtctttatgacttggctaatgttgtgccaacgcttgcaaagttctaccatcaagccagtgaatcatatgaactagcttgcactcgccatatcagctcactcatttatctgcaatttgagaggttatttcaattcaaccggaaagttgacgaattgacttacactattgctgctgaggagataccgtttcagctgggattatcaaaaactgacctaaggagggtactgaaatccagcttatctgggaggctcgttcatcccacggtgtcaccatgagaactgacacagtgtaaaactgtgcagattgataagtcaattagcgccatgtacaggaggttgcaaaagacactgacctccgacgagttgtttccttcgctgtgggacaagtgcaagaaggagtttttggacaaatacgagagctttgttcagatggtaacacggatatatgggaatgagccgatcatgtcagtcaacgaaatgaaagacgtccttgctggtttttagatacaagtacacagcaccatgtatgatttcagagaaatagctatgtattccattcattccattgaattctgcacccacttgcgttactgtgttaggcgccctttttgggttatgtgtgtgtatgtggatgtcctctgtatagaagtgaacgcggcatgcttcccctaatgatgttcctgtgtcgcatcgagccgtcagtgacaatgcaaactgcaaacccggagtaccggaaggaacatgttcatgtttatgacgtcatttgtccaattgccgttccattcacggtcaagaaggtcatgtcttgccaag

SEQ ID NO: 4714 - DNA, 3071 bp, Zea Mays
ccaccaccaacctatcccccaccgcgtcacgcgcctccacctccccagatcggcggcgaaccggggggcccggacaggcggcggagagctcgaggcgtcatggcgaagtcgagcgcggacgacgccgagctgcggcgcgcgtgcgccgcggccgtggcggcgtcaggcgcgcgcggggaggaggtggccttctccatccgcgtcgccaagggccgcggcatcttcgagaagctcggcaggctcgccaagccccgtgtcctcgctctcaccgttaaacaatcatcaagaggcgaggcgaacaaagcttttcttcgagtattaaaatattcatctggggcagtgctcgagccagccaaactttacaagctgaaacatctaacaaaggttgaggttatttccaatgatcccagtggttgtacatttgttctgggatttgataaccttaggagtcagagtgttgccccaccacaatggacgatgcgtaacattgatgacagaaatcgtctacttttttgtattctgaatatgtgcaaggagatactcagttatcttccaaaagttgttggaattgatattgtggagctagctctttgggcaaaggaaaacacactgaccatagataatcaagtgagtacccaagatggtcaagaaacatcagttgctactcaaaccgagaggaaagtaacagtaactgttgaaaatgatctcgtgtcccaagcaaaagaggaggaagaagacatggaggcacttcttgacacgtatgttatgggaataggtgaagcagatgcattctctgagagattgaagcaggagcttgtggctttggaggctgcaaatgtatatcaattactggaaagcgagcctttaatagaagaggtcttgcagggtctggatgctgctagtgcaactgtagatgatatggatgagtggctacggattttcaatctgaagctgaggcacatgagagaagatattgcatcgattgaatcacgtaacaatggcttggagatgcagtctgtaaataacaaagggcttatggaagagctagataaattgcttgagcgtctgcggattccacaggagcatcattaactggaggctcatttgaagagtcacggatgctgaaaaatgttgaggcatgtgaatggttgacaggggccattcgcagtcttgaagttcctaatttggacccatgctatgtcaacatgcgcgctgttagagagaaaaaggcagagctggagaaactgaaaacaacttttgttcgacgagcatcagagtttttgcggaactacttctccagtttggtagacttcatgatcagtgacaaaagctacttttcacagcgtggacaattgaagcggcctgatcatgcagaccttaggtataaatgcaggacatatgcccgacttctgcagcacttaaagagtctggacaagagctgcttaggtcccttaaggaaggcatactgtcattcccttaatttactactacgacgagaggcacgcgaatttgccaatgaacttcgtgcaagtacaaaagcaccgaagaatcctgctgtttggcttgaaggttctggcggctctggtcataatggaagcagttctgatacttcacaggtctcagatgcatactcaaagatgcttacaatatttatcccgcttcttgtggacgagagttccttttttgcacattttatgtgctttgaagtacctgcacttgttccagctggttctcctaatgctaataagagcaaatccggaggaaatgacccggatgatgatctgggtcttatggatccagatggcaacgatctgaaacctgacagtacctctgctgaactgggtacattgaatgaagctcttcaagaattactcgatggaatccaggaagacttctatgcggtcgtagattgggcttataaaattgaccccttgcgttgcatctcaatgcatgggattacagagcgttacctttctggacagaaagctgatgctgcaggatttgttcgcaaactacttgatgacttggaatcaagaatatcagtacagttcagccggtttattgatgaagcatgccatcaaattgagcgtaacgaaagaaatgtgcggcaaactggaattctagcctacattccaagatttgctgtccttgcatcacgtatggaacaatatatccaaggacaatccagggatttaattgataaagcatacacaaagctagttagcacaatgttcgcaactttggagaaaattgcacagagtgatcctaaaactgctgatattgtgttgattgagaattatgctgctttccagaacagtctttatgacttggctaatgttgtgccaacgcttgcaaagttctaccatcaagccagtgaatcatatgaactagcttgcactcgccatatcagctcactcatttatctgcaatttgagaggttatttcaattcaaccggaaagttgacgaattgacttacactattgctgctgaggagataccgtttcagctgggattatcaaaaactgacctaaggagggtactgaaatccagcttatctgggattgataagtcaattagcgccatgtacaggaggttgcaaaagacactgacctccgacgagttgtttccttcgctgtgggacaagtgcaagaaggagtttttggacaaatacgagagctttgttcagatggtaacacggatatatgggaatgagccgatcatgtcagtcaacgaaatgaaagacgtccttgctggtttttagatacaagtacacagcaccatgtatgatttcagagaaatagctatgtattccattcattccattgaattctgcacccacttgcgttactgtgttaggcgccctttttgggttatgtgtgtgtatgtggatgtcctctgtatagaagtgaacgcggcatgcttcccctaatgatgttcctgtgtcgcatcgagccgtcagtgacaatgcaaactgcaaacccggagtaccggaaggaacatgttcatgtttatgacgtcatttgtccaattgccgttccattcacggtcaagaaggtcatgtcttgccaag

SEQ ID NO: 4715 - DNA, 2856 bp, Zea Mays
atatgaggctatgagcccataactggtggattcgaggattgcaacaacattaaacaatcatcaagaggcgaggcgaacaaagcttttcttcgagtattaaaatattcatctggggcagtgctcgagccagccaaactttacaagctgaaacatctaacaaaggttgaggttatttccaatgatcccagtggttgtacatttgttctgggatttgataaccttaggagtcagagtgttgccccaccacaatggacgatgcgtaacattgatgacagaaatcgtctacttttttgtattctgaatatgtgcaaggagatactcagttatcttccaaaagttgttggaattgatattgtggagctagctctttgggcaaaggaaaacacactgaccatagataatcaagtgagtacccaagatggtcaagaaacatcagttgctactcaaaccgagaggaaagtaacagtaactgttgaaaatgatctcgtgtcccaagcaaaagaggaggaagaagacatggaggcacttcttgacacgtatgttatgggaataggtgaagcagatgcattctctgagagattgaagcaggagcttgtggctttggaggctgcaaatgtatatcaattactggaaagcgagcctttaatagaagaggtcttgcagggtctggatgctgctagtgcaactgtagatgatatggatgagtggctacggattttcaatctgaagctgaggcacatgagagaagatattgcatcgattgaatcacgtaacaatggcttggagatgcagtctgtaaataacaaagggcttatggaagagctagataaattgcttgagcgtctgcggattccacaggagtttgcagcatcattaactggaggctcatttgaagagtcacggatgctgaaaaatgttgaggcatgtgaatggttgacaggggccattcgcagtcttgaagttcctaatttggacccatgctatgtcaacatgcgcgctgttagagagaaaaaggcagagctggagaaactgaaaacaacttttgttcgacgagcatcagagtttttgcggaactacttctccagtttggtagacttcatgatcagtgacaaaagctacttttcacagcgtggacaattgaagcggcctgatcatgcagaccttaggtataaatgcaggacatatgcccgacttctgcagcacttaaagagtctggacaagagctgcttaggtcccttaaggaaggcatactgtcattcccttaatttactactacgacgagaggcacgcgaatttgccaatgaacttcgtgcaagtacaaaagcaccgaagaatcctgctgtttggcttgaaggttctggcggctctggtcataatggaagcagttctgatacttcacaggtctcagatgcatactcaaagatgcttacaatatttatcccgcttcttgtggacgagagttccttttttgcacattttatgtgctttgaagtacctgcacttgttccagctggttctcctaatgctaataagagcaaatccggaggaaatgacccggatgatgatctgggtcttatggatccagatggcaacgatctgaaacctgacagtacctctgctgaactgggtacattgaatgaagctcttcaagaattactcgatggaatccaggaagacttctatgcggtcgtagattgggcttataaaattgaccccttgcgttgcatctcaatgcatgggattacagagcgttacctttctggacagaaagctgatgctgcaggatttgttcgcaaactacttgatgacttggaatcaagaatatcagtacagttcagccggtttattgatgaagcatgccatcaaattgagcgtaacgaaagaaatgtgcggcaaactggaattctagcctacattccaagatttgctgtccttgcatcacgtatggaacaatatatccaaggacaatccagggatttaattgataaagcatacacaaagctagttagcacaatgttcgcaactttggagaaaattgcacagagtgatcctaaaactgctgatattgtgttgattgagaattatgctgctttccagaacagtctttatgacttggctaatgttgtgccaacgcttgcaaagttctaccatcaagccagtgaatcatatgaactagcttgcactcgccatatcagctcactcatttatctgcaatttgagaggttatttcaattcaaccggaaagttgacgaattgacttacactattgctgctgaggagataccgtttcagctgggattatcaaaaactgacctaaggagggtactgaaatccagcttatctgggattgataagtcaattagcgccatgtacaggaggttgcaaaagacactgacctccgacgagttgtttccttcgctgtgggacaagtgcaagaaggagtttttggacaaatacgagagctttgttcagatggtaacacggatatatgggaatgagccgatcatgtcagtcaacgaaatgaaagacgtccttgctggtttttagatacaagtacacagcaccatgtatgatttcagagaaatagctatgtattccattcattccattgaattctgcacccacttgcgttactgtgttaggcgccctttttgggttatgtgtgtgtatgtggatgtcctctgtatagaagtgaacgcggcatgcttcccctaatgatgttcctgtgtcgcatcgagccgtcagtgacaatgcaaactgcaaacccggagtaccggaaggaacatgttcatgtttatgacgtcatttgtccaattgccgttccattcacggtcaagaaggtcatgtcttgccaag

SEQ ID NO: 4716 - DNA, 2608 bp, Zea Mays
gttgttgcccagaaagtttgctgtgtgaaatcgtctacttttttgtattctgaatatgtgcaaggagatactcagttatcttccaaaagttgttggaattgatattgtggagctagctctttgggcaaaggaaaacacactgaccatagataatcaagtgagtacccaagatggtcaagaaacatcagttgctactcaaaccgagaggaaagtaacagtaactgttgaaaatgatctcgtgtcccaagcaaaagaggaggaagaagacatggaggcacttcttgacacgtatgttatgggaataggtgaagcagatgcattctctgagagattgaagcaggagcttgtggctttggaggctgcaaatgtatatcaattactggaaagcgagcctttaatagaagaggtcttgcagggtctggatgctgctagtgcaactgtagatgatatggatgagtggctacggattttcaatctgaagctgaggcacatgagagaagatattgcatcgattgaatcacgtaacaatggcttggagatgcagtctgtaaataacaaagggcttatggaagagctagataaattgcttgagcgtctgcggattccacaggagtttgcagcatcattaactggaggctcatttgaagagtcacggatgctgaaaaatgttgaggcatgtgaatggttgacaggggccattcgcagtcttgaagttcctaatttggacccatgctatgtcaacatgcgcgctgttagagagaaaaaggcagagctggagaaactgaaaacaacttttgttcgacgagcatcagagtttttgcggaactacttctccagtttggtagacttcatgatcagtgacaaaagctacttttcacagcgtggacaattgaagcggcctgatcatgcagaccttaggtataaatgcaggacatatgcccgacttctgcagcacttaaagagtctggacaagagctgcttaggtcccttaaggaaggcatactgtcattcccttaatttactactacgacgagaggcacgcgaatttgccaatgaacttcgtgcaagtacaaaagcaccgaagaatcctgctgtttggcttgaaggttctggcggctctggtcataatggaagcagttctgatacttcacaggtctcagatgcatactcaaagatgcttacaatatttatcccgcttcttgtggacgagagttccttttttgcacattttatgtgctttgaagtacctgcacttgttccagctggttctcctaatgctaataagagcaaatccggaggaaatgacccggatgatgatctgggtcttatggatccagatggcaacgatctgaaacctgacagtacctctgctgaactgggtacattgaatgaagctcttcaagaattactcgatggaatccaggaagacttctatgcggtcgtagattgggcttataaaattgaccccttgcgttgcatctcaatgcatgggattacagagcgttacctttctggacagaaagctgatgctgcaggatttgttcgcaaactacttgatgacttggaatcaagaatatcagtacagttcagccggtttattgatgaagcatgccatcaaattgagcgtaacgaaagaaatgtgcggcaaactggaattctagcctacattccaagatttgctgtccttgcatcacgtatggaacaatatatccaaggacaatccagggatttaattgataaagcatacacaaagctagttagcacaatgttcgcaactttggagaaaattgcacagagtgatcctaaaactgctgatattgtgttgattgagaattatgctgctttccagaacagtctttatgacttggctaatgttgtgccaacgcttgcaaagttctaccatcaagccagtgaatcatatgaactagcttgcactcgccatatcagctcactcatttatctgcaatttgagaggttatttcaattcaaccggaaagttgacgaattgacttacactattgctgctgaggagataccgtttcagctgggattatcaaaaactgacctaaggagggtactgaaatccagcttatctgggattgataagtcaattagcgccatgtacaggaggttgcaaaagacactgacctccgacgagttgtttccttcgctgtgggacaagtgcaagaaggagtttttggacaaatacgagagctttgttcagatggtaacacggatatatgggaatgagccgatcatgtcagtcaacgaaatgaaagacgtccttgctggtttttagatacaagtacacagcaccatgtatgatttcagagaaatagctatgtattccattcattccattgaattctgcacccacttgcgttactgtgttaggcgccctttttgggttatgtgtgtgtatgtggatgtcctctgtatagaagtgaacgcggcatgcttcccctaatgatgttcctgtgtcgcatcgagccgtcagtgacaatgcaaactgcaaacccggagtaccggaaggaacatgttcatgtttatgacgtcatttgtccaattgccgttccattcacggtcaagaaggtcatgtcttgccaag

SEQ ID NO: 4717 - DNA, 900 bp, Zea Mays
agtcagtttagagtcaaggaagatttcgtcctaagattttgcattattgttagcacaatgttcgcaactttggagaaaattgcacagagtgatcctaaaactgctgatattgtgttgattgagaattatgctgctttccagaacagtctttatgacttggctaatgttgtgccaacgcttgcaaagttctaccatcaagccagtgaatcatatgaactagcttgcactcgccatatcagctcactcatttatctgcaatttgagaggttatttcaattcaaccggaaagttgacgaattgacttacactattgctgctgaggagataccgtttcagctgggattatcaaaaactgacctaaggagggtactgaaatccagcttatctgggattgataagtcaattagcgccatgtacaggaggttgcaaaagacactgacctccgacgagttgtttccttcgctgtgggacaagtgcaagaaggagtttttggacaaatacgagagctttgttcagatggtaacacggatatatgggaatgagccgatcatgtcagtcaacgaaatgaaagacgtccttgctggtttttagatacaagtacacagcaccatgtatgatttcagagaaatagctatgtattccattcattccattgaattctgcacccacttgcgttactgtgttaggcgccctttttgggttatgtgtgtgtatgtggatgtcctctgtatagaagtgaacgcggcatgcttcccctaatgatgttcctgtgtcgcatcgagccgtcagtgacaatgcaaactgcaaacccggagtaccggaaggaacatgttcatgtttatgacgtcatttgtccaattgccgttccattcacggtcaagaaggtcatgtcttgccaag

SEQ ID NO: 4718 - DNA, 3164 bp, Zea Mays
atgcacccacgccccgtctctttgaagccgcccgcgtctccacccgagaccccgacccaccccgccctcccccgccgtcgcgctcgcgctcccccgcgacagccgccatgcgccctatctccgccatgcctgcgcctcctcccccgcccgcccgagaaccaccaagtttcccttccttacacagcgaggtccaccatcaacgcccccttccctggcaagccacagccgtccacgttcctggccaccagcgacctcccttctctagcccttagcagcgagcaacacctcctccccatggctgcccccagaccccagtcccgtccgcgcatccgctcccccgtcagcgacgcacctattctcctcgacgtcgcccatggcgtggacggcgacctccctcaccctgcactctggtatgtcaccgtattgcccgcctcctttccccgcaccggcgcagccccctgttgcggcggccccttccccaaacagcacggcaccacgtgctccccctgccgcgcccgcactctccttccccaaacagcacggccccacgacgctcacactctccttccctggcgatatcccctcatctgcgccttgtccctcggagatccccttccatcttcggcaccgagaggaaaatggatggcaatcccatccatcggcgccaaaccctacacatcctccatagtaggcacccgcccctccttacgcggcaccatcggtggggatatcccccaatctgctggaaggagtccgcgccaaatcagagcccgaaatccgtgccaaatccacgctggatgaggtggtggggagaccccccaatctgcgtcccttctacatgcctacacatcctccatagaaggcgccctcctactaaccactaaaaaaccccttccacacgctgacaactccatatatattagtccaaagggagagcacgattaaggccacgcctaccagcttcaccctcctcgcatttaatcacagctctgttagcgttgttttatcaaggtacgtccaattccttctatttagttgactgtgattcaatatgcttgttgttcggttttacttgcgacatgctgttggggcatgtgtttgggatggatgacgtttggactagatagtttcagtcagtagccatctaaacaagcccttacagtattcgctatttcatattgaattttcctcatattgtagagaaaatcgcagctaatctgttcactgtggatgagttgccccatggtttgttcttaatcagaagaatggacgtgtgcaccacagtttagtgctaaatcatatggatataggagagatgtgctctctcctgtcctaaaacagttcatgttctcgtttttctattctgacagttcataagcgccggtcttttagatgcccactgacctggacatgttggtagaaatactgggcaggtgggatcaactccgatatttggtcaatttctcaaccactttctgttaatacgcaatttttattgaaaaacataatgacgtgcaatgcaaccaccctattcaatattcgtatggttagcaaaccatacgatcaatagaagatctttttggtagcactaaactacctacatacttgcatgcatgcgtcctaatccttgagtttgagtcaaaattaaatcaaaaattgtcatgatcaatcaaacaggaaagaattgacattctatagtttgcgtaggaaagtgtctctgtgtgttttctttttgaaggatcaaggattgaaggattttcctgcttgacggattagcacttcagtaccagtagttaagttattaggagcagtagcaaaaaggggctatatttgtttagggcttgttcgttttcatctcaatccatgtggatcagaggggtttgagtagctttaaatctacaataggtcaaaagctctactaaaatttttcaatctcatcaaatccatatgtcatatgaccgaacaaggccttagcgggtagggcacatcatcttaacgccaaactgctgcctcgaaaacgagtgtatagggcacaacatttgaaccacatatatgatatcaatcttatcaatctattgtgttaattatgaatcctgcatcaatcaaccagggcccggggcacattttcccaagccattgacaaatgttggtagatgcaggattcatagttacagaaactatgtggttcaaattttgccagtatttgactcatcacatttttcttctctatttcagttcttctagcagttgaagtagtgttttcttggcagatgttcgcctttaggacattgctgcgaggggaatcggatatgccacaggctgcatgttgttggagtttctatgtatccccatatcaaatttgtttttccctaatcagggaactcaattgtgcgagtaatagcaggagctcttccgaaaggccttcacatgttaatcctatcgaagaataacatatcaattattgaacgcctcagagaattgacacgattgcgcttgttggatatcaactataataggatatctagaattggccatggtgcagaggatgctaggaaaatactcaataattatgaaagtcggggccattactcagatggtaaacaaacttgggccatgtaaatggtcgaccttgcctaaactatacctggacgtattggaaagcaatgctgggaaagctatgccatgaaagatatttgtagcagtgttacatgatggcatcaagtgctgggaaaatatttattaatttatggttttgtttctatggaatataggagtcatgattttgtgcatttgatcagagactacattaactagaggatactttctttttttcaaaattacaaaaacaatactaagtgtacctattattgtctactcgtctcatgatgattactatgtagataaattctctaagctatgaacagtgaccaatgaaatatattcatttgcatacagttctcaaactaatgtattcacgtcattatatattgtgccagctttgtcaattacgcaaattctaaaatgagcatatcacataactttgattccttttgagcaatttagtttttgatttcttttgaacaatttagtttacgaaacaacaatgtgtatatgaacagatgatagtttagcaatgcatagacaccttactatatattttaaag

SEQ ID NO: 4719 - DNA, 3588 bp, Zea Mays
atgcacccacgccccgtctctttgaagccgcccgcgtctccacccgagaccccgacccaccccgccctcccccgccgtcgcgctcgcgctcccccgcgacagccgccatgcgccctatctccgccatgcctgcgcctcctcccccgcccgcccgagaaccaccaagtttcccttccttacacagcgaggtccaccatcaacgcccccttccctggcaagccacagccgtccacgttcctggccaccagcgacctcccttctctagcccttagcagcgagcaacacctcctccccatggctgcccccagaccccagtcccgtccgcgcatccgctcccccgtcagcgacgcacctattctcctcgacgtcgcccatggcgtggacggcgacctccctcaccctgcactctggtatgtcaccgtattgcccgcctcctttccccgcaccggcgcagccccctgttgcggcggccccttccccaaacagcacggcaccacgtgctccccctgccgcgcccgcactctccttccccaaacagcacggccccacgacgctcacactctccttccctggcgatatcccctcatctgcgccttgtccctcggagatccccttccatcttcggcaccgagaggaaaatggatggcaatcccatccatcggcgccaaaccctacacatcctccatagtaggcacccgcccctccttacgcggcaccatcggtggggatatcccccaatctgctggaaggagtccgcgccaaatcagagcccgaaatccgtgccaaatccacgctggatgaggtggtggggagaccccccaatctgcgtcccttctacatgcctacacatcctccatagaaggcgccctcctactaaccactaaaaaaccccttccacacgctgacaactccatatatattagtccaaagggagagcacgattaaggccacgcctaccagcttcaccctcctcgcatttgtaagtccaatttttagatttatgatttcagatgttgagttgattttgcaaactggtaagtgttttgtttcatacggcaactctgcacatggacagaatcacagctctgttagcgttgttttatcaaggtacgtccaattccttctatttagttgactgtgattcaatatgcttgttgttcggttttacttgcgacatgctgttggggcatgtgtttgggatggatgacgtttggactagatagtttcagtcagtagccatctaaacaagcccttacagtattcgctatttcatattgaattttcctcatattgtagagaaaatcgcagctaatctgttcactgtggatgagttgccccatggtttgttcttaatcagaagaatggacgtgtgcaccacagtttagtgctaaatcatatggatataggagagatgtgctctctcctgtcctaaaacagttcatgttctcgtttttctattctgacagttcataagcgccggtcttttagatgcccactgacctggacatgttggtagaaatactgggcaggtgggatcaactccgatatttggtcaatttctcaaccactttctgttaatacgcaatttttattgaaaaacataatgacgtgcaatgcaaccaccctattcaatattcgtatggttagcaaaccatacgatcaatagaagatctttttggtagcactaaactacctacatacttgcatgcatgcgtcctaatccttgagtttgagtcaaaattaaatcaaaaattgtcatgatcaatcaaacaggaaagaattgacattctatagtttgcgtaggaaagtgtctctgtgtgttttctttttgaaggatcaaggattgaaggattttcctgcttgacggattagcacttcagtaccagtagttaagttattaggagcagtagcaaaaaggggctatatttgtttagggcttgttcgttttcatctcaatccatgtggatcagaggggtttgagtagctttaaatctacaataggtcaaaagctctactaaaatttttcaatctcatcaaatccatatgtcatatgaccgaacaaggccttagcgggtagggcacatcatcttaacgccaaactgctgcctcgaaaacgagtgtatagggcacaacatttgaaccacatatatgatatcaatcttatcaatctattgtgttaattatgaatcctgcatcaatcaaccagggcccggggcacattttcccaagccattgacaaatgttggtagatgcaggattcatagttacagaaactatgtggttcaaattttgccagtatttgactcatcacatttttcttctctatttcagttcttctagcagttgaagtagtgttttcttggcagatgttcgcctttaggacattgctgcgaggggaatcggatatgccacaggctgcatgttgttggagtttctatgtatccccatatcaaatttgtttttccctaatcagggaactcaattgtgcgagtaatagcaggagctcttccgaaaggccttcacatgttaatcctatcgaagaataacatatcaattattgaacgcctcagagaattgacacgattgcgcttgttggatatcaactataataggatatctagaattggccatggtatgtgttttagcttctcatatgatcttttttatgtgtttctccttggttgtggccacatgataggttcttactttgttcctatcccctttcccccattttcgtcttttgatatggcaagttcactgtgctttggattcttaactatctcaagtcatatgagaaaccccgttcatggatacttcctgataattatattcttcttgcattgacttgtgttttagatcatctgttaggattggcctcatgttcctctttgaaggagttgtatctggtcggtaacaagatcagtgaggtagatggtcttcaccgacttctgaagctcaaggtgcagaggatgctaggaaaatactcaataattatgaaagtcggggccattactcagatggtaaacaaacttgggccatgtaaatggtcgaccttgcctaaactatacctggacgtattggaaagcaatgctgggaaagctatgccatgaaagatatttgtagcagtgttacatgatggcatcaagtgctgggaaaatatttattaatttatggttttgtttctatggaatataggagtcatgattttgtgcatttgatcagagactacattaactagaggatactttctttttttcaaaattacaaaaacaatactaagtgtacctattattgtctactcgtctcatgatgattactatgtagataaattctctaagctatgaacagtgaccaatgaaatatattcatttgcatacagttctcaaactaatgtattcacgtcattatatattgtgccagctttgtcaattacgcaaattctaaaatgagcatatcacataactttgattccttttgagcaatttagtttttgatttcttttgaacaatttagtttacgaaacaacaatgtgtatatgaacagatgatagtttagcaatgcatagacaccttactatatattttaaag

SEQ ID NO: 4720 - DNA, 3364 bp, Zea Mays
atgcacccacgccccgtctctttgaagccgcccgcgtctccacccgagaccccgacccaccccgccctcccccgccgtcgcgctcgcgctcccccgcgacagccgccatgcgccctatctccgccatgcctgcgcctcctcccccgcccgcccgagaaccaccaagtttcccttccttacacagcgaggtccaccatcaacgcccccttccctggcaagccacagccgtccacgttcctggccaccagcgacctcccttctctagcccttagcagcgagcaacacctcctccccatggctgcccccagaccccagtcccgtccgcgcatccgctcccccgtcagcgacgcacctattctcctcgacgtcgcccatggcgtggacggcgacctccctcaccctgcactctggtatgtcaccgtattgcccgcctcctttccccgcaccggcgcagccccctgttgcggcggccccttccccaaacagcacggcaccacgtgctccccctgccgcgcccgcactctccttccccaaacagcacggccccacgacgctcacactctccttccctggcgatatcccctcatctgcgccttgtccctcggagatccccttccatcttcggcaccgagaggaaaatggatggcaatcccatccatcggcgccaaaccctacacatcctccatagtaggcacccgcccctccttacgcggcaccatcggtggggatatcccccaatctgctggaaggagtccgcgccaaatcagagcccgaaatccgtgccaaatccacgctggatgaggtggtggggagaccccccaatctgcgtcccttctacatgcctacacatcctccatagaaggcgccctcctactaaccactaaaaaaccccttccacacgctgacaactccatatatattagtccaaagggagagcacgattaaggccacgcctaccagcttcaccctcctcgcatttgtaagtccaatttttagatttatgatttcagatgttgagttgattttgcaaactggtaagtgttttgtttcatacggcaactctgcacatggacagaatcacagctctgttagcgttgttttatcaaggtacgtccaattccttctatttagttgactgtgattcaatatgcttgttgttcggttttacttgcgacatgctgttggggcatgtgtttgggatggatgacgtttggactagatagtttcagtcagtagccatctaaacaagcccttacagtattcgctatttcatattgaattttcctcatattgtagagaaaatcgcagctaatctgttcactgtggatgagttgccccatggtttgttcttaatcagaagaatggacgtgtgcaccacagtttagtgctaaatcatatggatataggagagatgtgctctctcctgtcctaaaacagttcatgttctcgtttttctattctgacagttcataagcgccggtcttttagatgcccactgacctggacatgttggtagaaatactgggcaggtgggatcaactccgatatttggtcaatttctcaaccactttctgttaatacgcaatttttattgaaaaacataatgacgtgcaatgcaaccaccctattcaatattcgtatggttagcaaaccatacgatcaatagaagatctttttggtagcactaaactacctacatacttgcatgcatgcgtcctaatccttgagtttgagtcaaaattaaatcaaaaattgtcatgatcaatcaaacaggaaagaattgacattctatagtttgcgtaggaaagtgtctctgtgtgttttctttttgaaggatcaaggattgaaggattttcctgcttgacggattagcacttcagtaccagtagttaagttattaggagcagtagcaaaaaggggctatatttgtttagggcttgttcgttttcatctcaatccatgtggatcagaggggtttgagtagctttaaatctacaataggtcaaaagctctactaaaatttttcaatctcatcaaatccatatgtcatatgaccgaacaaggccttagcgggtagggcacatcatcttaacgccaaactgctgcctcgaaaacgagtgtatagggcacaacatttgaaccacatatatgatatcaatcttatcaatctattgtgttaattatgaatcctgcatcaatcaaccagggcccggggcacattttcccaagccattgacaaatgttggtagatgcaggattcatagttacagaaactatgtggttcaaattttgccagtatttgactcatcacatttttcttctctatttcagttcttctagcagttgaagtagtgttttcttggcagatgttcgcctttaggacattgctgcgaggggaatcggatatgccacaggctgcatgttgttggagtttctatgtatccccatatcaaatttgtttttccctaatcagggaactcaattgtgcgagtaatagcaggagctcttccgaaaggccttcacatgttaatcctatcgaagaataacatatcaattattgaacgcctcagagaattgacacgattgcgcttgttggatatcaactataataggatatctagaattggccatgatcatctgttaggattggcctcatgttcctctttgaaggagttgtatctggtcggtaacaagatcagtgaggtagatggtcttcaccgacttctgaagctcaaggtgcagaggatgctaggaaaatactcaataattatgaaagtcggggccattactcagatggtaaacaaacttgggccatgtaaatggtcgaccttgcctaaactatacctggacgtattggaaagcaatgctgggaaagctatgccatgaaagatatttgtagcagtgttacatgatggcatcaagtgctgggaaaatatttattaatttatggttttgtttctatggaatataggagtcatgattttgtgcatttgatcagagactacattaactagaggatactttctttttttcaaaattacaaaaacaatactaagtgtacctattattgtctactcgtctcatgatgattactatgtagataaattctctaagctatgaacagtgaccaatgaaatatattcatttgcatacagttctcaaactaatgtattcacgtcattatatattgtgccagctttgtcaattacgcaaattctaaaatgagcatatcacataactttgattccttttgagcaatttagtttttgatttcttttgaacaatttagtttacgaaacaacaatgtgtatatgaacagatgatagtttagcaatgcatagacaccttactatatattttaaag

SEQ ID NO: 4721 - DNA, 3256 bp, Zea Mays
atgcacccacgccccgtctctttgaagccgcccgcgtctccacccgagaccccgacccaccccgccctcccccgccgtcgcgctcgcgctcccccgcgacagccgccatgcgccctatctccgccatgcctgcgcctcctcccccgcccgcccgagaaccaccaagtttcccttccttacacagcgaggtccaccatcaacgcccccttccctggcaagccacagccgtccacgttcctggccaccagcgacctcccttctctagcccttagcagcgagcaacacctcctccccatggctgcccccagaccccagtcccgtccgcgcatccgctcccccgtcagcgacgcacctattctcctcgacgtcgcccatggcgtggacggcgacctccctcaccctgcactctggtatgtcaccgtattgcccgcctcctttccccgcaccggcgcagccccctgttgcggcggccccttccccaaacagcacggcaccacgtgctccccctgccgcgcccgcactctccttccccaaacagcacggccccacgacgctcacactctccttccctggcgatatcccctcatctgcgccttgtccctcggagatccccttccatcttcggcaccgagaggaaaatggatggcaatcccatccatcggcgccaaaccctacacatcctccatagtaggcacccgcccctccttacgcggcaccatcggtggggatatcccccaatctgctggaaggagtccgcgccaaatcagagcccgaaatccgtgccaaatccacgctggatgaggtggtggggagaccccccaatctgcgtcccttctacatgcctacacatcctccatagaaggcgccctcctactaaccactaaaaaaccccttccacacgctgacaactccatatatattagtccaaagggagagcacgattaaggccacgcctaccagcttcaccctcctcgcatttgtaagtccaatttttagatttatgatttcagatgttgagttgattttgcaaactggtaagtgttttgtttcatacggcaactctgcacatggacagaatcacagctctgttagcgttgttttatcaaggtacgtccaattccttctatttagttgactgtgattcaatatgcttgttgttcggttttacttgcgacatgctgttggggcatgtgtttgggatggatgacgtttggactagatagtttcagtcagtagccatctaaacaagcccttacagtattcgctatttcatattgaattttcctcatattgtagagaaaatcgcagctaatctgttcactgtggatgagttgccccatggtttgttcttaatcagaagaatggacgtgtgcaccacagtttagtgctaaatcatatggatataggagagatgtgctctctcctgtcctaaaacagttcatgttctcgtttttctattctgacagttcataagcgccggtcttttagatgcccactgacctggacatgttggtagaaatactgggcaggtgggatcaactccgatatttggtcaatttctcaaccactttctgttaatacgcaatttttattgaaaaacataatgacgtgcaatgcaaccaccctattcaatattcgtatggttagcaaaccatacgatcaatagaagatctttttggtagcactaaactacctacatacttgcatgcatgcgtcctaatccttgagtttgagtcaaaattaaatcaaaaattgtcatgatcaatcaaacaggaaagaattgacattctatagtttgcgtaggaaagtgtctctgtgtgttttctttttgaaggatcaaggattgaaggattttcctgcttgacggattagcacttcagtaccagtagttaagttattaggagcagtagcaaaaaggggctatatttgtttagggcttgttcgttttcatctcaatccatgtggatcagaggggtttgagtagctttaaatctacaataggtcaaaagctctactaaaatttttcaatctcatcaaatccatatgtcatatgaccgaacaaggccttagcgggtagggcacatcatcttaacgccaaactgctgcctcgaaaacgagtgtatagggcacaacatttgaaccacatatatgatatcaatcttatcaatctattgtgttaattatgaatcctgcatcaatcaaccagggcccggggcacattttcccaagccattgacaaatgttggtagatgcaggattcatagttacagaaactatgtggttcaaattttgccagtatttgactcatcacatttttcttctctatttcagttcttctagcagttgaagtagtgttttcttggcagatgttcgcctttaggacattgctgcgaggggaatcggatatgccacaggctgcatgttgttggagtttctatgtatccccatatcaaatttgtttttccctaatcagggaactcaattgtgcgagtaatagcaggagctcttccgaaaggccttcacatgttaatcctatcgaagaataacatatcaattattgaacgcctcagagaattgacacgattgcgcttgttggatatcaactataataggatatctagaattggccatggtgcagaggatgctaggaaaatactcaataattatgtcggggccattactcagatggtaaacaaacttgggccatgtaaatggtcgaccttgcctaaactatacctggacgtattggaaagcaatgctgggaaagctatgccatgaaagatatttgtagcagtgttacatgatggcatcaagtgctgggaaaatatttattaatttatggttttgtttctatggaatataggagtcatgattttgtgcatttgatcagagactacattaactagaggatactttctttttttcaaaattacaaaaacaatactaagtgtacctattattgtctactcgtctcatgatgattactatgtagataaattctctaagctatgaacagtgaccaatgaaatatattcatttgcatacagttctcaaactaatgtattcacgtcattatatattgtgccagctttgtcaattacgcaaattctaaaatgagcatatcacataactttgattccttttgagcaatttagtttttgatttcttttgaacaatttagtttacgaaacaacaatgtgtatatgaacagatgatagtttagcaatgcatagacaccttactatatattttaaag

SEQ ID NO: 4722 - DNA, 6695 bp, Zea Mays
atgcacccacgccccgtctctttgaagccgcccgcgtctccacccgagaccccgacccaccccgccctcccccgccgtcgcgctcgcgctcccccgcgacagccgccatgcgccctatctccgccatgcctgcgcctcctcccccgcccgcccgagaaccaccaagtttcccttccttacacagcgaggtccaccatcaacgcccccttccctggcaagccacagccgtccacgttcctggccaccagcgacctcccttctctagcccttagcagcgagcaacacctcctccccatggctgcccccagaccccagtcccgtccgcgcatccgctcccccgtcagcgacgcacctattctcctcgacgtcgcccatggcgtggacggcgacctccctcaccctgcactctggtatgtcaccgtattgcccgcctcctttccccgcaccggcgcagccccctgttgcggcggccccttccccaaacagcacggcaccacgtgctccccctgccgcgcccgcactctccttccccaaacagcacggccccacgacgctcacactctccttccctggcgatatcccctcatctgcgccttgtccctcggagatccccttccatcttcggcaccgagaggaaaatggatggcaatcccatccatcggcgccaaaccctacacatcctccatagtaggcacccgcccctccttacgcggcaccatcggtggggatatcccccaatctgctggaaggagtccgcgccaaatcagagcccgaaatccgtgccaaatccacgctggatgaggtggtggggagaccccccaatctgcgtcccttctacatgcctacacatcctccatagaaggcgccctcctactaaccactaaaaaaccccttccacacgctgacaactccatatatattagtccaaagggagagcacgattaaggccacgcctaccagcttcaccctcctcgcatttgtaagtccaatttttagatttatgatttcagatgttgagttgattttgcaaactggtaagtgttttgtttcatacggcaactctgcacatggacagaatcacagctctgttagcgttgttttatcaaggtacgtccaattccttctatttagttgactgtgattcaatatgcttgttgttcggttttacttgcgacatgctgttggggcatgtgtttgggatggatgacgtttggactagatagtttcagtcagtagccatctaaacaagcccttacagtattcgctatttcatattgaattttcctcatattgtagagaaaatcgcagctaatctgttcactgtggatgagttgccccatggtttgttcttaatcagaagaatggacgtgtgcaccacagtttagtgctaaatcatatggatataggagagatgtgctctctcctgtcctaaaacagttcatgttctcgtttttctattctgacagttcataagcgccggtcttttagatgcccactgacctggacatgttggtagaaatactgggcaggtgggatcaactccgatatttggtcaatttctcaaccactttctgttaatacgcaatttttattgaaaaacataatgacgtgcaatgcaaccaccctattcaatattcgtatggttagcaaaccatacgatcaatagaagatctttttggtagcactaaactacctacatacttgcatgcatgcgtcctaatccttgagtttgagtcaaaattaaatcaaaaattgtcatgatcaatcaaacaggaaagaattgacattctatagtttgcgtaggaaagtgtctctgtgtgttttctttttgaaggatcaaggattgaaggattttcctgcttgacggattagcacttcagtaccagtagttaagttattaggagcagtagcaaaaaggggctatatttgtttagggcttgttcgttttcatctcaatccatgtggatcagaggggtttgagtagctttaaatctacaataggtcaaaagctctactaaaatttttcaatctcatcaaatccatatgtcatatgaccgaacaaggccttagcgggtagggcacatcatcttaacgccaaactgctgcctcgaaaacgagtgtatagggcacaacatttgaaccacatatatgatatcaatcttatcaatctattgtgttaattatgaatcctgcatcaatcaaccagggcccggggcacattttcccaagccattgacaaatgttggtagatgcaggattcatagttacagaaactatgtggttcaaattttgccagtatttgactcatcacatttttcttctctatttcagttcttctagcagttgaagtagtgttttcttggcagatgttcgcctttaggacattgctgcgaggggaatcggatatgccacaggctgcatgttgttggagtttctatgtatccccatatcaaatttgtttttccctaatcagggaactcaattgtgcgagtaatagcaggagctcttccgaaaggccttcacatgttaatcctatcgaagaataacatatcaattattgaacgcctcagagaattgacacgattgcgcttgttggatatcaactataataggatatctagaattggccatggtatgtgttttagcttctcatatgatcttttttatgtgtttctccttggttgtggccacatgataggttcttactttgttcctatcccctttcccccattttcgtcttttgatatggcaagttcactgtgctttggattcttaactatctcaagtcatatgagaaaccccgttcatggatacttcctgataattatattcttcttgcattgacttgtgttttagatcatctgttaggattggcctcatgttcctctttgaaggagttgtatctggtcggtaacaagatcagtgaggtagatggtcttcaccgacttctgaagctcaaggttctggacttgtgccacattcagtcttctgtagccactatacttggggttggtgaggctggtggaaggtttcagttcttctatacgtggaactaacctataggaggccagactgctagagcggtagagccagaaagtaatagttggtgacttggcggggacatttatgttatgctacctaattattaatctgtggaaaaggggaagcttttggagtagagcttattttttgttcgggttactatttcctctaattgtgtgaaaactgaaaagtatggttcgtgtctgaaaagcaatagttggtcgaggcatatttttgtatggttccactgtactaccttctatctggtgaattagatcccgattctaaataagttgctctctaatcagattaaacactttaatgtagctggcaattgcttattttgcaggtgcagaggatgctaggaaaatactcaataattatggtacatgtccaattctaagtatggtatattgtgctctaatatttttaggcatcattgtttctgttaaatactttgcccatggttaaggttatgagtgcattggttaatgaaatgtatgacattaaacggtggctgcgtggtgttccatcgtttcgccttgagccattatttaggcgaagagttccacaattgcatactgcacttgaacatatatagtactcatgaagttgttctacatcatattggatttcaatgcttttttatcagtgacagttttctcttttttggtgagtacaataattgtatttttatcttgtaatagattagttttattcatacgacaagcactatgcactgtgatatttgttgatttttcctttacctgccccccttgcactttctaattaaatgtttttgactatggaatggatcttttccattccatgtggtttgggggacaattgatgtgctttgctttgaagacagttgtagtggtcatctgattgtgaatttgtggtgcacaagttggctatgtgttttttccaagaaaatattttcttaacatagtccagcactaggattctcgagtccccgatccccagcacaaacttgctgttgtttccacttttatcgtcaatagttgttagtacttactgattaaattcacattctttaatatatgaactttattgctttctgattgtgcattcagaggggcaacagtacatcattaatccatcaaatgttcaaaaatgtgcatccataggtgcaacattataacagggatacagtcactgctacgtacaataattttatggggctactgtaccacctgtacagtttttcatgatctgtttgagggaccttaacctaggtactaggcaaattttaccattgttgtgaactgactataaaactccttttaaggtggccttaaagtaaatttaagcatgtttgcttgaagccgctcagcctcagatcatcttaagaggttgtggatttattgagtccaacacaagtttggtgttcctttgtacagttttactatggagtaccagactacgagtcattgtttgtgccatgggtccttgacctttgtaactaattcaagtcagatgatatgtatctccttatgaaattcttttctcaactaccgtgatgatatttcaataattgatttcagtttcttctatgcattcaaagtagccaggctatcatgacggcattaagttcttgtatttaaccgttcgaccaaatttgtccaattgttataggtatctgtgaaaatccatgaacaacttatgtgttcatgtctctcattttatgtccttgcatgtcaataactataggtatctgtgtttatcacatatacaagctaacaatatacagttatgggtgagacaacgtcttagttcactgatcacacacatatttttgacagtcaatacttgcaataatgtgatatttgtaaactaatttttcctcaaaaattgtaacctgcatcaggcaaatatgagaaactagcatttgttgatgtttgaagtatatttatgtggatttgtgacttccttacatctcctctttcaaacaattggttcattattattattggtatggtggtgttatcgccccatttgcattaagctgctcactaagtcaaagtagtaaaaagccatggctgttgttacctagaagatgttgtgtatattcaaatcatagtgcttgtgttttgggctggagatagcacaaaataactactaaaactatctattatcaagtgatccatttgcagttttttcaatctgacactcacagactcactggttatatttcagagctgggaagaagctaacgatataccatacttagactcactggttaaggttatgagtgcattggtttgtaaaaaaaatatttcatggtcaccacagtaggagcaacatatccctgtttagcatattgggtaataactgtgctgatagtgtcacttaaacttggtaaacctgcaactgtaaatactgatacgtggactataagttttggccgtgcagttgctgtgtgataactattttgagttttcctaaacagtttcttacctagattgtcgtgaacttgcggtgtagtagcattgtacctattttaacttggccttgtttgtttgattttgtaagtgagggttttaatttagttgctagctcgatgaaagactatgattcgcaagactggatattttcctgcttatgaagaagcggtggcaaccaaattttcgaagtatgtgagttaaaaatctcgtcatgaatgaactcatgttgtttatagatttgcactggaatatgggcatgtagtgggcactactgggctaggagaagatgaagtgtttgtttttaattgcgtctttttgattgctttggcatgtatggctggcaatgtcatgttttttcatttttgtccacttcaatacacatgaaaccgttttggagactaattttgaagtatgtttaaacaattattctatttaaataagatctgcatatgtgatatattgaaaccattttggcaatgtcgtgtttttttatttttgtttaccatctgcatacctttacaaatgtcattttggttattttactgaattatattatatgccacatgactcttttattatttcttttttttaagaaagtcggggccattactcagatggtaaacaaacttgggccatgtaaatggtcgaccttgcctaaactatacctggacgtattggaaagcaatgctgggaaagctatgccatgaaagatatttgtagcagtgttacatgatggcatcaagtgctgggaaaatatttattaatttatggttttgtttctatggaatataggagtcatgattttgtgcatttgatcagagactacattaactagaggatactttctttttttcaaaattacaaaaacaatactaagtgtacctattattgtctactcgtctcatgatgattactatgtagataaattctctaagctatgaacagtgaccaatgaaatatattcatttgcatacagttctcaaactaatgtattcacgtcattatatattgtgccagctttgtcaattacgcaaattctaaaatgagcatatcacataactttgattccttttgagcaatttagtttttgatttcttttgaacaatttagtttacgaaacaacaatgtgtatatgaacagatgatagtttagcaatgcatagacaccttactatatattttaaag

SEQ ID NO: 4723 - DNA, 3283 bp, Zea Mays
atgcacccacgccccgtctctttgaagccgcccgcgtctccacccgagaccccgacccaccccgccctcccccgccgtcgcgctcgcgctcccccgcgacagccgccatgcgccctatctccgccatgcctgcgcctcctcccccgcccgcccgagaaccaccaagtttcccttccttacacagcgaggtccaccatcaacgcccccttccctggcaagccacagccgtccacgttcctggccaccagcgacctcccttctctagcccttagcagcgagcaacacctcctccccatggctgcccccagaccccagtcccgtccgcgcatccgctcccccgtcagcgacgcacctattctcctcgacgtcgcccatggcgtggacggcgacctccctcaccctgcactctggtatgtcaccgtattgcccgcctcctttccccgcaccggcgcagccccctgttgcggcggccccttccccaaacagcacggcaccacgtgctccccctgccgcgcccgcactctccttccccaaacagcacggccccacgacgctcacactctccttccctggcgatatcccctcatctgcgccttgtccctcggagatccccttccatcttcggcaccgagaggaaaatggatggcaatcccatccatcggcgccaaaccctacacatcctccatagtaggcacccgcccctccttacgcggcaccatcggtggggatatcccccaatctgctggaaggagtccgcgccaaatcagagcccgaaatccgtgccaaatccacgctggatgaggtggtggggagaccccccaatctgcgtcccttctacatgcctacacatcctccatagaaggcgccctcctactaaccactaaaaaaccccttccacacgctgacaactccatatatattagtccaaagggagagcacgattaaggccacgcctaccagcttcaccctcctcgcatttgtaagtccaatttttagatttatgatttcagatgttgagttgattttgcaaactggtaagtgttttgtttcatacggcaactctgcacatggacagaatcacagctctgttagcgttgttttatcaaggtacgtccaattccttctatttagttgactgtgattcaatatgcttgttgttcggttttacttgcgacatgctgttggggcatgtgtttgggatggatgacgtttggactagatagtttcagtcagtagccatctaaacaagcccttacagtattcgctatttcatattgaattttcctcatattgtagagaaaatcgcagctaatctgttcactgtggatgagttgccccatggtttgttcttaatcagaagaatggacgtgtgcaccacagtttagtgctaaatcatatggatataggagagatgtgctctctcctgtcctaaaacagttcatgttctcgtttttctattctgacagttcataagcgccggtcttttagatgcccactgacctggacatgttggtagaaatactgggcaggtgggatcaactccgatatttggtcaatttctcaaccactttctgttaatacgcaatttttattgaaaaacataatgacgtgcaatgcaaccaccctattcaatattcgtatggttagcaaaccatacgatcaatagaagatctttttggtagcactaaactacctacatacttgcatgcatgcgtcctaatccttgagtttgagtcaaaattaaatcaaaaattgtcatgatcaatcaaacaggaaagaattgacattctatagtttgcgtaggaaagtgtctctgtgtgttttctttttgaaggatcaaggattgaaggattttcctgcttgacggattagcacttcagtaccagtagttaagttattaggagcagtagcaaaaaggggctatatttgtttagggcttgttcgttttcatctcaatccatgtggatcagaggggtttgagtagctttaaatctacaataggtcaaaagctctactaaaatttttcaatctcatcaaatccatatgtcatatgaccgaacaaggccttagcgggtagggcacatcatcttaacgccaaactgctgcctcgaaaacgagtgtatagggcacaacatttgaaccacatatatgatatcaatcttatcaatctattgtgttaattatgaatcctgcatcaatcaaccagggcccggggcacattttcccaagccattgacaaatgttggtagatgcaggattcatagttacagaaactatgtggttcaaattttgccagtatttgactcatcacatttttcttctctatttcagttcttctagcagttgaagtagtgttttcttggcagatgttcgcctttaggacattgctgcgaggggaatcggatatgccacaggctgcatgttgttggagtttctatgtatccccatatcaaatttgtttttccctaatcagggaactcaattgtgcgagtaatagcaggagctcttccgaaaggccttcacatgttaatcctatcgaagaataacatatcaattattgaacgcctcagagaattgacacgattgcgcttgttggatatcaactataataggatatctagaattggccatggtgcagaggatgctaggaaaatactcaataattatggtacatgtccaattctaagtatgaaagtcggggccattactcagatggtaaacaaacttgggccatgtaaatggtcgaccttgcctaaactatacctggacgtattggaaagcaatgctgggaaagctatgccatgaaagatatttgtagcagtgttacatgatggcatcaagtgctgggaaaatatttattaatttatggttttgtttctatggaatataggagtcatgattttgtgcatttgatcagagactacattaactagaggatactttctttttttcaaaattacaaaaacaatactaagtgtacctattattgtctactcgtctcatgatgattactatgtagataaattctctaagctatgaacagtgaccaatgaaatatattcatttgcatacagttctcaaactaatgtattcacgtcattatatattgtgccagctttgtcaattacgcaaattctaaaatgagcatatcacataactttgattccttttgagcaatttagtttttgatttcttttgaacaatttagtttacgaaacaacaatgtgtatatgaacagatgatagtttagcaatgcatagacaccttactatatattttaaag

SEQ ID NO: 4724 - DNA, 6092 bp, Zea Mays
atgcacccacgccccgtctctttgaagccgcccgcgtctccacccgagaccccgacccaccccgccctcccccgccgtcgcgctcgcgctcccccgcgacagccgccatgcgccctatctccgccatgcctgcgcctcctcccccgcccgcccgagaaccaccaagtttcccttccttacacagcgaggtccaccatcaacgcccccttccctggcaagccacagccgtccacgttcctggccaccagcgacctcccttctctagcccttagcagcgagcaacacctcctccccatggctgcccccagaccccagtcccgtccgcgcatccgctcccccgtcagcgacgcacctattctcctcgacgtcgcccatggcgtggacggcgacctccctcaccctgcactctggtatgtcaccgtattgcccgcctcctttccccgcaccggcgcagccccctgttgcggcggccccttccccaaacagcacggcaccacgtgctccccctgccgcgcccgcactctccttccccaaacagcacggccccacgacgctcacactctccttccctggcgatatcccctcatctgcgccttgtccctcggagatccccttccatcttcggcaccgagaggaaaatggatggcaatcccatccatcggcgccaaaccctacacatcctccatagtaggcacccgcccctccttacgcggcaccatcggtggggatatcccccaatctgctggaaggagtccgcgccaaatcagagcccgaaatccgtgccaaatccacgctggatgaggtggtggggagaccccccaatctgcgtcccttctacatgcctacacatcctccatagaaggcgccctcctactaaccactaaaaaaccccttccacacgctgacaactccatatatattagtccaaagggagagcacgattaaggccacgcctaccagcttcaccctcctcgcatttgtaagtccaatttttagatttatgatttcagatgttgagttgattttgcaaactggtaagtgttttgtttcatacggcaactctgcacatggacagaatcacagctctgttagcgttgttttatcaaggtacgtccaattccttctatttagttgactgtgattcaatatgcttgttgttcggttttacttgcgacatgctgttggggcatgtgtttgggatggatgacgtttggactagatagtttcagtcagtagccatctaaacaagcccttacagtattcgctatttcatattgaattttcctcatattgtagagaaaatcgcagctaatctgttcactgtggatgagttgccccatggtttgttcttaatcagaagaatggacgtgtgcaccacagtttagtgctaaatcatatggatataggagagatgtgctctctcctgtcctaaaacagttcatgttctcgtttttctattctgacagttcataagcgccggtcttttagatgcccactgacctggacatgttggtagaaatactgggcaggtgggatcaactccgatatttggtcaatttctcaaccactttctgttaatacgcaatttttattgaaaaacataatgacgtgcaatgcaaccaccctattcaatattcgtatggttagcaaaccatacgatcaatagaagatctttttggtagcactaaactacctacatacttgcatgcatgcgtcctaatccttgagtttgagtcaaaattaaatcaaaaattgtcatgatcaatcaaacaggaaagaattgacattctatagtttgcgtaggaaagtgtctctgtgtgttttctttttgaaggatcaaggattgaaggattttcctgcttgacggattagcacttcagtaccagtagttaagttattaggagcagtagcaaaaaggggctatatttgtttagggcttgttcgttttcatctcaatccatgtggatcagaggggtttgagtagctttaaatctacaataggtcaaaagctctactaaaatttttcaatctcatcaaatccatatgtcatatgaccgaacaaggccttagcgggtagggcacatcatcttaacgccaaactgctgcctcgaaaacgagtgtatagggcacaacatttgaaccacatatatgatatcaatcttatcaatctattgtgttaattatgaatcctgcatcaatcaaccagggcccggggcacattttcccaagccattgacaaatgttggtagatgcaggattcatagttacagaaactatgtggttcaaattttgccagtatttgactcatcacatttttcttctctatttcagttcttctagcagttgaagtagtgttttcttggcagatgttcgcctttaggacattgctgcgaggggaatcggatatgccacaggctgcatgttgttggagtttctatgtatccccatatcaaatttgtttttccctaatcagggaactcaattgtgcgagtaatagcaggagctcttccgaaaggccttcacatgttaatcctatcgaagaataacatatcaattattgaacgcctcagagaattgacacgattgcgcttgttggatatcaactataataggatatctagaattggccatgatcatctgttaggattggcctcatgttcctctttgaaggagttgtatctggtcggtaacaagatcagtgaggtagatggtcttcaccgacttctgaagctcaaggttctggacttgtgccacattcagtcttctgtagccactatacttggggttggtgcagaggatgctaggaaaatactcaataattatggtacatgtccaattctaagtatggtatattgtgctctaatatttttaggcatcattgtttctgttaaatactttgcccatggttaaggttatgagtgcattggttaatgaaatgtatgacattaaacggtggctgcgtggtgttccatcgtttcgccttgagccattatttaggcgaagagttccacaattgcatactgcacttgaacatatatagtactcatgaagttgttctacatcatattggatttcaatgcttttttatcagtgacagttttctcttttttggtgagtacaataattgtatttttatcttgtaatagattagttttattcatacgacaagcactatgcactgtgatatttgttgatttttcctttacctgccccccttgcactttctaattaaatgtttttgactatggaatggatcttttccattccatgtggtttgggggacaattgatgtgctttgctttgaagacagttgtagtggtcatctgattgtgaatttgtggtgcacaagttggctatgtgttttttccaagaaaatattttcttaacatagtccagcactaggattctcgagtccccgatccccagcacaaacttgctgttgtttccacttttatcgtcaatagttgttagtacttactgattaaattcacattctttaatatatgaactttattgctttctgattgtgcattcagaggggcaacagtacatcattaatccatcaaatgttcaaaaatgtgcatccataggtgcaacattataacagggatacagtcactgctacgtacaataattttatggggctactgtaccacctgtacagtttttcatgatctgtttgagggaccttaacctaggtactaggcaaattttaccattgttgtgaactgactataaaactccttttaaggtggccttaaagtaaatttaagcatgtttgcttgaagccgctcagcctcagatcatcttaagaggttgtggatttattgagtccaacacaagtttggtgttcctttgtacagttttactatggagtaccagactacgagtcattgtttgtgccatgggtccttgacctttgtaactaattcaagtcagatgatatgtatctccttatgaaattcttttctcaactaccgtgatgatatttcaataattgatttcagtttcttctatgcattcaaagtagccaggctatcatgacggcattaagttcttgtatttaaccgttcgaccaaatttgtccaattgttataggtatctgtgaaaatccatgaacaacttatgtgttcatgtctctcattttatgtccttgcatgtcaataactataggtatctgtgtttatcacatatacaagctaacaatatacagttatgggtgagacaacgtcttagttcactgatcacacacatatttttgacagtcaatacttgcaataatgtgatatttgtaaactaatttttcctcaaaaattgtaacctgcatcaggcaaatatgagaaactagcatttgttgatgtttgaagtatatttatgtggatttgtgacttccttacatctcctctttcaaacaattggttcattattattattggtatggtggtgttatcgccccatttgcattaagctgctcactaagtcaaagtagtaaaaagccatggctgttgttacctagaagatgttgtgtatattcaaatcatagtgcttgtgttttgggctggagatagcacaaaataactactaaaactatctattatcaagtgatccatttgcagttttttcaatctgacactcacagactcactggttatatttcagagctgggaagaagctaacgatataccatacttagactcactggttaaggttatgagtgcattggtttgtaaaaaaaatatttcatggtcaccacagtaggagcaacatatccctgtttagcatattgggtaataactgtgctgatagtgtcacttaaacttggtaaacctgcaactgtaaatactgatacgtggactataagttttggccgtgcagttgctgtgtgataactattttgagttttcctaaacagtttcttacctagattgtcgtgaacttgcggtgtagtagcattgtacctattttaacttggccttgtttgtttgattttgtaagtgagggttttaatttagttgctagctcgatgaaagactatgattcgcaagactggatattttcctgcttatgaagaagcggtggcaaccaaattttcgaagtatgtgagttaaaaatctcgtcatgaatgaactcatgttgtttatagatttgcactggaatatgggcatgtagtgggcactactgggctaggagaagatgaagtgtttgtttttaattgcgtctttttgattgctttggcatgtatggctggcaatgtcatgttttttcatttttgtccacttcaatacacatgaaaccgttttggagactaattttgaagtatgtttaaacaattattctatttaaataagatctgcatatgtgatatattgaaaccattttggcaatgtcgtgtttttttatttttgtttaccatctgcatacctttacaaatgtcattttggttattttactgaattatattatatgccacatgactcttttattatttcttttttttaagaaagtcggggccattactcagatggtaaacaaacttgggccatgtaaatggtcgaccttgcctaaactatacctggacgtattggaaagcaatgctgggaaagctatgccatgaaagatatttgtagcagtgttacatgatggcatcaagtgctgggaaaatatttattaatttatggttttgtttctatggaatataggagtcatgattttgtgcatttgatcagagactacattaactagaggatactttctttttttcaaaattacaaaaacaatactaagtgtacctattattgtctactcgtctcatgatgattactatgtagataaattctctaagctatgaacagtgaccaatgaaatatattcatttgcatacagttctcaaactaatgtattcacgtcattatatattgtgccagctttgtcaattacgcaaattctaaaatgagcatatcacataactttgattccttttgagcaatttagtttttgatttcttttgaacaatttagtttacgaaacaacaatgtgtatatgaacagatgatagtttagcaatgcatagacaccttactatatattttaaag

SEQ ID NO: 4725 - DNA, 2396 bp, Zea Mays
atgcacccacgccccgtctctttgaagccgcccgcgtctccacccgagaccccgacccaccccgccctcccccgccgtcgcgctcgcgctcccccgcgacagccgccatgcgccctatctccgccatgcctgcgcctcctcccccgcccgcccgagaaccaccaagtttcccttccttacacagcgaggtccaccatcaacgcccccttccctggcaagccacagccgtccacgttcctggccaccagcgacctcccttctctagcccttagcagcgagcaacacctcctccccatggctgcccccagaccccagtcccgtccgcgcatccgctcccccgtcagcgacgcacctattctcctcgacgtcgcccatggcgtggacggcgacctccctcaccctgcactctggtatgtcaccgtattgcccgcctcctttccccgcaccggcgcagccccctgttgcggcggccccttccccaaacagcacggcaccacgtgctccccctgccgcgcccgcactctccttccccaaacagcacggccccacgacgctcacactctccttccctggcgatatcccctcatctgcgccttgtccctcggagatccccttccatcttcggcaccgagaggaaaatggatggcaatcccatccatcggcgccaaaccctacacatcctccatagtaggcacccgcccctccttacgcggcaccatcggtggggatatcccccaatctgctggaaggagtccgcgccaaatcagagcccgaaatccgtgccaaatccacgctggatgaggtggtggggagaccccccaatctgcgtcccttctacatgcctacacatcctccatagaaggcgccctcctactaaccactaaaaaaccccttccacacgctgacaactccatatatattagtccaaagggagagcacgattaaggccacgcctaccagcttcaccctcctcgcatttttcttctagcagttgaagtagtgttttcttggcagatgttcgcctttaggacattgctgcgaggggaatcggatatgccacaggctgcatgttgttggagtttctatgtatccccatatcaaatttgtttttccctaatcagggaactcaattgtgcgagtaatagcaggagctcttccgaaaggccttcacatgttaatcctatcgaagaataacatatcaattattgaacgcctcagagaattgacacgattgcgcttgttggatatcaactataataggatatctagaattggccatggtgcagaggatgctaggaaaatactcaataattatgttgctagctcgatgaaagactatgattcgcaagactggatattttcctgcttatgaagaagcggtggcaaccaaattttcgaagtatgtgagttaaaaatctcgtcatgaatgaactcatgttgtttatagatttgcactggaatatgggcatgtagtgggcactactgggctaggagaagatgaagtgtttgtttttaattgcgtctttttgattgctttggcatgtatggctggcaatgtcatgttttttcatttttgtccacttcaatacacatgaaaccgttttggagactaattttgaagtatgtttaaacaattattctatttaaataagatctgcatatgtgatatattgaaaccattttggcaatgtcgtgtttttttatttttgtttaccatctgcatacctttacaaatgtcattttggttattttactgaattatattatatgccacatgactcttttattatttcttttttttaagaaagtcggggccattactcagatggtaaacaaacttgggccatgtaaatggtcgaccttgcctaaactatacctggacgtattggaaagcaatgctgggaaagctatgccatgaaagatatttgtagcagtgttacatgatggcatcaagtgctgggaaaatatttattaatttatggttttgtttctatggaatataggagtcatgattttgtgcatttgatcagagactacattaactagaggatactttctttttttcaaaattacaaaaacaatactaagtgtacctattattgtctactcgtctcatgatgattactatgtagataaattctctaagctatgaacagtgaccaatgaaatatattcatttgcatacagttctcaaactaatgtattcacgtcattatatattgtgccagctttgtcaattacgcaaattctaaaatgagcatatcacataactttgattccttttgagcaatttagtttttgatttcttttgaacaatttagtttacgaaacaacaatgtgtatatgaacagatgatagtttagcaatgcatagacaccttactatatattttaaag

SEQ ID NO: 4726 - DNA, 6286 bp, Zea Mays
atgcacccacgccccgtctctttgaagccgcccgcgtctccacccgagaccccgacccaccccgccctcccccgccgtcgcgctcgcgctcccccgcgacagccgccatgcgccctatctccgccatgcctgcgcctcctcccccgcccgcccgagaaccaccaagtttcccttccttacacagcgaggtccaccatcaacgcccccttccctggcaagccacagccgtccacgttcctggccaccagcgacctcccttctctagcccttagcagcgagcaacacctcctccccatggctgcccccagaccccagtcccgtccgcgcatccgctcccccgtcagcgacgcacctattctcctcgacgtcgcccatggcgtggacggcgacctccctcaccctgcactctggtatgtcaccgtattgcccgcctcctttccccgcaccggcgcagccccctgttgcggcggccccttccccaaacagcacggcaccacgtgctccccctgccgcgcccgcactctccttccccaaacagcacggccccacgacgctcacactctccttccctggcgatatcccctcatctgcgccttgtccctcggagatccccttccatcttcggcaccgagaggaaaatggatggcaatcccatccatcggcgccaaaccctacacatcctccatagtaggcacccgcccctccttacgcggcaccatcggtggggatatcccccaatctgctggaaggagtccgcgccaaatcagagcccgaaatccgtgccaaatccacgctggatgaggtggtggggagaccccccaatctgcgtcccttctacatgcctacacatcctccatagaaggcgccctcctactaaccactaaaaaaccccttccacacgctgacaactccatatatattagtccaaagggagagcacgattaaggccacgcctaccagcttcaccctcctcgcatttgtaagtccaatttttagatttatgatttcagatgttgagttgattttgcaaactggtaagtgttttgtttcatacggcaactctgcacatggacagaatcacagctctgttagcgttgttttatcaaggtacgtccaattccttctatttagttgactgtgattcaatatgcttgttgttcggttttacttgcgacatgctgttggggcatgtgtttgggatggatgacgtttggactagatagtttcagtcagtagccatctaaacaagcccttacagtattcgctatttcatattgaattttcctcatattgtagagaaaatcgcagctaatctgttcactgtggatgagttgccccatggtttgttcttaatcagaagaatggacgtgtgcaccacagtttagtgctaaatcatatggatataggagagatgtgctctctcctgtcctaaaacagttcatgttctcgtttttctattctgacagttcataagcgccggtcttttagatgcccactgacctggacatgttggtagaaatactgggcaggtgggatcaactccgatatttggtcaatttctcaaccactttctgttaatacgcaatttttattgaaaaacataatgacgtgcaatgcaaccaccctattcaatattcgtatggttagcaaaccatacgatcaatagaagatctttttggtagcactaaactacctacatacttgcatgcatgcgtcctaatccttgagtttgagtcaaaattaaatcaaaaattgtcatgatcaatcaaacaggaaagaattgacattctatagtttgcgtaggaaagtgtctctgtgtgttttctttttgaaggatcaaggattgaaggattttcctgcttgacggattagcacttcagtaccagtagttaagttattaggagcagtagcaaaaaggggctatatttgtttagggcttgttcgttttcatctcaatccatgtggatcagaggggtttgagtagctttaaatctacaataggtcaaaagctctactaaaatttttcaatctcatcaaatccatatgtcatatgaccgaacaaggccttagcgggtagggcacatcatcttaacgccaaactgctgcctcgaaaacgagtgtatagggcacaacatttgaaccacatatatgatatcaatcttatcaatctattgtgttaattatgaatcctgcatcaatcaaccagggcccggggcacattttcccaagccattgacaaatgttggtagatgcaggattcatagttacagaaactatgtggttcaaattttgccagtatttgactcatcacatttttcttctctatttcagttcttctagcagttgaagtagtgttttcttggcagatgttcgcctttaggacattgctgcgaggggaatcggatatgccacaggctgcatgttgttggagtttctatgtatccccatatcaaatttgtttttccctaatcagggaactcaattgtgcgagtaatagcaggagctcttccgaaaggccttcacatgttaatcctatcgaagaataacatatcaattattgaacgcctcagagaattgacacgattgcgcttgttggatatcaactataataggatatctagaattggccatggtatgtgttttagcttctcatatgatcttttttatgtgtttctccttggttgtggccacatgataggttcttactttgttcctatcccctttcccccattttcgtcttttgatatggcaagttcactgtgctttggattcttaactatctcaagtcatatgagaaaccccgttcatggatacttcctgataattatattcttcttgcattgacttgtgttttagatcatctgttaggattggcctcatgttcctctttgaaggagttgtatctggtcggtaacaagatcagtgaggtagatggtcttcaccgacttctgaagctcaaggttctggacttgtgccacattcagtcttctgtagccactatacttggggttggtgaggctggtggaaggtttcagttcttctatacgtggaactaacctataggaggccagactgctagagcggtagagccagaaagtaatagttggtgacttggcggggacatttatgttatgctacctaattattaatctgtggaaaaggggaagcttttggagtagagcttattttttgttcgggttactatttcctctaattgtgtgaaaactgaaaagtatggttcgtgtctgaaaagcaatagttggtcgaggcatatttttgtatggttccactgtactaccttctatctggtgaattagatcccgattctaaataagttgctctctaatcagattaaacactttaatgtagctggcaattgcttattttgcaggtgcagaggatgctaggaaaatactcaataattatggtacatgtccaattctaagtatggtatattgtgctctaatatttttaggcatcattgtttctgttaaatactttgcccatggttaaggttatgagtgcattggttaatgaaatgtatgacattaaacggtggctgcgtggtgttccatcgtttcgccttgagccattatttaggcgaagagttccacaattgcatactgcacttgaacatatatagtactcatgaagttgttctacatcatattggatttcaatgcttttttatcagtgacagttttctcttttttggtgagtacaataattgtatttttatcttgtaatagattagttttattcatacgacaagcactatgcactgtgatatttgttgatttttcctttacctgccccccttgcactttctaattaaatgtttttgactatggaatggatcttttccattccatgtggtttgggggacaattgatgtgctttgctttgaagacagttgtagtggtcatctgattgtgaatttgtggtgcacaagttggctatgtgttttttccaagaaaatattttcttaacatagtccagcactaggattctcgagtccccgatccccagcacaaacttgctgttgtttccacttttatcgtcaatagttgttagtacttactgattaaattcacattctttaatatatgaactttattgctttctgattgtgcattcagaggggcaacagtacatcattaatccatcaaatgttcaaaaatgtgcatccataggtgcaacattataacagggatacagtcactgctacgtacaataattttatggggctactgtaccacctgtacagtttttcatgatctgtttgagggaccttaacctaggtactaggcaaattttaccattgttgtgaactgactataaaactccttttaaggtggccttaaagtaaatttaagcatgtttgcttgaagccgctcagcctcagatcatcttaagaggttgtggatttattgagtccaacacaagtttggtgttcctttgtacagttttactatggagtaccagactacgagtcattgtttgtgccatgggtccttgacctttgtaactaattcaagtcagatgatatgtatctccttatgaaattcttttctcaactaccgtgatgatatttcaataattgatttcagtttcttctatgcattcaaagtagccaggctatcatgacggcattaagttcttgtatttaaccgttcgaccaaatttgtccaattgttataggtatctgtgaaaatccatgaacaacttatgtgttcatgtctctcattttatgtccttgcatgtcaataactataggtatctgtgtttatcacatatacaagctaacaatatacagttatgggtgagacaacgtcttagttcactgatcacacacatatttttgacagtcaatacttgcaataatgtgatatttgtaaactaatttttcctcaaaaattgtaacctgcatcaggcaaatatgagaaactagcatttgttgatgtttgaagtatatttatgtggatttgtgacttccttacatctcctctttcaaacaattggttcattattattattggtatggtggtgttatcgccccatttgcattaagctgctcactaagtcaaagtagtaaaaagccatggctgttgttacctagaagatgttgtgtatattcaaatcatagtgcttgtgttttgggctggagatagcacaaaataactactaaaactatctattatcaagtgatccatttgcagttttttcaatctgacactcacagactcactggttatatttcagagctgggaagaagctaacgatataccatacttagactcactggttaaggttatgagtgcattggtttgtaaaaaaaatatttcatggtcaccacagtaggagcaacatatccctgtttagcatattgggtaataactgtgctgatagtgtcacttaaacttggtaaacctgcaactgtaaatactgatacgtggactataagttttggccgtgcagttgctgtgtgataactattttgagttttcctaaacagtttcttacctagattgtcgtgaacttgcggtgtagtagcattgtacctattttaacttggccttgtttgtttgattttgtaagtgagggttttaatttagttgctagctcgatgaaagactatgattcgcaagactggatattttcctgcttatgaagaagcggtggcaaccaaattttcgaatcggggccattactcagatggtaaacaaacttgggccatgtaaatggtcgaccttgcctaaactatacctggacgtattggaaagcaatgctgggaaagctatgccatgaaagatatttgtagcagtgttacatgatggcatcaagtgctgggaaaatatttattaatttatggttttgtttctatggaatataggagtcatgattttgtgcatttgatcagagactacattaactagaggatactttctttttttcaaaattacaaaaacaatactaagtgtacctattattgtctactcgtctcatgatgattactatgtagataaattctctaagctatgaacagtgaccaatgaaatatattcatttgcatacagttctcaaactaatgtattcacgtcattatatattgtgccagctttgtcaattacgcaaattctaaaatgagcatatcacataactttgattccttttgagcaatttagtttttgatttcttttgaacaatttagtttacgaaacaacaatgtgtatatgaacagatgatagtttagcaatgcatagacaccttactatatattttaaag

SEQ ID NO: 4727 - DNA, 2445 bp, Zea Mays
atgcacccacgccccgtctctttgaagccgcccgcgtctccacccgagaccccgacccaccccgccctcccccgccgtcgcgctcgcgctcccccgcgacagccgccatgcgccctatctccgccatgcctgcgcctcctcccccgcccgcccgagaaccaccaagtttcccttccttacacagcgaggtccaccatcaacgcccccttccctggcaagccacagccgtccacgttcctggccaccagcgacctcccttctctagcccttagcagcgagcaacacctcctccccatggctgcccccagaccccagtcccgtccgcgcatccgctcccccgtcagcgacgcacctattctcctcgacgtcgcccatggcgtggacggcgacctccctcaccctgcactctggtatgtcaccgtattgcccgcctcctttccccgcaccggcgcagccccctgttgcggcggccccttccccaaacagcacggcaccacgtgctccccctgccgcgcccgcactctccttccccaaacagcacggccccacgacgctcacactctccttccctggcgatatcccctcatctgcgccttgtccctcggagatccccttccatcttcggcaccgagaggaaaatggatggcaatcccatccatcggcgccaaaccctacacatcctccatagtaggcacccgcccctccttacgcggcaccatcggtggggatatcccccaatctgctggaaggagtccgcgccaaatcagagcccgaaatccgtgccaaatccacgctggatgaggtggtggggagaccccccaatctgcgtcccttctacatgcctacacatcctccatagaaggcgccctcctactaaccactaaaaaaccccttccacacgctgacaactccatatatattagtccaaagggagagcacgattaaggccacgcctaccagcttcaccctcctcgcatttaatcacagctctgttagcgttgttttatcaagttcttctagcagttgaagtagtgttttcttggcagatgttcgcctttaggacattgctgcgaggggaatcggatatgccacaggctgcatgttgttggagtttctatgtatccccatatcaaatttgtttttccctaatcagggaactcaattgtgcgagtaatagcaggagctcttccgaaaggccttcacatgttaatcctatcgaagaataacatatcaattattgaacgcctcagagaattgacacgattgcgcttgttggatatcaactataataggatatctagaattggccatggtgcagaggatgctaggaaaatactcaataattatgtgagggttttaatttagttgctagctcgatgaaagactatgattcgcaagactggatattttcctgcttatgaagaagcggtggcaaccaaattttcgaagtatgtgagttaaaaatctcgtcatgaatgaactcatgttgtttatagatttgcactggaatatgggcatgtagtgggcactactgggctaggagaagatgaagtgtttgtttttaattgcgtctttttgattgctttggcatgtatggctggcaatgtcatgttttttcatttttgtccacttcaatacacatgaaaccgttttggagactaattttgaagtatgtttaaacaattattctatttaaataagatctgcatatgtgatatattgaaaccattttggcaatgtcgtgtttttttatttttgtttaccatctgcatacctttacaaatgtcattttggttattttactgaattatattatatgccacatgactcttttattatttcttttttttaagaaagtcggggccattactcagatggtaaacaaacttgggccatgtaaatggtcgaccttgcctaaactatacctggacgtattggaaagcaatgctgggaaagctatgccatgaaagatatttgtagcagtgttacatgatggcatcaagtgctgggaaaatatttattaatttatggttttgtttctatggaatataggagtcatgattttgtgcatttgatcagagactacattaactagaggatactttctttttttcaaaattacaaaaacaatactaagtgtacctattattgtctactcgtctcatgatgattactatgtagataaattctctaagctatgaacagtgaccaatgaaatatattcatttgcatacagttctcaaactaatgtattcacgtcattatatattgtgccagctttgtcaattacgcaaattctaaaatgagcatatcacataactttgattccttttgagcaatttagtttttgatttcttttgaacaatttagtttacgaaacaacaatgtgtatatgaacagatgatagtttagcaatgcatagacaccttactatatattttaaag

SEQ ID NO: 4728 - DNA, 3360 bp, Zea Mays
atgcacccacgccccgtctctttgaagccgcccgcgtctccacccgagaccccgacccaccccgccctcccccgccgtcgcgctcgcgctcccccgcgacagccgccatgcgccctatctccgccatgcctgcgcctcctcccccgcccgcccgagaaccaccaagtttcccttccttacacagcgaggtccaccatcaacgcccccttccctggcaagccacagccgtccacgttcctggccaccagcgacctcccttctctagcccttagcagcgagcaacacctcctccccatggctgcccccagaccccagtcccgtccgcgcatccgctcccccgtcagcgacgcacctattctcctcgacgtcgcccatggcgtggacggcgacctccctcaccctgcactctggtatgtcaccgtattgcccgcctcctttccccgcaccggcgcagccccctgttgcggcggccccttccccaaacagcacggcaccacgtgctccccctgccgcgcccgcactctccttccccaaacagcacggccccacgacgctcacactctccttccctggcgatatcccctcatctgcgccttgtccctcggagatccccttccatcttcggcaccgagaggaaaatggatggcaatcccatccatcggcgccaaaccctacacatcctccatagtaggcacccgcccctccttacgcggcaccatcggtggggatatcccccaatctgctggaaggagtccgcgccaaatcagagcccgaaatccgtgccaaatccacgctggatgaggtggtggggagaccccccaatctgcgtcccttctacatgcctacacatcctccatagaaggcgccctcctactaaccactaaaaaaccccttccacacgctgacaactccatatatattagtccaaagggagagcacgattaaggccacgcctaccagcttcaccctcctcgcatttgtaagtccaatttttagatttatgatttcagatgttgagttgattttgcaaactggtaagtgttttgtttcatacggcaactctgcacatggacagaatcacagctctgttagcgttgttttatcaaggtacgtccaattccttctatttagttgactgtgattcaatatgcttgttgttcggttttacttgcgacatgctgttggggcatgtgtttgggatggatgacgtttggactagatagtttcagtcagtagccatctaaacaagcccttacagtattcgctatttcatattgaattttcctcatattgtagagaaaatcgcagctaatctgttcactgtggatgagttgccccatggtttgttcttaatcagaagaatggacgtgtgcaccacagtttagtgctaaatcatatggatataggagagatgtgctctctcctgtcctaaaacagttcatgttctcgtttttctattctgacagttcataagcgccggtcttttagatgcccactgacctggacatgttggtagaaatactgggcaggtgggatcaactccgatatttggtcaatttctcaaccactttctgttaatacgcaatttttattgaaaaacataatgacgtgcaatgcaaccaccctattcaatattcgtatggttagcaaaccatacgatcaatagaagatctttttggtagcactaaactacctacatacttgcatgcatgcgtcctaatccttgagtttgagtcaaaattaaatcaaaaattgtcatgatcaatcaaacaggaaagaattgacattctatagtttgcgtaggaaagtgtctctgtgtgttttctttttgaaggatcaaggattgaaggattttcctgcttgacggattagcacttcagtaccagtagttaagttattaggagcagtagcaaaaaggggctatatttgtttagggcttgttcgttttcatctcaatccatgtggatcagaggggtttgagtagctttaaatctacaataggtcaaaagctctactaaaatttttcaatctcatcaaatccatatgtcatatgaccgaacaaggccttagcgggtagggcacatcatcttaacgccaaactgctgcctcgaaaacgagtgtatagggcacaacatttgaaccacatatatgatatcaatcttatcaatctattgtgttaattatgaatcctgcatcaatcaaccagggcccggggcacattttcccaagccattgacaaatgttggtagatgcaggattcatagttacagaaactatgtggttcaaattttgccagtatttgactcatcacatttttcttctctatttcagttcttctagcagttgaagtagtgttttcttggcagatgttcgcctttaggacattgctgcgaggggaatcggatatgccacaggctgcatgttgttggagtttctatgtatccccatatcaaatttgtttttccctaatcagggaactcaattgtgcgagtaatagcaggagctcttccgaaaggccttcacatgttaatcctatcgaagaataacatatcaattattgaacgcctcagagaattgacacgattgcgcttgttggatatcaactataataggatatctagaattggccatggtgcagaggatgctaggaaaatactcaataattatgtgagggttttaatttagttgctagctcgatgaaagactatgattcgcaagactggatattttcctgcttatgaagaagcggtggcaaccaaattttcgaaaaagtcggggccattactcagatggtaaacaaacttgggccatgtaaatggtcgaccttgcctaaactatacctggacgtattggaaagcaatgctgggaaagctatgccatgaaagatatttgtagcagtgttacatgatggcatcaagtgctgggaaaatatttattaatttatggttttgtttctatggaatataggagtcatgattttgtgcatttgatcagagactacattaactagaggatactttctttttttcaaaattacaaaaacaatactaagtgtacctattattgtctactcgtctcatgatgattactatgtagataaattctctaagctatgaacagtgaccaatgaaatatattcatttgcatacagttctcaaactaatgtattcacgtcattatatattgtgccagctttgtcaattacgcaaattctaaaatgagcatatcacataactttgattccttttgagcaatttagtttttgatttcttttgaacaatttagtttacgaaacaacaatgtgtatatgaacagatgatagtttagcaatgcatagacaccttactatatattttaaag

SEQ ID NO: 4729 - DNA, 3278 bp, Zea Mays
atgcacccacgccccgtctctttgaagccgcccgcgtctccacccgagaccccgacccaccccgccctcccccgccgtcgcgctcgcgctcccccgcgacagccgccatgcgccctatctccgccatgcctgcgcctcctcccccgcccgcccgagaaccaccaagtttcccttccttacacagcgaggtccaccatcaacgcccccttccctggcaagccacagccgtccacgttcctggccaccagcgacctcccttctctagcccttagcagcgagcaacacctcctccccatggctgcccccagaccccagtcccgtccgcgcatccgctcccccgtcagcgacgcacctattctcctcgacgtcgcccatggcgtggacggcgacctccctcaccctgcactctggtatgtcaccgtattgcccgcctcctttccccgcaccggcgcagccccctgttgcggcggccccttccccaaacagcacggcaccacgtgctccccctgccgcgcccgcactctccttccccaaacagcacggccccacgacgctcacactctccttccctggcgatatcccctcatctgcgccttgtccctcggagatccccttccatcttcggcaccgagaggaaaatggatggcaatcccatccatcggcgccaaaccctacacatcctccatagtaggcacccgcccctccttacgcggcaccatcggtggggatatcccccaatctgctggaaggagtccgcgccaaatcagagcccgaaatccgtgccaaatccacgctggatgaggtggtggggagaccccccaatctgcgtcccttctacatgcctacacatcctccatagaaggcgccctcctactaaccactaaaaaaccccttccacacgctgacaactccatatatattagtccaaagggagagcacgattaaggccacgcctaccagcttcaccctcctcgcatttgtaagtccaatttttagatttatgatttcagatgttgagttgattttgcaaactggtaagtgttttgtttcatacggcaactctgcacatggacagaatcacagctctgttagcgttgttttatcaaggtacgtccaattccttctatttagttgactgtgattcaatatgcttgttgttcggttttacttgcgacatgctgttggggcatgtgtttgggatggatgacgtttggactagatagtttcagtcagtagccatctaaacaagcccttacagtattcgctatttcatattgaattttcctcatattgtagagaaaatcgcagctaatctgttcactgtggatgagttgccccatggtttgttcttaatcagaagaatggacgtgtgcaccacagtttagtgctaaatcatatggatataggagagatgtgctctctcctgtcctaaaacagttcatgttctcgtttttctattctgacagttcataagcgccggtcttttagatgcccactgacctggacatgttggtagaaatactgggcaggtgggatcaactccgatatttggtcaatttctcaaccactttctgttaatacgcaatttttattgaaaaacataatgacgtgcaatgcaaccaccctattcaatattcgtatggttagcaaaccatacgatcaatagaagatctttttggtagcactaaactacctacatacttgcatgcatgcgtcctaatccttgagtttgagtcaaaattaaatcaaaaattgtcatgatcaatcaaacaggaaagaattgacattctatagtttgcgtaggaaagtgtctctgtgtgttttctttttgaaggatcaaggattgaaggattttcctgcttgacggattagcacttcagtaccagtagttaagttattaggagcagtagcaaaaaggggctatatttgtttagggcttgttcgttttcatctcaatccatgtggatcagaggggtttgagtagctttaaatctacaataggtcaaaagctctactaaaatttttcaatctcatcaaatccatatgtcatatgaccgaacaaggccttagcgggtagggcacatcatcttaacgccaaactgctgcctcgaaaacgagtgtatagggcacaacatttgaaccacatatatgatatcaatcttatcaatctattgtgttaattatgaatcctgcatcaatcaaccagggcccggggcacattttcccaagccattgacaaatgttggtagatgcaggattcatagttacagaaactatgtggttcaaattttgccagtatttgactcatcacatttttcttctctatttcagttcttctagcagttgaagtagtgttttcttggcagatgttcgcctttaggacattgctgcgaggggaatcggatatgccacaggctgcatgttgttggagtttctatgtatccccatatcaaatttgtttttccctaatcagggaactcaattgtgcgagtaatagcaggagctcttccgaaaggccttcacatgttaatcctatcgaagaataacatatcaattattgaacgcctcagagaattgacacgattgcgcttgttggatatcaactataataggatatctagaattggccatggtgcagaggatgctaggaaaatactcaataattatggtacatgtccaattctaaaaagtcggggccattactcagatggtaaacaaacttgggccatgtaaatggtcgaccttgcctaaactatacctggacgtattggaaagcaatgctgggaaagctatgccatgaaagatatttgtagcagtgttacatgatggcatcaagtgctgggaaaatatttattaatttatggttttgtttctatggaatataggagtcatgattttgtgcatttgatcagagactacattaactagaggatactttctttttttcaaaattacaaaaacaatactaagtgtacctattattgtctactcgtctcatgatgattactatgtagataaattctctaagctatgaacagtgaccaatgaaatatattcatttgcatacagttctcaaactaatgtattcacgtcattatatattgtgccagctttgtcaattacgcaaattctaaaatgagcatatcacataactttgattccttttgagcaatttagtttttgatttcttttgaacaatttagtttacgaaacaacaatgtgtatatgaacagatgatagtttagcaatgcatagacaccttactatatattttaaag

SEQ ID NO: 4730 - DNA, 4015 bp, Zea Mays
atgcacccacgccccgtctctttgaagccgcccgcgtctccacccgagaccccgacccaccccgccctcccccgccgtcgcgctcgcgctcccccgcgacagccgccatgcgccctatctccgccatgcctgcgcctcctcccccgcccgcccgagaaccaccaagtttcccttccttacacagcgaggtccaccatcaacgcccccttccctggcaagccacagccgtccacgttcctggccaccagcgacctcccttctctagcccttagcagcgagcaacacctcctccccatggctgcccccagaccccagtcccgtccgcgcatccgctcccccgtcagcgacgcacctattctcctcgacgtcgcccatggcgtggacggcgacctccctcaccctgcactctggtatgtcaccgtattgcccgcctcctttccccgcaccggcgcagccccctgttgcggcggccccttccccaaacagcacggcaccacgtgctccccctgccgcgcccgcactctccttccccaaacagcacggccccacgacgctcacactctccttccctggcgatatcccctcatctgcgccttgtccctcggagatccccttccatcttcggcaccgagaggaaaatggatggcaatcccatccatcggcgccaaaccctacacatcctccatagtaggcacccgcccctccttacgcggcaccatcggtggggatatcccccaatctgctggaaggagtccgcgccaaatcagagcccgaaatccgtgccaaatccacgctggatgaggtggtggggagaccccccaatctgcgtcccttctacatgcctacacatcctccatagaaggcgccctcctactaaccactaaaaaaccccttccacacgctgacaactccatatatattagtccaaagggagagcacgattaaggccacgcctaccagcttcaccctcctcgcatttgtaagtccaatttttagatttatgatttcagatgttgagttgattttgcaaactggtaagtgttttgtttcatacggcaactctgcacatggacagaatcacagctctgttagcgttgttttatcaaggtacgtccaattccttctatttagttgactgtgattcaatatgcttgttgttcggttttacttgcgacatgctgttggggcatgtgtttgggatggatgacgtttggactagatagtttcagtcagtagccatctaaacaagcccttacagtattcgctatttcatattgaattttcctcatattgtagagaaaatcgcagctaatctgttcactgtggatgagttgccccatggtttgttcttaatcagaagaatggacgtgtgcaccacagtttagtgctaaatcatatggatataggagagatgtgctctctcctgtcctaaaacagttcatgttctcgtttttctattctgacagttcataagcgccggtcttttagatgcccactgacctggacatgttggtagaaatactgggcaggtgggatcaactccgatatttggtcaatttctcaaccactttctgttaatacgcaatttttattgaaaaacataatgacgtgcaatgcaaccaccctattcaatattcgtatggttagcaaaccatacgatcaatagaagatctttttggtagcactaaactacctacatacttgcatgcatgcgtcctaatccttgagtttgagtcaaaattaaatcaaaaattgtcatgatcaatcaaacaggaaagaattgacattctatagtttgcgtaggaaagtgtctctgtgtgttttctttttgaaggatcaaggattgaaggattttcctgcttgacggattagcacttcagtaccagtagttaagttattaggagcagtagcaaaaaggggctatatttgtttagggcttgttcgttttcatctcaatccatgtggatcagaggggtttgagtagctttaaatctacaataggtcaaaagctctactaaaatttttcaatctcatcaaatccatatgtcatatgaccgaacaaggccttagcgggtagggcacatcatcttaacgccaaactgctgcctcgaaaacgagtgtatagggcacaacatttgaaccacatatatgatatcaatcttatcaatctattgtgttaattatgaatcctgcatcaatcaaccagggcccggggcacattttcccaagccattgacaaatgttggtagatgcaggattcatagttacagaaactatgtggttcaaattttgccagtatttgactcatcacatttttcttctctatttcagttcttctagcagttgaagtagtgttttcttggcagatgttcgcctttaggacattgctgcgaggggaatcggatatgccacaggctgcatgttgttggagtttctatgtatccccatatcaaatttgtttttccctaatcagggaactcaattgtgcgagtaatagcaggagctcttccgaaaggccttcacatgttaatcctatcgaagaataacatatcaattattgaacgcctcagagaattgacacgattgcgcttgttggatatcaactataataggatatctagaattggccatggtatgtgttttagcttctcatatgatcttttttatgtgtttctccttggttgtggccacatgataggttcttactttgttcctatcccctttcccccattttcgtcttttgatatggcaagttcactgtgctttggattcttaactatctcaagtcatatgagaaaccccgttcatggatacttcctgataattatattcttcttgcattgacttgtgttttagatcatctgttaggattggcctcatgttcctctttgaaggagttgtatctggtcggtaacaagatcagtgaggtagatggtcttcaccgacttctgaagctcaaggttctggacttgtgccacattcagtcttctgtagccactatacttggggttggtgaggctggtggaaggtttcagttcttctatacgtggaactaacctataggaggccagactgctagagcggtagagccagaaagtaatagttggtgacttggcggggacatttatgttatgctacctaattattaatctgtggaaaaggggaagcttttggagtagagcttattttttgttcgggttactatttcctctaattgtgtgaaaactgaaaagtatggttcgtgtctgaaaagcaatagttggtcgaggcatatttttgtatggttccactgtactaccttctatctggtgaattagatcccgattctaaataagttgctctctaatcagattaaacactttaatgtagctggcaattgcttattttgcaggtgcagaggatgctaggaaaatactcaataattatgtcggggccattactcagatggtaaacaaacttgggccatgtaaatggtcgaccttgcctaaactatacctggacgtattggaaagcaatgctgggaaagctatgccatgaaagatatttgtagcagtgttacatgatggcatcaagtgctgggaaaatatttattaatttatggttttgtttctatggaatataggagtcatgattttgtgcatttgatcagagactacattaactagaggatactttctttttttcaaaattacaaaaacaatactaagtgtacctattattgtctactcgtctcatgatgattactatgtagataaattctctaagctatgaacagtgaccaatgaaatatattcatttgcatacagttctcaaactaatgtattcacgtcattatatattgtgccagctttgtcaattacgcaaattctaaaatgagcatatcacataactttgattccttttgagcaatttagtttttgatttcttttgaacaatttagtttacgaaacaacaatgtgtatatgaacagatgatagtttagcaatgcatagacaccttactatatattttaaag

SEQ ID NO: 4731 - DNA, 4111 bp, Zea Mays
atgcacccacgccccgtctctttgaagccgcccgcgtctccacccgagaccccgacccaccccgccctcccccgccgtcgcgctcgcgctcccccgcgacagccgccatgcgccctatctccgccatgcctgcgcctcctcccccgcccgcccgagaaccaccaagtttcccttccttacacagcgaggtccaccatcaacgcccccttccctggcaagccacagccgtccacgttcctggccaccagcgacctcccttctctagcccttagcagcgagcaacacctcctccccatggctgcccccagaccccagtcccgtccgcgcatccgctcccccgtcagcgacgcacctattctcctcgacgtcgcccatggcgtggacggcgacctccctcaccctgcactctggtatgtcaccgtattgcccgcctcctttccccgcaccggcgcagccccctgttgcggcggccccttccccaaacagcacggcaccacgtgctccccctgccgcgcccgcactctccttccccaaacagcacggccccacgacgctcacactctccttccctggcgatatcccctcatctgcgccttgtccctcggagatccccttccatcttcggcaccgagaggaaaatggatggcaatcccatccatcggcgccaaaccctacacatcctccatagtaggcacccgcccctccttacgcggcaccatcggtggggatatcccccaatctgctggaaggagtccgcgccaaatcagagcccgaaatccgtgccaaatccacgctggatgaggtggtggggagaccccccaatctgcgtcccttctacatgcctacacatcctccatagaaggcgccctcctactaaccactaaaaaaccccttccacacgctgacaactccatatatattagtccaaagggagagcacgattaaggccacgcctaccagcttcaccctcctcgcatttgtaagtccaatttttagatttatgatttcagatgttgagttgattttgcaaactggtaagtgttttgtttcatacggcaactctgcacatggacagaatcacagctctgttagcgttgttttatcaagagaaaatcgcagctaatctgttcactgtggatgagttgccccatggtttgttcttaatcagaagaatggacgtgtgcaccacagtttagtgctaaatcatatggatataggagagatgtgctctctcctgtcctaaaacagttcatgttctcgtttttctattctgacagttcataagcgccggtcttttagatgcccactgacctggacatgttggtagaaatactgggcaggtgggatcaactccgatatttggtcaatttctcaaccactttctgttaatacgcaatttttattgaaaaacataatgacgtgcaatgcaaccaccctattcaatattcgtatggttagcaaaccatacgatcaatagaagatctttttggtagcactaaactacctacatacttgcatgcatgcgtcctaatccttgagtttgagtcaaaattaaatcaaaaattgtcatgatcaatcaaacaggaaagaattgacattctatagtttgcgtaggaaagtgtctctgtgtgttttctttttgaaggatcaaggattgaaggattttcctgcttgacggattagcacttcagtaccagtagttaagttattaggagcagtagcaaaaaggggctatatttgtttagggcttgttcgttttcatctcaatccatgtggatcagaggggtttgagtagctttaaatctacaataggtcaaaagctctactaaaatttttcaatctcatcaaatccatatgtcatatgaccgaacaaggccttagcgggtagggcacatcatcttaacgccaaactgctgcctcgaaaacgagtgtatagggcacaacatttgaaccacatatatgatatcaatcttatcaatctattgtgttaattatgaatcctgcatcaatcaaccagggcccggggcacattttcccaagccattgacaaatgttggtagatgcaggattcatagttacagaaactatgtggttcaaattttgccagtatttgactcatcacatttttcttctctatttcagttcttctagcagttgaagtagtgttttcttggcagatgttcgcctttaggacattgctgcgaggggaatcggatatgccacaggctgcatgttgttggagtttctatgtatccccatatcaaatttgtttttccctaatcagggaactcaattgtgcgagtaatagcaggagctcttccgaaaggccttcacatgttaatcctatcgaagaataacatatcaattattgaacgcctcagagaattgacacgattgcgcttgttggatatcaactataataggatatctagaattggccatgatcatctgttaggattggcctcatgttcctctttgaaggagttgtatctggtcggtaacaagatcagtgaggtagatggtcttcaccgacttctgaagctcaaggttctggacttgtgccacattcagtcttctgtagccactatacttggggttggtgaggctggtggaaggtttcagttcttctatacgtggaactaacctataggaggccagactgctagagcggtagagccagaaagtaatagttggtgacttggcggggacatttatgttatgctacctaattattaatctgtggaaaaggggaagcttttggagtagagcttattttttgttcgggttactatttcctctaattgtgtgaaaactgaaaagtatggttcgtgtctgaaaagcaatagttggtcgaggcatatttttgtatggttccactgtactaccttctatctggtgaattagatcccgattctaaataagttgctctctaatcagattaaacactttaatgtagctggcaattgcttattttgcaggtgcagaggatgctaggaaaatactcaataattatgtgagggttttaatttagttgctagctcgatgaaagactatgattcgcaagactggatattttcctgcttatgaagaagcggtggcaaccaaattttcgaagtatgtgagttaaaaatctcgtcatgaatgaactcatgttgtttatagatttgcactggaatatgggcatgtagtgggcactactgggctaggagaagatgaagtgtttgtttttaattgcgtctttttgattgctttggcatgtatggctggcaatgtcatgttttttcatttttgtccacttcaatacacatgaaaccgttttggagactaattttgaagtatgtttaaacaattattctatttaaataagatctgcatatgtgatatattgaaaccattttggcaatgtcgtgtttttttatttttgtttaccatctgcatacctttacaaatgtcattttggttattttactgaattatattatatgccacatgactcttttattatttcttttttttaagaaagtcggggccattactcagatggtaaacaaacttgggccatgtaaatggtcgaccttgcctaaactatacctggacgtattggaaagcaatgctgggaaagctatgccatgaaagatatttgtagcagtgttacatgatggcatcaagtgctgggaaaatatttattaatttatggttttgtttctatggaatataggagtcatgattttgtgcatttgatcagagactacattaactagaggatactttctttttttcaaaattacaaaaacaatactaagtgtacctattattgtctactcgtctcatgatgattactatgtagataaattctctaagctatgaacagtgaccaatgaaatatattcatttgcatacagttctcaaactaatgtattcacgtcattatatattgtgccagctttgtcaattacgcaaattctaaaatgagcatatcacataactttgattccttttgagcaatttagtttttgatttcttttgaacaatttagtttacgaaacaacaatgtgtatatgaacagatgatagtttagcaatgcatagacaccttactatatattttaaag

SEQ ID NO: 4732 - DNA, 1940 bp, Zea Mays
atgcacccacgccccgtctctttgaagccgcccgcgtctccacccgagaccccgacccaccccgccctcccccgccgtcgcgctcgcgctcccccgcgacagccgccatgcgccctatctccgccatgcctgcgcctcctcccccgcccgcccgagaaccaccaagtttcccttccttacacagcgaggtccaccatcaacgcccccttccctggcaagccacagccgtccacgttcctggccaccagcgacctcccttctctagcccttagcagcgagcaacacctcctccccatggctgcccccagaccccagtcccgtccgcgcatccgctcccccgtcagcgacgcacctattctcctcgacgtcgcccatggcgtggacggcgacctccctcaccctgcactctggtatgtcaccgtattgcccgcctcctttccccgcaccggcgcagccccctgttgcggcggccccttccccaaacagcacggcaccacgtgctccccctgccgcgcccgcactctccttccccaaacagcacggccccacgacgctcacactctccttccctggcgatatcccctcatctgcgccttgtccctcggagatccccttccatcttcggcaccgagaggaaaatggatggcaatcccatccatcggcgccaaaccctacacatcctccatagtaggcacccgcccctccttacgcggcaccatcggtggggatatcccccaatctgctggaaggagtccgcgccaaatcagagcccgaaatccgtgccaaatccacgctggatgaggtggtggggagaccccccaatctgcgtcccttctacatgcctacacatcctccatagaaggcgccctcctactaaccactaaaaaaccccttccacacgctgacaactccatatatattagtccaaagggagagcacgattaaggccacgcctaccagcttcaccctcctcgcatttaatcacagctctgttagcgttgttttatcaagttcttctagcagttgaagtagtgttttcttggcagatgttcgcctttaggacattgctgcgaggggaatcggatatgccacaggctgcatgttgttggagtttctatgtatccccatatcaaatttgtttttccctaatcagggaactcaattgtgcgagtaatagcaggagctcttccgaaaggccttcacatgttaatcctatcgaagaataacatatcaattattgaacgcctcagagaattgacacgattgcgcttgttggatatcaactataataggatatctagaattggccatggtgcagaggatgctaggaaaatactcaataattatgaaagtcggggccattactcagatggtaaacaaacttgggccatgtaaatggtcgaccttgcctaaactatacctggacgtattggaaagcaatgctgggaaagctatgccatgaaagatatttgtagcagtgttacatgatggcatcaagtgctgggaaaatatttattaatttatggttttgtttctatggaatataggagtcatgattttgtgcatttgatcagagactacattaactagaggatactttctttttttcaaaattacaaaaacaatactaagtgtacctattattgtctactcgtctcatgatgattactatgtagataaattctctaagctatgaacagtgaccaatgaaatatattcatttgcatacagttctcaaactaatgtattcacgtcattatatattgtgccagctttgtcaattacgcaaattctaaaatgagcatatcacataactttgattccttttgagcaatttagtttttgatttcttttgaacaatttagtttacgaaacaacaatgtgtatatgaacagatgatagtttagcaatgcatagacaccttactatatattttaaag

SEQ ID NO: 4733 - DNA, 4616 bp, Zea Mays
atgcacccacgccccgtctctttgaagccgcccgcgtctccacccgagaccccgacccaccccgccctcccccgccgtcgcgctcgcgctcccccgcgacagccgccatgcgccctatctccgccatgcctgcgcctcctcccccgcccgcccgagaaccaccaagtttcccttccttacacagcgaggtccaccatcaacgcccccttccctggcaagccacagccgtccacgttcctggccaccagcgacctcccttctctagcccttagcagcgagcaacacctcctccccatggctgcccccagaccccagtcccgtccgcgcatccgctcccccgtcagcgacgcacctattctcctcgacgtcgcccatggcgtggacggcgacctccctcaccctgcactctggtatgtcaccgtattgcccgcctcctttccccgcaccggcgcagccccctgttgcggcggccccttccccaaacagcacggcaccacgtgctccccctgccgcgcccgcactctccttccccaaacagcacggccccacgacgctcacactctccttccctggcgatatcccctcatctgcgccttgtccctcggagatccccttccatcttcggcaccgagaggaaaatggatggcaatcccatccatcggcgccaaaccctacacatcctccatagtaggcacccgcccctccttacgcggcaccatcggtggggatatcccccaatctgctggaaggagtccgcgccaaatcagagcccgaaatccgtgccaaatccacgctggatgaggtggtggggagaccccccaatctgcgtcccttctacatgcctacacatcctccatagaaggcgccctcctactaaccactaaaaaaccccttccacacgctgacaactccatatatattagtccaaagggagagcacgattaaggccacgcctaccagcttcaccctcctcgcatttaatcacagctctgttagcgttgttttatcaagttcttctagcagttgaagtagtgttttcttggcagatgttcgcctttaggacattgctgcgaggggaatcggatatgccacaggctgcatgttgttggagtttctatgtatccccatatcaaatttgtttttccctaatcagggaactcaattgtgcgagtaatagcaggagctcttccgaaaggccttcacatgttaatcctatcgaagaataacatatcaattattgaacgcctcagagaattgacacgattgcgcttgttggatatcaactataataggatatctagaattggccatggtgcagaggatgctaggaaaatactcaataattatggtacatgtccaattctaagtatggtatattgtgctctaatatttttaggcatcattgtttctgttaaatactttgcccatggttaaggttatgagtgcattggttaatgaaatgtatgacattaaacggtggctgcgtggtgttccatcgtttcgccttgagccattatttaggcgaagagttccacaattgcatactgcacttgaacatatatagtactcatgaagttgttctacatcatattggatttcaatgcttttttatcagtgacagttttctcttttttggtgagtacaataattgtatttttatcttgtaatagattagttttattcatacgacaagcactatgcactgtgatatttgttgatttttcctttacctgccccccttgcactttctaattaaatgtttttgactatggaatggatcttttccattccatgtggtttgggggacaattgatgtgctttgctttgaagacagttgtagtggtcatctgattgtgaatttgtggtgcacaagttggctatgtgttttttccaagaaaatattttcttaacatagtccagcactaggattctcgagtccccgatccccagcacaaacttgctgttgtttccacttttatcgtcaatagttgttagtacttactgattaaattcacattctttaatatatgaactttattgctttctgattgtgcattcagaggggcaacagtacatcattaatccatcaaatgttcaaaaatgtgcatccataggtgcaacattataacagggatacagtcactgctacgtacaataattttatggggctactgtaccacctgtacagtttttcatgatctgtttgagggaccttaacctaggtactaggcaaattttaccattgttgtgaactgactataaaactccttttaaggtggccttaaagtaaatttaagcatgtttgcttgaagccgctcagcctcagatcatcttaagaggttgtggatttattgagtccaacacaagtttggtgttcctttgtacagttttactatggagtaccagactacgagtcattgtttgtgccatgggtccttgacctttgtaactaattcaagtcagatgatatgtatctccttatgaaattcttttctcaactaccgtgatgatatttcaataattgatttcagtttcttctatgcattcaaagtagccaggctatcatgacggcattaagttcttgtatttaaccgttcgaccaaatttgtccaattgttataggtatctgtgaaaatccatgaacaacttatgtgttcatgtctctcattttatgtccttgcatgtcaataactataggtatctgtgtttatcacatatacaagctaacaatatacagttatgggtgagacaacgtcttagttcactgatcacacacatatttttgacagtcaatacttgcaataatgtgatatttgtaaactaatttttcctcaaaaattgtaacctgcatcaggcaaatatgagaaactagcatttgttgatgtttgaagtatatttatgtggatttgtgacttccttacatctcctctttcaaacaattggttcattattattattggtatggtggtgttatcgccccatttgcattaagctgctcactaagtcaaagtagtaaaaagccatggctgttgttacctagaagatgttgtgtatattcaaatcatagtgcttgtgttttgggctggagatagcacaaaataactactaaaactatctattatcaagtgatccatttgcagttttttcaatctgacactcacagactcactggttatatttcagagctgggaagaagctaacgatataccatacttagactcactggttaaggttatgagtgcattggtttgtaaaaaaaatatttcatggtcaccacagtaggagcaacatatccctgtttagcatattgggtaataactgtgctgatagtgtcacttaaacttggtaaacctgcaactgtaaatactgatacgtggactataagttttggccgtgcagttgctgtgtgataactattttgagttttcctaaacagtttcttacctagattgtcgtgaacttgcggtgtagtagcattgtacctattttaacttggccttgtttgtttgattttgtaagtgagggttttaatttagttgctagctcgatgaaagactatgattcgcaagactggatattttcctgcttatgaagaagcggtggcaaccaaattttcgaagtatgtgagttaaaaatctcgtcatgaatgaactcatgttgtttatagatttgcactggaatatgggcatgtagtgggcactactgggctaggagaagatgaagtgtttgtttttaattgcgtctttttgattgctttggcatgtatggctggcaatgtcatgttttttcatttttgtccacttcaatacacatgaaaccgttttggagactaattttgaagtatgtttaaacaattattctatttaaataagatctgcatatgtgatatattgaaaccattttggcaatgtcgtgtttttttatttttgtttaccatctgcatacctttacaaatgtcattttggttattttactgaattatattatatgccacatgactcttttattatttcttttttttaagaaagtcggggccattactcagatggtaaacaaacttgggccatgtaaatggtcgaccttgcctaaactatacctggacgtattggaaagcaatgctgggaaagctatgccatgaaagatatttgtagcagtgttacatgatggcatcaagtgctgggaaaatatttattaatttatggttttgtttctatggaatataggagtcatgattttgtgcatttgatcagagactacattaactagaggatactttctttttttcaaaattacaaaaacaatactaagtgtacctattattgtctactcgtctcatgatgattactatgtagataaattctctaagctatgaacagtgaccaatgaaatatattcatttgcatacagttctcaaactaatgtattcacgtcattatatattgtgccagctttgtcaattacgcaaattctaaaatgagcatatcacataactttgattccttttgagcaatttagtttttgatttcttttgaacaatttagtttacgaaacaacaatgtgtatatgaacagatgatagtttagcaatgcatagacaccttactatatattttaaag

SEQ ID NO: 4734 - DNA, 4119 bp, Zea Mays
atgcacccacgccccgtctctttgaagccgcccgcgtctccacccgagaccccgacccaccccgccctcccccgccgtcgcgctcgcgctcccccgcgacagccgccatgcgccctatctccgccatgcctgcgcctcctcccccgcccgcccgagaaccaccaagtttcccttccttacacagcgaggtccaccatcaacgcccccttccctggcaagccacagccgtccacgttcctggccaccagcgacctcccttctctagcccttagcagcgagcaacacctcctccccatggctgcccccagaccccagtcccgtccgcgcatccgctcccccgtcagcgacgcacctattctcctcgacgtcgcccatggcgtggacggcgacctccctcaccctgcactctggtatgtcaccgtattgcccgcctcctttccccgcaccggcgcagccccctgttgcggcggccccttccccaaacagcacggcaccacgtgctccccctgccgcgcccgcactctccttccccaaacagcacggccccacgacgctcacactctccttccctggcgatatcccctcatctgcgccttgtccctcggagatccccttccatcttcggcaccgagaggaaaatggatggcaatcccatccatcggcgccaaaccctacacatcctccatagtaggcacccgcccctccttacgcggcaccatcggtggggatatcccccaatctgctggaaggagtccgcgccaaatcagagcccgaaatccgtgccaaatccacgctggatgaggtggtggggagaccccccaatctgcgtcccttctacatgcctacacatcctccatagaaggcgccctcctactaaccactaaaaaaccccttccacacgctgacaactccatatatattagtccaaagggagagcacgattaaggccacgcctaccagcttcaccctcctcgcatttgtaagtccaatttttagatttatgatttcagatgttgagttgattttgcaaactggtaagtgttttgtttcatacggcaactctgcacatggacagaatcacagctctgttagcgttgttttatcaaggtacgtccaattccttctatttagttgactgtgattcaatatgcttgttgttcggttttacttgcgacatgctgttggggcatgtgtttgggatggatgacgtttggactagatagtttcagtcagtagccatctaaacaagcccttacagtattcgctatttcatattgaattttcctcatattgtagagaaaatcgcagctaatctgttcactgtggatgagttgccccatggtttgttcttaatcagaagaatggacgtgtgcaccacagtttagtgctaaatcatatggatataggagagatgtgctctctcctgtcctaaaacagttcatgttctcgtttttctattctgacagttcataagcgccggtcttttagatgcccactgacctggacatgttggtagaaatactgggcaggtgggatcaactccgatatttggtcaatttctcaaccactttctgttaatacgcaatttttattgaaaaacataatgacgtgcaatgcaaccaccctattcaatattcgtatggttagcaaaccatacgatcaatagaagatctttttggtagcactaaactacctacatacttgcatgcatgcgtcctaatccttgagtttgagtcaaaattaaatcaaaaattgtcatgatcaatcaaacaggaaagaattgacattctatagtttgcgtaggaaagtgtctctgtgtgttttctttttgaaggatcaaggattgaaggattttcctgcttgacggattagcacttcagtaccagtagttaagttattaggagcagtagcaaaaaggggctatatttgtttagggcttgttcgttttcatctcaatccatgtggatcagaggggtttgagtagctttaaatctacaataggtcaaaagctctactaaaatttttcaatctcatcaaatccatatgtcatatgaccgaacaaggccttagcgggtagggcacatcatcttaacgccaaactgctgcctcgaaaacgagtgtatagggcacaacatttgaaccacatatatgatatcaatcttatcaatctattgtgttaattatgaatcctgcatcaatcaaccagggcccggggcacattttcccaagccattgacaaatgttggtagatgcaggattcatagttacagaaactatgtggttcaaattttgccagtatttgactcatcacatttttcttctctatttcagttcttctagcagttgaagtagtgttttcttggcagatgttcgcctttaggacattgctgcgaggggaatcggatatgccacaggctgcatgttgttggagtttctatgtatccccatatcaaatttgtttttccctaatcagggaactcaattgtgcgagtaatagcaggagctcttccgaaaggccttcacatgttaatcctatcgaagaataacatatcaattattgaacgcctcagagaattgacacgattgcgcttgttggatatcaactataataggatatctagaattggccatggtatgtgttttagcttctcatatgatcttttttatgtgtttctccttggttgtggccacatgataggttcttactttgttcctatcccctttcccccattttcgtcttttgatatggcaagttcactgtgctttggattcttaactatctcaagtcatatgagaaaccccgttcatggatacttcctgataattatattcttcttgcattgacttgtgttttagatcatctgttaggattggcctcatgttcctctttgaaggagttgtatctggtcggtaacaagatcagtgaggtagatggtcttcaccgacttctgaagctcaaggttctggacttgtgccacattcagtcttctgtagccactatacttggggttggtgaggctggtggaaggtttcagttcttctatacgtggaactaacctataggaggccagactgctagagcggtagagccagaaagtaatagttggtgacttggcggggacatttatgttatgctacctaattattaatctgtggaaaaggggaagcttttggagtagagcttattttttgttcgggttactatttcctctaattgtgtgaaaactgaaaagtatggttcgtgtctgaaaagcaatagttggtcgaggcatatttttgtatggttccactgtactaccttctatctggtgaattagatcccgattctaaataagttgctctctaatcagattaaacactttaatgtagctggcaattgcttattttgcaggtgcagaggatgctaggaaaatactcaataattatgtgagggttttaatttagttgctagctcgatgaaagactatgattcgcaagactggatattttcctgcttatgaagaagcggtggcaaccaaattttcgaaaaagtcggggccattactcagatggtaaacaaacttgggccatgtaaatggtcgaccttgcctaaactatacctggacgtattggaaagcaatgctgggaaagctatgccatgaaagatatttgtagcagtgttacatgatggcatcaagtgctgggaaaatatttattaatttatggttttgtttctatggaatataggagtcatgattttgtgcatttgatcagagactacattaactagaggatactttctttttttcaaaattacaaaaacaatactaagtgtacctattattgtctactcgtctcatgatgattactatgtagataaattctctaagctatgaacagtgaccaatgaaatatattcatttgcatacagttctcaaactaatgtattcacgtcattatatattgtgccagctttgtcaattacgcaaattctaaaatgagcatatcacataactttgattccttttgagcaatttagtttttgatttcttttgaacaatttagtttacgaaacaacaatgtgtatatgaacagatgatagtttagcaatgcatagacaccttactatatattttaaag

SEQ ID NO: 4735 - DNA, 3765 bp, Zea Mays
atgcacccacgccccgtctctttgaagccgcccgcgtctccacccgagaccccgacccaccccgccctcccccgccgtcgcgctcgcgctcccccgcgacagccgccatgcgccctatctccgccatgcctgcgcctcctcccccgcccgcccgagaaccaccaagtttcccttccttacacagcgaggtccaccatcaacgcccccttccctggcaagccacagccgtccacgttcctggccaccagcgacctcccttctctagcccttagcagcgagcaacacctcctccccatggctgcccccagaccccagtcccgtccgcgcatccgctcccccgtcagcgacgcacctattctcctcgacgtcgcccatggcgtggacggcgacctccctcaccctgcactctggtatgtcaccgtattgcccgcctcctttccccgcaccggcgcagccccctgttgcggcggccccttccccaaacagcacggcaccacgtgctccccctgccgcgcccgcactctccttccccaaacagcacggccccacgacgctcacactctccttccctggcgatatcccctcatctgcgccttgtccctcggagatccccttccatcttcggcaccgagaggaaaatggatggcaatcccatccatcggcgccaaaccctacacatcctccatagtaggcacccgcccctccttacgcggcaccatcggtggggatatcccccaatctgctggaaggagtccgcgccaaatcagagcccgaaatccgtgccaaatccacgctggatgaggtggtggggagaccccccaatctgcgtcccttctacatgcctacacatcctccatagaaggcgccctcctactaaccactaaaaaaccccttccacacgctgacaactccatatatattagtccaaagggagagcacgattaaggccacgcctaccagcttcaccctcctcgcatttgtaagtccaatttttagatttatgatttcagatgttgagttgattttgcaaactggtaagtgttttgtttcatacggcaactctgcacatggacagaatcacagctctgttagcgttgttttatcaaggtacgtccaattccttctatttagttgactgtgattcaatatgcttgttgttcggttttacttgcgacatgctgttggggcatgtgtttgggatggatgacgtttggactagatagtttcagtcagtagccatctaaacaagcccttacagtattcgctatttcatattgaattttcctcatattgtagagaaaatcgcagctaatctgttcactgtggatgagttgccccatggtttgttcttaatcagaagaatggacgtgtgcaccacagtttagtgctaaatcatatggatataggagagatgtgctctctcctgtcctaaaacagttcatgttctcgtttttctattctgacagttcataagcgccggtcttttagatgcccactgacctggacatgttggtagaaatactgggcaggtgggatcaactccgatatttggtcaatttctcaaccactttctgttaatacgcaatttttattgaaaaacataatgacgtgcaatgcaaccaccctattcaatattcgtatggttagcaaaccatacgatcaatagaagatctttttggtagcactaaactacctacatacttgcatgcatgcgtcctaatccttgagtttgagtcaaaattaaatcaaaaattgtcatgatcaatcaaacaggaaagaattgacattctatagtttgcgtaggaaagtgtctctgtgtgttttctttttgaaggatcaaggattgaaggattttcctgcttgacggattagcacttcagtaccagtagttaagttattaggagcagtagcaaaaaggggctatatttgtttagggcttgttcgttttcatctcaatccatgtggatcagaggggtttgagtagctttaaatctacaataggtcaaaagctctactaaaatttttcaatctcatcaaatccatatgtcatatgaccgaacaaggccttagcgggtagggcacatcatcttaacgccaaactgctgcctcgaaaacgagtgtatagggcacaacatttgaaccacatatatgatatcaatcttatcaatctattgtgttaattatgaatcctgcatcaatcaaccagggcccggggcacattttcccaagccattgacaaatgttggtagatgcaggattcatagttacagaaactatgtggttcaaattttgccagtatttgactcatcacatttttcttctctatttcagttcttctagcagttgaagtagtgttttcttggcagatgttcgcctttaggacattgctgcgaggggaatcggatatgccacaggctgcatgttgttggagtttctatgtatccccatatcaaatttgtttttccctaatcagggaactcaattgtgcgagtaatagcaggagctcttccgaaaggccttcacatgttaatcctatcgaagaataacatatcaattattgaacgcctcagagaattgacacgattgcgcttgttggatatcaactataataggatatctagaattggccatggtgcagaggatgctaggaaaatactcaataattatgtgagggttttaatttagttgctagctcgatgaaagactatgattcgcaagactggatattttcctgcttatgaagaagcggtggcaaccaaattttcgaagtatgtgagttaaaaatctcgtcatgaatgaactcatgttgtttatagatttgcactggaatatgggcatgtagtgggcactactgggctaggagaagatgaagtgtttgtttttaattgcgtctttttgattgctttggcatgtatggctggcaatgtcatgttttttcatttttgtccacttcaatacacatgaaaccgttttggagactaattttgaagtatgtttaaacaattattctatttaaataagatctgcatatgtgatatattgaaaccattttggcaatgtcgtgtttttttatttttgtttaccatctgcatacctttacaaatgtcattttggttattttactgaattatattatatgccacatgactcttttattatttcttttttttaagaaagtcggggccattactcagatggtaaacaaacttgggccatgtaaatggtcgaccttgcctaaactatacctggacgtattggaaagcaatgctgggaaagctatgccatgaaagatatttgtagcagtgttacatgatggcatcaagtgctgggaaaatatttattaatttatggttttgtttctatggaatataggagtcatgattttgtgcatttgatcagagactacattaactagaggatactttctttttttcaaaattacaaaaacaatactaagtgtacctattattgtctactcgtctcatgatgattactatgtagataaattctctaagctatgaacagtgaccaatgaaatatattcatttgcatacagttctcaaactaatgtattcacgtcattatatattgtgccagctttgtcaattacgcaaattctaaaatgagcatatcacataactttgattccttttgagcaatttagtttttgatttcttttgaacaatttagtttacgaaacaacaatgtgtatatgaacagatgatagtttagcaatgcatagacaccttactatatattttaaag

SEQ ID NO: 4736 - DNA, 3629 bp, Zea Mays
atgcacccacgccccgtctctttgaagccgcccgcgtctccacccgagaccccgacccaccccgccctcccccgccgtcgcgctcgcgctcccccgcgacagccgccatgcgccctatctccgccatgcctgcgcctcctcccccgcccgcccgagaaccaccaagtttcccttccttacacagcgaggtccaccatcaacgcccccttccctggcaagccacagccgtccacgttcctggccaccagcgacctcccttctctagcccttagcagcgagcaacacctcctccccatggctgcccccagaccccagtcccgtccgcgcatccgctcccccgtcagcgacgcacctattctcctcgacgtcgcccatggcgtggacggcgacctccctcaccctgcactctggtatgtcaccgtattgcccgcctcctttccccgcaccggcgcagccccctgttgcggcggccccttccccaaacagcacggcaccacgtgctccccctgccgcgcccgcactctccttccccaaacagcacggccccacgacgctcacactctccttccctggcgatatcccctcatctgcgccttgtccctcggagatccccttccatcttcggcaccgagaggaaaatggatggcaatcccatccatcggcgccaaaccctacacatcctccatagtaggcacccgcccctccttacgcggcaccatcggtggggatatcccccaatctgctggaaggagtccgcgccaaatcagagcccgaaatccgtgccaaatccacgctggatgaggtggtggggagaccccccaatctgcgtcccttctacatgcctacacatcctccatagaaggcgccctcctactaaccactaaaaaaccccttccacacgctgacaactccatatatattagtccaaagggagagcacgattaaggccacgcctaccagcttcaccctcctcgcatttgtaagtccaatttttagatttatgatttcagatgttgagttgattttgcaaactggtaagtgttttgtttcatacggcaactctgcacatggacagaatcacagctctgttagcgttgttttatcaagagaaaatcgcagctaatctgttcactgtggatgagttgccccatggtttgttcttaatcagaagaatggacgtgtgcaccacagtttagtgctaaatcatatggatataggagagatgtgctctctcctgtcctaaaacagttcatgttctcgtttttctattctgacagttcataagcgccggtcttttagatgcccactgacctggacatgttggtagaaatactgggcaggtgggatcaactccgatatttggtcaatttctcaaccactttctgttaatacgcaatttttattgaaaaacataatgacgtgcaatgcaaccaccctattcaatattcgtatggttagcaaaccatacgatcaatagaagatctttttggtagcactaaactacctacatacttgcatgcatgcgtcctaatccttgagtttgagtcaaaattaaatcaaaaattgtcatgatcaatcaaacaggaaagaattgacattctatagtttgcgtaggaaagtgtctctgtgtgttttctttttgaaggatcaaggattgaaggattttcctgcttgacggattagcacttcagtaccagtagttaagttattaggagcagtagcaaaaaggggctatatttgtttagggcttgttcgttttcatctcaatccatgtggatcagaggggtttgagtagctttaaatctacaataggtcaaaagctctactaaaatttttcaatctcatcaaatccatatgtcatatgaccgaacaaggccttagcgggtagggcacatcatcttaacgccaaactgctgcctcgaaaacgagtgtatagggcacaacatttgaaccacatatatgatatcaatcttatcaatctattgtgttaattatgaatcctgcatcaatcaaccagggcccggggcacattttcccaagccattgacaaatgttggtagatgcaggattcatagttacagaaactatgtggttcaaattttgccagtatttgactcatcacatttttcttctctatttcagttcttctagcagttgaagtagtgttttcttggcagatgttcgcctttaggacattgctgcgaggggaatcggatatgccacaggctgcatgttgttggagtttctatgtatccccatatcaaatttgtttttccctaatcagggaactcaattgtgcgagtaatagcaggagctcttccgaaaggccttcacatgttaatcctatcgaagaataacatatcaattattgaacgcctcagagaattgacacgattgcgcttgttggatatcaactataataggatatctagaattggccatgatcatctgttaggattggcctcatgttcctctttgaaggagttgtatctggtcggtaacaagatcagtgaggtagatggtcttcaccgacttctgaagctcaaggttctggacttgtgccacattcagtcttctgtagccactatacttggggttggtgaggctggtggaaggtttcagttcttctatacgtggaactaacctataggaggccagactgctagagcggtagagccagaaagtaatagttggtgacttggcggggacatttatgttatgctacctaattattaatctgtggaaaaggggaagcttttggagtagagcttattttttgttcgggttactatttcctctaattgtgtgaaaactgaaaagtatggttcgtgtctgaaaagcaatagttggtcgaggcatatttttgtatggttccactgtactaccttctatctggtgaattagatcccgattctaaataagttgctctctaatcagattaaacactttaatgtagctggcaattgcttattttgcaggtgcagaggatgctaggaaaatactcaataattatggtacatgtccaattctaagtatgaaagtcggggccattactcagatggtaaacaaacttgggccatgtaaatggtcgaccttgcctaaactatacctggacgtattggaaagcaatgctgggaaagctatgccatgaaagatatttgtagcagtgttacatgatggcatcaagtgctgggaaaatatttattaatttatggttttgtttctatggaatataggagtcatgattttgtgcatttgatcagagactacattaactagaggatactttctttttttcaaaattacaaaaacaatactaagtgtacctattattgtctactcgtctcatgatgattactatgtagataaattctctaagctatgaacagtgaccaatgaaatatattcatttgcatacagttctcaaactaatgtattcacgtcattatatattgtgccagctttgtcaattacgcaaattctaaaatgagcatatcacataactttgattccttttgagcaatttagtttttgatttcttttgaacaatttagtttacgaaacaacaatgtgtatatgaacagatgatagtttagcaatgcatagacaccttactatatattttaaag

SEQ ID NO: 4737 - DNA, 4042 bp, Zea Mays
atgcacccacgccccgtctctttgaagccgcccgcgtctccacccgagaccccgacccaccccgccctcccccgccgtcgcgctcgcgctcccccgcgacagccgccatgcgccctatctccgccatgcctgcgcctcctcccccgcccgcccgagaaccaccaagtttcccttccttacacagcgaggtccaccatcaacgcccccttccctggcaagccacagccgtccacgttcctggccaccagcgacctcccttctctagcccttagcagcgagcaacacctcctccccatggctgcccccagaccccagtcccgtccgcgcatccgctcccccgtcagcgacgcacctattctcctcgacgtcgcccatggcgtggacggcgacctccctcaccctgcactctggtatgtcaccgtattgcccgcctcctttccccgcaccggcgcagccccctgttgcggcggccccttccccaaacagcacggcaccacgtgctccccctgccgcgcccgcactctccttccccaaacagcacggccccacgacgctcacactctccttccctggcgatatcccctcatctgcgccttgtccctcggagatccccttccatcttcggcaccgagaggaaaatggatggcaatcccatccatcggcgccaaaccctacacatcctccatagtaggcacccgcccctccttacgcggcaccatcggtggggatatcccccaatctgctggaaggagtccgcgccaaatcagagcccgaaatccgtgccaaatccacgctggatgaggtggtggggagaccccccaatctgcgtcccttctacatgcctacacatcctccatagaaggcgccctcctactaaccactaaaaaaccccttccacacgctgacaactccatatatattagtccaaagggagagcacgattaaggccacgcctaccagcttcaccctcctcgcatttgtaagtccaatttttagatttatgatttcagatgttgagttgattttgcaaactggtaagtgttttgtttcatacggcaactctgcacatggacagaatcacagctctgttagcgttgttttatcaaggtacgtccaattccttctatttagttgactgtgattcaatatgcttgttgttcggttttacttgcgacatgctgttggggcatgtgtttgggatggatgacgtttggactagatagtttcagtcagtagccatctaaacaagcccttacagtattcgctatttcatattgaattttcctcatattgtagagaaaatcgcagctaatctgttcactgtggatgagttgccccatggtttgttcttaatcagaagaatggacgtgtgcaccacagtttagtgctaaatcatatggatataggagagatgtgctctctcctgtcctaaaacagttcatgttctcgtttttctattctgacagttcataagcgccggtcttttagatgcccactgacctggacatgttggtagaaatactgggcaggtgggatcaactccgatatttggtcaatttctcaaccactttctgttaatacgcaatttttattgaaaaacataatgacgtgcaatgcaaccaccctattcaatattcgtatggttagcaaaccatacgatcaatagaagatctttttggtagcactaaactacctacatacttgcatgcatgcgtcctaatccttgagtttgagtcaaaattaaatcaaaaattgtcatgatcaatcaaacaggaaagaattgacattctatagtttgcgtaggaaagtgtctctgtgtgttttctttttgaaggatcaaggattgaaggattttcctgcttgacggattagcacttcagtaccagtagttaagttattaggagcagtagcaaaaaggggctatatttgtttagggcttgttcgttttcatctcaatccatgtggatcagaggggtttgagtagctttaaatctacaataggtcaaaagctctactaaaatttttcaatctcatcaaatccatatgtcatatgaccgaacaaggccttagcgggtagggcacatcatcttaacgccaaactgctgcctcgaaaacgagtgtatagggcacaacatttgaaccacatatatgatatcaatcttatcaatctattgtgttaattatgaatcctgcatcaatcaaccagggcccggggcacattttcccaagccattgacaaatgttggtagatgcaggattcatagttacagaaactatgtggttcaaattttgccagtatttgactcatcacatttttcttctctatttcagttcttctagcagttgaagtagtgttttcttggcagatgttcgcctttaggacattgctgcgaggggaatcggatatgccacaggctgcatgttgttggagtttctatgtatccccatatcaaatttgtttttccctaatcagggaactcaattgtgcgagtaatagcaggagctcttccgaaaggccttcacatgttaatcctatcgaagaataacatatcaattattgaacgcctcagagaattgacacgattgcgcttgttggatatcaactataataggatatctagaattggccatggtatgtgttttagcttctcatatgatcttttttatgtgtttctccttggttgtggccacatgataggttcttactttgttcctatcccctttcccccattttcgtcttttgatatggcaagttcactgtgctttggattcttaactatctcaagtcatatgagaaaccccgttcatggatacttcctgataattatattcttcttgcattgacttgtgttttagatcatctgttaggattggcctcatgttcctctttgaaggagttgtatctggtcggtaacaagatcagtgaggtagatggtcttcaccgacttctgaagctcaaggttctggacttgtgccacattcagtcttctgtagccactatacttggggttggtgaggctggtggaaggtttcagttcttctatacgtggaactaacctataggaggccagactgctagagcggtagagccagaaagtaatagttggtgacttggcggggacatttatgttatgctacctaattattaatctgtggaaaaggggaagcttttggagtagagcttattttttgttcgggttactatttcctctaattgtgtgaaaactgaaaagtatggttcgtgtctgaaaagcaatagttggtcgaggcatatttttgtatggttccactgtactaccttctatctggtgaattagatcccgattctaaataagttgctctctaatcagattaaacactttaatgtagctggcaattgcttattttgcaggtgcagaggatgctaggaaaatactcaataattatggtacatgtccaattctaagtatgaaagtcggggccattactcagatggtaaacaaacttgggccatgtaaatggtcgaccttgcctaaactatacctggacgtattggaaagcaatgctgggaaagctatgccatgaaagatatttgtagcagtgttacatgatggcatcaagtgctgggaaaatatttattaatttatggttttgtttctatggaatataggagtcatgattttgtgcatttgatcagagactacattaactagaggatactttctttttttcaaaattacaaaaacaatactaagtgtacctattattgtctactcgtctcatgatgattactatgtagataaattctctaagctatgaacagtgaccaatgaaatatattcatttgcatacagttctcaaactaatgtattcacgtcattatatattgtgccagctttgtcaattacgcaaattctaaaatgagcatatcacataactttgattccttttgagcaatttagtttttgatttcttttgaacaatttagtttacgaaacaacaatgtgtatatgaacagatgatagtttagcaatgcatagacaccttactatatattttaaag

SEQ ID NO: 4738 - DNA, 2795 bp, Zea Mays
atgcacccacgccccgtctctttgaagccgcccgcgtctccacccgagaccccgacccaccccgccctcccccgccgtcgcgctcgcgctcccccgcgacagccgccatgcgccctatctccgccatgcctgcgcctcctcccccgcccgcccgagaaccaccaagtttcccttccttacacagcgaggtccaccatcaacgcccccttccctggcaagccacagccgtccacgttcctggccaccagcgacctcccttctctagcccttagcagcgagcaacacctcctccccatggctgcccccagaccccagtcccgtccgcgcatccgctcccccgtcagcgacgcacctattctcctcgacgtcgcccatggcgtggacggcgacctccctcaccctgcactctggtatgtcaccgtattgcccgcctcctttccccgcaccggcgcagccccctgttgcggcggccccttccccaaacagcacggcaccacgtgctccccctgccgcgcccgcactctccttccccaaacagcacggccccacgacgctcacactctccttccctggcgatatcccctcatctgcgccttgtccctcggagatccccttccatcttcggcaccgagaggaaaatggatggcaatcccatccatcggcgccaaaccctacacatcctccatagtaggcacccgcccctccttacgcggcaccatcggtggggatatcccccaatctgctggaaggagtccgcgccaaatcagagcccgaaatccgtgccaaatccacgctggatgaggtggtggggagaccccccaatctgcgtcccttctacatgcctacacatcctccatagaaggcgccctcctactaaccactaaaaaaccccttccacacgctgacaactccatatatattagtccaaagggagagcacgattaaggccacgcctaccagcttcaccctcctcgcatttaatcacagctctgttagcgttgttttatcaagttcttctagcagttgaagtagtgttttcttggcagatgttcgcctttaggacattgctgcgaggggaatcggatatgccacaggctgcatgttgttggagtttctatgtatccccatatcaaatttgtttttccctaatcagggaactcaattgtgcgagtaatagcaggagctcttccgaaaggccttcacatgttaatcctatcgaagaataacatatcaattattgaacgcctcagagaattgacacgattgcgcttgttggatatcaactataataggatatctagaattggccatggtatgtgttttagcttctcatatgatcttttttatgtgtttctccttggttgtggccacatgataggttcttactttgttcctatcccctttcccccattttcgtcttttgatatggcaagttcactgtgctttggattcttaactatctcaagtcatatgagaaaccccgttcatggatacttcctgataattatattcttcttgcattgacttgtgttttagatcatctgttaggattggcctcatgttcctctttgaaggagttgtatctggtcggtaacaagatcagtgaggtagatggtcttcaccgacttctgaagctcaaggttctggacttgtgccacattcagtcttctgtagccactatacttggggttggtgaggctggtggaaggtttcagttcttctatacgtggaactaacctataggaggccagactgctagagcggtagagccagaaagtaatagttggtgacttggcggggacatttatgttatgctacctaattattaatctgtggaaaaggggaagcttttggagtagagcttattttttgttcgggttactatttcctctaattgtgtgaaaactgaaaagtatggttcgtgtctgaaaagcaatagttggtcgaggcatatttttgtatggttccactgtactaccttctatctggtgaattagatcccgattctaaataagttgctctctaatcagattaaacactttaatgtagctggcaattgcttattttgcaggtgcagaggatgctaggaaaatactcaataattatgtgagggttttaatttagttgctagctcgatgaaagactatgattcgcaagactggatattttcctgcttatgaagaagcggtggcaaccaaattttcgaatcggggccattactcagatggtaaacaaacttgggccatgtaaatggtcgaccttgcctaaactatacctggacgtattggaaagcaatgctgggaaagctatgccatgaaagatatttgtagcagtgttacatgatggcatcaagtgctgggaaaatatttattaatttatggttttgtttctatggaatataggagtcatgattttgtgcatttgatcagagactacattaactagaggatactttctttttttcaaaattacaaaaacaatactaagtgtacctattattgtctactcgtctcatgatgattactatgtagataaattctctaagctatgaacagtgaccaatgaaatatattcatttgcatacagttctcaaactaatgtattcacgtcattatatattgtgccagctttgtcaattacgcaaattctaaaatgagcatatcacataactttgattccttttgagcaatttagtttttgatttcttttgaacaatttagtttacgaaacaacaatgtgtatatgaacagatgatagtttagcaatgcatagacaccttactatatattttaaag

SEQ ID NO: 4739 - DNA, 6316 bp, Zea Mays
atgcacccacgccccgtctctttgaagccgcccgcgtctccacccgagaccccgacccaccccgccctcccccgccgtcgcgctcgcgctcccccgcgacagccgccatgcgccctatctccgccatgcctgcgcctcctcccccgcccgcccgagaaccaccaagtttcccttccttacacagcgaggtccaccatcaacgcccccttccctggcaagccacagccgtccacgttcctggccaccagcgacctcccttctctagcccttagcagcgagcaacacctcctccccatggctgcccccagaccccagtcccgtccgcgcatccgctcccccgtcagcgacgcacctattctcctcgacgtcgcccatggcgtggacggcgacctccctcaccctgcactctggtatgtcaccgtattgcccgcctcctttccccgcaccggcgcagccccctgttgcggcggccccttccccaaacagcacggcaccacgtgctccccctgccgcgcccgcactctccttccccaaacagcacggccccacgacgctcacactctccttccctggcgatatcccctcatctgcgccttgtccctcggagatccccttccatcttcggcaccgagaggaaaatggatggcaatcccatccatcggcgccaaaccctacacatcctccatagtaggcacccgcccctccttacgcggcaccatcggtggggatatcccccaatctgctggaaggagtccgcgccaaatcagagcccgaaatccgtgccaaatccacgctggatgaggtggtggggagaccccccaatctgcgtcccttctacatgcctacacatcctccatagaaggcgccctcctactaaccactaaaaaaccccttccacacgctgacaactccatatatattagtccaaagggagagcacgattaaggccacgcctaccagcttcaccctcctcgcatttgtaagtccaatttttagatttatgatttcagatgttgagttgattttgcaaactggtaagtgttttgtttcatacggcaactctgcacatggacagaatcacagctctgttagcgttgttttatcaaggtacgtccaattccttctatttagttgactgtgattcaatatgcttgttgttcggttttacttgcgacatgctgttggggcatgtgtttgggatggatgacgtttggactagatagtttcagtcagtagccatctaaacaagcccttacagtattcgctatttcatattgaattttcctcatattgtagagaaaatcgcagctaatctgttcactgtggatgagttgccccatggtttgttcttaatcagaagaatggacgtgtgcaccacagtttagtgctaaatcatatggatataggagagatgtgctctctcctgtcctaaaacagttcatgttctcgtttttctattctgacagttcataagcgccggtcttttagatgcccactgacctggacatgttggtagaaatactgggcaggtgggatcaactccgatatttggtcaatttctcaaccactttctgttaatacgcaatttttattgaaaaacataatgacgtgcaatgcaaccaccctattcaatattcgtatggttagcaaaccatacgatcaatagaagatctttttggtagcactaaactacctacatacttgcatgcatgcgtcctaatccttgagtttgagtcaaaattaaatcaaaaattgtcatgatcaatcaaacaggaaagaattgacattctatagtttgcgtaggaaagtgtctctgtgtgttttctttttgaaggatcaaggattgaaggattttcctgcttgacggattagcacttcagtaccagtagttaagttattaggagcagtagcaaaaaggggctatatttgtttagggcttgttcgttttcatctcaatccatgtggatcagaggggtttgagtagctttaaatctacaataggtcaaaagctctactaaaatttttcaatctcatcaaatccatatgtcatatgaccgaacaaggccttagcgggtagggcacatcatcttaacgccaaactgctgcctcgaaaacgagtgtatagggcacaacatttgaaccacatatatgatatcaatcttatcaatctattgtgttaattatgaatcctgcatcaatcaaccagggcccggggcacattttcccaagccattgacaaatgttggtagatgcaggattcatagttacagaaactatgtggttcaaattttgccagtatttgactcatcacatttttcttctctatttcagttcttctagcagttgaagtagtgttttcttggcagatgttcgcctttaggacattgctgcgaggggaatcggatatgccacaggctgcatgttgttggagtttctatgtatccccatatcaaatttgtttttccctaatcagggaactcaattgtgcgagtaatagcaggagctcttccgaaaggccttcacatgttaatcctatcgaagaataacatatcaattattgaacgcctcagagaattgacacgattgcgcttgttggatatcaactataataggatatctagaattggccatggtatgtgttttagcttctcatatgatcttttttatgtgtttctccttggttgtggccacatgataggttcttactttgttcctatcccctttcccccattttcgtcttttgatatggcaagttcactgtgctttggattcttaactatctcaagtcatatgagaaaccccgttcatggatacttcctgataattatattcttcttgcattgacttgtgttttagatcatctgttaggattggcctcatgttcctctttgaaggagttgtatctggtcggtaacaagatcagtgaggtagatggtcttcaccgacttctgaagctcaaggttctggacttgtgccacattcagtcttctgtagccactatacttggggttggtgcagaggatgctaggaaaatactcaataattatggtacatgtccaattctaagtatggtatattgtgctctaatatttttaggcatcattgtttctgttaaatactttgcccatggttaaggttatgagtgcattggttaatgaaatgtatgacattaaacggtggctgcgtggtgttccatcgtttcgccttgagccattatttaggcgaagagttccacaattgcatactgcacttgaacatatatagtactcatgaagttgttctacatcatattggatttcaatgcttttttatcagtgacagttttctcttttttggtgagtacaataattgtatttttatcttgtaatagattagttttattcatacgacaagcactatgcactgtgatatttgttgatttttcctttacctgccccccttgcactttctaattaaatgtttttgactatggaatggatcttttccattccatgtggtttgggggacaattgatgtgctttgctttgaagacagttgtagtggtcatctgattgtgaatttgtggtgcacaagttggctatgtgttttttccaagaaaatattttcttaacatagtccagcactaggattctcgagtccccgatccccagcacaaacttgctgttgtttccacttttatcgtcaatagttgttagtacttactgattaaattcacattctttaatatatgaactttattgctttctgattgtgcattcagaggggcaacagtacatcattaatccatcaaatgttcaaaaatgtgcatccataggtgcaacattataacagggatacagtcactgctacgtacaataattttatggggctactgtaccacctgtacagtttttcatgatctgtttgagggaccttaacctaggtactaggcaaattttaccattgttgtgaactgactataaaactccttttaaggtggccttaaagtaaatttaagcatgtttgcttgaagccgctcagcctcagatcatcttaagaggttgtggatttattgagtccaacacaagtttggtgttcctttgtacagttttactatggagtaccagactacgagtcattgtttgtgccatgggtccttgacctttgtaactaattcaagtcagatgatatgtatctccttatgaaattcttttctcaactaccgtgatgatatttcaataattgatttcagtttcttctatgcattcaaagtagccaggctatcatgacggcattaagttcttgtatttaaccgttcgaccaaatttgtccaattgttataggtatctgtgaaaatccatgaacaacttatgtgttcatgtctctcattttatgtccttgcatgtcaataactataggtatctgtgtttatcacatatacaagctaacaatatacagttatgggtgagacaacgtcttagttcactgatcacacacatatttttgacagtcaatacttgcaataatgtgatatttgtaaactaatttttcctcaaaaattgtaacctgcatcaggcaaatatgagaaactagcatttgttgatgtttgaagtatatttatgtggatttgtgacttccttacatctcctctttcaaacaattggttcattattattattggtatggtggtgttatcgccccatttgcattaagctgctcactaagtcaaagtagtaaaaagccatggctgttgttacctagaagatgttgtgtatattcaaatcatagtgcttgtgttttgggctggagatagcacaaaataactactaaaactatctattatcaagtgatccatttgcagttttttcaatctgacactcacagactcactggttatatttcagagctgggaagaagctaacgatataccatacttagactcactggttaaggttatgagtgcattggtttgtaaaaaaaatatttcatggtcaccacagtaggagcaacatatccctgtttagcatattgggtaataactgtgctgatagtgtcacttaaacttggtaaacctgcaactgtaaatactgatacgtggactataagttttggccgtgcagttgctgtgtgataactattttgagttttcctaaacagtttcttacctagattgtcgtgaacttgcggtgtagtagcattgtacctattttaacttggccttgtttgtttgattttgtaagtgagggttttaatttagttgctagctcgatgaaagactatgattcgcaagactggatattttcctgcttatgaagaagcggtggcaaccaaattttcgaagtatgtgagttaaaaatctcgtcatgaatgaactcatgttgtttatagatttgcactggaatatgggcatgtagtgggcactactgggctaggagaagatgaagtgtttgtttttaattgcgtctttttgattgctttggcatgtatggctggcaatgtcatgttttttcatttttgtccacttcaatacacatgaaaccgttttggagactaattttgaagtatgtttaaacaattattctatttaaataagatctgcatatgtgatatattgaaaccattttggcaatgtcgtgtttttttatttttgtttaccatctgcatacctttacaaatgtcattttggttattttactgaattatattatatgccacatgactcttttattatttcttttttttaagaaagtcggggccattactcagatggtaaacaaacttgggccatgtaaatggtcgaccttgcctaaactatacctggacgtattggaaagcaatgctgggaaagctatgccatgaaagatatttgtagcagtgttacatgatggcatcaagtgctgggaaaatatttattaatttatggttttgtttctatggaatataggagtcatgattttgtgcatttgatcagagactacattaactagaggatactttctttttttcaaaattacaaaaacaatactaagtgtacctattattgtctactcgtctcatgatgattactatgtagataaattctctaagctatgaacagtgaccaatgaaatatattcatttgcatacagttctcaaactaatgtattcacgtcattatatattgtgccagctttgtcaattacgcaaattctaaaatgagcatatcacataactttgattccttttgagcaatttagtttttgatttcttttgaacaatttagtttacgaaacaacaatgtgtatatgaacagatgatagtttagcaatgcatagacaccttactatatattttaaag

SEQ ID NO: 4740 - DNA, 6264 bp, Zea Mays
atgcacccacgccccgtctctttgaagccgcccgcgtctccacccgagaccccgacccaccccgccctcccccgccgtcgcgctcgcgctcccccgcgacagccgccatgcgccctatctccgccatgcctgcgcctcctcccccgcccgcccgagaaccaccaagtttcccttccttacacagcgaggtccaccatcaacgcccccttccctggcaagccacagccgtccacgttcctggccaccagcgacctcccttctctagcccttagcagcgagcaacacctcctccccatggctgcccccagaccccagtcccgtccgcgcatccgctcccccgtcagcgacgcacctattctcctcgacgtcgcccatggcgtggacggcgacctccctcaccctgcactctggtatgtcaccgtattgcccgcctcctttccccgcaccggcgcagccccctgttgcggcggccccttccccaaacagcacggcaccacgtgctccccctgccgcgcccgcactctccttccccaaacagcacggccccacgacgctcacactctccttccctggcgatatcccctcatctgcgccttgtccctcggagatccccttccatcttcggcaccgagaggaaaatggatggcaatcccatccatcggcgccaaaccctacacatcctccatagtaggcacccgcccctccttacgcggcaccatcggtggggatatcccccaatctgctggaaggagtccgcgccaaatcagagcccgaaatccgtgccaaatccacgctggatgaggtggtggggagaccccccaatctgcgtcccttctacatgcctacacatcctccatagaaggcgccctcctactaaccactaaaaaaccccttccacacgctgacaactccatatatattagtccaaagggagagcacgattaaggccacgcctaccagcttcaccctcctcgcatttgtaagtccaatttttagatttatgatttcagatgttgagttgattttgcaaactggtaagtgttttgtttcatacggcaactctgcacatggacagaatcacagctctgttagcgttgttttatcaaggtacgtccaattccttctatttagttgactgtgattcaatatgcttgttgttcggttttacttgcgacatgctgttggggcatgtgtttgggatggatgacgtttggactagatagtttcagtcagtagccatctaaacaagcccttacagtattcgctatttcatattgaattttcctcatattgtagagaaaatcgcagctaatctgttcactgtggatgagttgccccatggtttgttcttaatcagaagaatggacgtgtgcaccacagtttagtgctaaatcatatggatataggagagatgtgctctctcctgtcctaaaacagttcatgttctcgtttttctattctgacagttcataagcgccggtcttttagatgcccactgacctggacatgttggtagaaatactgggcaggtgggatcaactccgatatttggtcaatttctcaaccactttctgttaatacgcaatttttattgaaaaacataatgacgtgcaatgcaaccaccctattcaatattcgtatggttagcaaaccatacgatcaatagaagatctttttggtagcactaaactacctacatacttgcatgcatgcgtcctaatccttgagtttgagtcaaaattaaatcaaaaattgtcatgatcaatcaaacaggaaagaattgacattctatagtttgcgtaggaaagtgtctctgtgtgttttctttttgaaggatcaaggattgaaggattttcctgcttgacggattagcacttcagtaccagtagttaagttattaggagcagtagcaaaaaggggctatatttgtttagggcttgttcgttttcatctcaatccatgtggatcagaggggtttgagtagctttaaatctacaataggtcaaaagctctactaaaatttttcaatctcatcaaatccatatgtcatatgaccgaacaaggccttagcgggtagggcacatcatcttaacgccaaactgctgcctcgaaaacgagtgtatagggcacaacatttgaaccacatatatgatatcaatcttatcaatctattgtgttaattatgaatcctgcatcaatcaaccagggcccggggcacattttcccaagccattgacaaatgttggtagatgcaggattcatagttacagaaactatgtggttcaaattttgccagtatttgactcatcacatttttcttctctatttcagttcttctagcagttgaagtagtgttttcttggcagatgttcgcctttaggacattgctgcgaggggaatcggatatgccacaggctgcatgttgttggagtttctatgtatccccatatcaaatttgtttttccctaatcagggaactcaattgtgcgagtaatagcaggagctcttccgaaaggccttcacatgttaatcctatcgaagaataacatatcaattattgaacgcctcagagaattgacacgattgcgcttgttggatatcaactataataggatatctagaattggccatggtatgtgttttagcttctcatatgatcttttttatgtgtttctccttggttgtggccacatgataggttcttactttgttcctatcccctttcccccattttcgtcttttgatatggcaagttcactgtgctttggattcttaactatctcaagtcatatgagaaaccccgttcatggatacttcctgataattatattcttcttgcattgacttgtgttttagatcatctgttaggattggcctcatgttcctctttgaaggagttgtatctggtcggtaacaagatcagtgaggtagatggtcttcaccgacttctgaagctcaaggtgcagaggatgctaggaaaatactcaataattatggtacatgtccaattctaagtatggtatattgtgctctaatatttttaggcatcattgtttctgttaaatactttgcccatggttaaggttatgagtgcattggttaatgaaatgtatgacattaaacggtggctgcgtggtgttccatcgtttcgccttgagccattatttaggcgaagagttccacaattgcatactgcacttgaacatatatagtactcatgaagttgttctacatcatattggatttcaatgcttttttatcagtgacagttttctcttttttggtgagtacaataattgtatttttatcttgtaatagattagttttattcatacgacaagcactatgcactgtgatatttgttgatttttcctttacctgccccccttgcactttctaattaaatgtttttgactatggaatggatcttttccattccatgtggtttgggggacaattgatgtgctttgctttgaagacagttgtagtggtcatctgattgtgaatttgtggtgcacaagttggctatgtgttttttccaagaaaatattttcttaacatagtccagcactaggattctcgagtccccgatccccagcacaaacttgctgttgtttccacttttatcgtcaatagttgttagtacttactgattaaattcacattctttaatatatgaactttattgctttctgattgtgcattcagaggggcaacagtacatcattaatccatcaaatgttcaaaaatgtgcatccataggtgcaacattataacagggatacagtcactgctacgtacaataattttatggggctactgtaccacctgtacagtttttcatgatctgtttgagggaccttaacctaggtactaggcaaattttaccattgttgtgaactgactataaaactccttttaaggtggccttaaagtaaatttaagcatgtttgcttgaagccgctcagcctcagatcatcttaagaggttgtggatttattgagtccaacacaagtttggtgttcctttgtacagttttactatggagtaccagactacgagtcattgtttgtgccatgggtccttgacctttgtaactaattcaagtcagatgatatgtatctccttatgaaattcttttctcaactaccgtgatgatatttcaataattgatttcagtttcttctatgcattcaaagtagccaggctatcatgacggcattaagttcttgtatttaaccgttcgaccaaatttgtccaattgttataggtatctgtgaaaatccatgaacaacttatgtgttcatgtctctcattttatgtccttgcatgtcaataactataggtatctgtgtttatcacatatacaagctaacaatatacagttatgggtgagacaacgtcttagttcactgatcacacacatatttttgacagtcaatacttgcaataatgtgatatttgtaaactaatttttcctcaaaaattgtaacctgcatcaggcaaatatgagaaactagcatttgttgatgtttgaagtatatttatgtggatttgtgacttccttacatctcctctttcaaacaattggttcattattattattggtatggtggtgttatcgccccatttgcattaagctgctcactaagtcaaagtagtaaaaagccatggctgttgttacctagaagatgttgtgtatattcaaatcatagtgcttgtgttttgggctggagatagcacaaaataactactaaaactatctattatcaagtgatccatttgcagttttttcaatctgacactcacagactcactggttatatttcagagctgggaagaagctaacgatataccatacttagactcactggttaaggttatgagtgcattggtttgtaaaaaaaatatttcatggtcaccacagtaggagcaacatatccctgtttagcatattgggtaataactgtgctgatagtgtcacttaaacttggtaaacctgcaactgtaaatactgatacgtggactataagttttggccgtgcagttgctgtgtgataactattttgagttttcctaaacagtttcttacctagattgtcgtgaacttgcggtgtagtagcattgtacctattttaacttggccttgtttgtttgattttgtaagtgagggttttaatttagttgctagctcgatgaaagactatgattcgcaagactggatattttcctgcttatgaagaagcggtggcaaccaaattttcgaagtatgtgagttaaaaatctcgtcatgaatgaactcatgttgtttatagatttgcactggaatatgggcatgtagtgggcactactgggctaggagaagatgaagtgtttgtttttaattgcgtctttttgattgctttggcatgtatggctggcaatgtcatgttttttcatttttgtccacttcaatacacatgaaaccgttttggagactaattttgaagtatgtttaaacaattattctatttaaataagatctgcatatgtgatatattgaaaccattttggcaatgtcgtgtttttttatttttgtttaccatctgcatacctttacaaatgtcattttggttattttactgaattatattatatgccacatgactcttttattatttcttttttttaagaaagtcggggccattactcagatggtaaacaaacttgggccatgtaaatggtcgaccttgcctaaactatacctggacgtattggaaagcaatgctgggaaagctatgccatgaaagatatttgtagcagtgttacatgatggcatcaagtgctgggaaaatatttattaatttatggttttgtttctatggaatataggagtcatgattttgtgcatttgatcagagactacattaactagaggatactttctttttttcaaaattacaaaaacaatactaagtgtacctattattgtctactcgtctcatgatgattactatgtagataaattctctaagctatgaacagtgaccaatgaaatatattcatttgcatacagttctcaaactaatgtattcacgtcattatatattgtgccagctttgtcaattacgcaaattctaaaatgagcatatcacataactttgattccttttgagcaatttagtttttgatttcttttgaacaatttagtttacgaaacaacaatgtgtatatgaacagatgatagtttagcaatgcatagacaccttactatatattttaaag

SEQ ID NO: 4741 - DNA, 3688 bp, Zea Mays
atgcacccacgccccgtctctttgaagccgcccgcgtctccacccgagaccccgacccaccccgccctcccccgccgtcgcgctcgcgctcccccgcgacagccgccatgcgccctatctccgccatgcctgcgcctcctcccccgcccgcccgagaaccaccaagtttcccttccttacacagcgaggtccaccatcaacgcccccttccctggcaagccacagccgtccacgttcctggccaccagcgacctcccttctctagcccttagcagcgagcaacacctcctccccatggctgcccccagaccccagtcccgtccgcgcatccgctcccccgtcagcgacgcacctattctcctcgacgtcgcccatggcgtggacggcgacctccctcaccctgcactctggtatgtcaccgtattgcccgcctcctttccccgcaccggcgcagccccctgttgcggcggccccttccccaaacagcacggcaccacgtgctccccctgccgcgcccgcactctccttccccaaacagcacggccccacgacgctcacactctccttccctggcgatatcccctcatctgcgccttgtccctcggagatccccttccatcttcggcaccgagaggaaaatggatggcaatcccatccatcggcgccaaaccctacacatcctccatagtaggcacccgcccctccttacgcggcaccatcggtggggatatcccccaatctgctggaaggagtccgcgccaaatcagagcccgaaatccgtgccaaatccacgctggatgaggtggtggggagaccccccaatctgcgtcccttctacatgcctacacatcctccatagaaggcgccctcctactaaccactaaaaaaccccttccacacgctgacaactccatatatattagtccaaagggagagcacgattaaggccacgcctaccagcttcaccctcctcgcatttgtaagtccaatttttagatttatgatttcagatgttgagttgattttgcaaactggtaagtgttttgtttcatacggcaactctgcacatggacagaatcacagctctgttagcgttgttttatcaaggtacgtccaattccttctatttagttgactgtgattcaatatgcttgttgttcggttttacttgcgacatgctgttggggcatgtgtttgggatggatgacgtttggactagatagtttcagtcagtagccatctaaacaagcccttacagtattcgctatttcatattgaattttcctcatattgtagagaaaatcgcagctaatctgttcactgtggatgagttgccccatggtttgttcttaatcagaagaatggacgtgtgcaccacagtttagtgctaaatcatatggatataggagagatgtgctctctcctgtcctaaaacagttcatgttctcgtttttctattctgacagttcataagcgccggtcttttagatgcccactgacctggacatgttggtagaaatactgggcaggtgggatcaactccgatatttggtcaatttctcaaccactttctgttaatacgcaatttttattgaaaaacataatgacgtgcaatgcaaccaccctattcaatattcgtatggttagcaaaccatacgatcaatagaagatctttttggtagcactaaactacctacatacttgcatgcatgcgtcctaatccttgagtttgagtcaaaattaaatcaaaaattgtcatgatcaatcaaacaggaaagaattgacattctatagtttgcgtaggaaagtgtctctgtgtgttttctttttgaaggatcaaggattgaaggattttcctgcttgacggattagcacttcagtaccagtagttaagttattaggagcagtagcaaaaaggggctatatttgtttagggcttgttcgttttcatctcaatccatgtggatcagaggggtttgagtagctttaaatctacaataggtcaaaagctctactaaaatttttcaatctcatcaaatccatatgtcatatgaccgaacaaggccttagcgggtagggcacatcatcttaacgccaaactgctgcctcgaaaacgagtgtatagggcacaacatttgaaccacatatatgatatcaatcttatcaatctattgtgttaattatgaatcctgcatcaatcaaccagggcccggggcacattttcccaagccattgacaaatgttggtagatgcaggattcatagttacagaaactatgtggttcaaattttgccagtatttgactcatcacatttttcttctctatttcagttcttctagcagttgaagtagtgttttcttggcagatgttcgcctttaggacattgctgcgaggggaatcggatatgccacaggctgcatgttgttggagtttctatgtatccccatatcaaatttgtttttccctaatcagggaactcaattgtgcgagtaatagcaggagctcttccgaaaggccttcacatgttaatcctatcgaagaataacatatcaattattgaacgcctcagagaattgacacgattgcgcttgttggatatcaactataataggatatctagaattggccatggtatgtgttttagcttctcatatgatcttttttatgtgtttctccttggttgtggccacatgataggttcttactttgttcctatcccctttcccccattttcgtcttttgatatggcaagttcactgtgctttggattcttaactatctcaagtcatatgagaaaccccgttcatggatacttcctgataattatattcttcttgcattgacttgtgttttagatcatctgttaggattggcctcatgttcctctttgaaggagttgtatctggtcggtaacaagatcagtgaggtagatggtcttcaccgacttctgaagctcaaggtgcagaggatgctaggaaaatactcaataattatgtgagggttttaatttagttgctagctcgatgaaagactatgattcgcaagactggatattttcctgcttatgaagaagcggtggcaaccaaattttcgaaaaagtcggggccattactcagatggtaaacaaacttgggccatgtaaatggtcgaccttgcctaaactatacctggacgtattggaaagcaatgctgggaaagctatgccatgaaagatatttgtagcagtgttacatgatggcatcaagtgctgggaaaatatttattaatttatggttttgtttctatggaatataggagtcatgattttgtgcatttgatcagagactacattaactagaggatactttctttttttcaaaattacaaaaacaatactaagtgtacctattattgtctactcgtctcatgatgattactatgtagataaattctctaagctatgaacagtgaccaatgaaatatattcatttgcatacagttctcaaactaatgtattcacgtcattatatattgtgccagctttgtcaattacgcaaattctaaaatgagcatatcacataactttgattccttttgagcaatttagtttttgatttcttttgaacaatttagtttacgaaacaacaatgtgtatatgaacagatgatagtttagcaatgcatagacaccttactatatattttaaag

SEQ ID NO: 4742 - DNA, 5531 bp, Zea Mays
atgcacccacgccccgtctctttgaagccgcccgcgtctccacccgagaccccgacccaccccgccctcccccgccgtcgcgctcgcgctcccccgcgacagccgccatgcgccctatctccgccatgcctgcgcctcctcccccgcccgcccgagaaccaccaagtttcccttccttacacagcgaggtccaccatcaacgcccccttccctggcaagccacagccgtccacgttcctggccaccagcgacctcccttctctagcccttagcagcgagcaacacctcctccccatggctgcccccagaccccagtcccgtccgcgcatccgctcccccgtcagcgacgcacctattctcctcgacgtcgcccatggcgtggacggcgacctccctcaccctgcactctggtatgtcaccgtattgcccgcctcctttccccgcaccggcgcagccccctgttgcggcggccccttccccaaacagcacggcaccacgtgctccccctgccgcgcccgcactctccttccccaaacagcacggccccacgacgctcacactctccttccctggcgatatcccctcatctgcgccttgtccctcggagatccccttccatcttcggcaccgagaggaaaatggatggcaatcccatccatcggcgccaaaccctacacatcctccatagtaggcacccgcccctccttacgcggcaccatcggtggggatatcccccaatctgctggaaggagtccgcgccaaatcagagcccgaaatccgtgccaaatccacgctggatgaggtggtggggagaccccccaatctgcgtcccttctacatgcctacacatcctccatagaaggcgccctcctactaaccactaaaaaaccccttccacacgctgacaactccatatatattagtccaaagggagagcacgattaaggccacgcctaccagcttcaccctcctcgcatttgtaagtccaatttttagatttatgatttcagatgttgagttgattttgcaaactggtaagtgttttgtttcatacggcaactctgcacatggacagaatcacagctctgttagcgttgttttatcaaggtacgtccaattccttctatttagttgactgtgattcaatatgcttgttgttcggttttacttgcgacatgctgttggggcatgtgtttgggatggatgacgtttggactagatagtttcagtcagtagccatctaaacaagcccttacagtattcgctatttcatattgaattttcctcatattgtagagaaaatcgcagctaatctgttcactgtggatgagttgccccatggtttgttcttaatcagaagaatggacgtgtgcaccacagtttagtgctaaatcatatggatataggagagatgtgctctctcctgtcctaaaacagttcatgttctcgtttttctattctgacagttcataagcgccggtcttttagatgcccactgacctggacatgttggtagaaatactgggcaggtgggatcaactccgatatttggtcaatttctcaaccactttctgttaatacgcaatttttattgaaaaacataatgacgtgcaatgcaaccaccctattcaatattcgtatggttagcaaaccatacgatcaatagaagatctttttggtagcactaaactacctacatacttgcatgcatgcgtcctaatccttgagtttgagtcaaaattaaatcaaaaattgtcatgatcaatcaaacaggaaagaattgacattctatagtttgcgtaggaaagtgtctctgtgtgttttctttttgaaggatcaaggattgaaggattttcctgcttgacggattagcacttcagtaccagtagttaagttattaggagcagtagcaaaaaggggctatatttgtttagggcttgttcgttttcatctcaatccatgtggatcagaggggtttgagtagctttaaatctacaataggtcaaaagctctactaaaatttttcaatctcatcaaatccatatgtcatatgaccgaacaaggccttagcgggtagggcacatcatcttaacgccaaactgctgcctcgaaaacgagtgtatagggcacaacatttgaaccacatatatgatatcaatcttatcaatctattgtgttaattatgaatcctgcatcaatcaaccagggcccggggcacattttcccaagccattgacaaatgttggtagatgcaggattcatagttacagaaactatgtggttcaaattttgccagtatttgactcatcacatttttcttctctatttcagttcttctagcagttgaagtagtgttttcttggcagatgttcgcctttaggacattgctgcgaggggaatcggatatgccacaggctgcatgttgttggagtttctatgtatccccatatcaaatttgtttttccctaatcagggaactcaattgtgcgagtaatagcaggagctcttccgaaaggccttcacatgttaatcctatcgaagaataacatatcaattattgaacgcctcagagaattgacacgattgcgcttgttggatatcaactataataggatatctagaattggccatggtgcagaggatgctaggaaaatactcaataattatggtacatgtccaattctaagtatggtatattgtgctctaatatttttaggcatcattgtttctgttaaatactttgcccatggttaaggttatgagtgcattggttaatgaaatgtatgacattaaacggtggctgcgtggtgttccatcgtttcgccttgagccattatttaggcgaagagttccacaattgcatactgcacttgaacatatatagtactcatgaagttgttctacatcatattggatttcaatgcttttttatcagtgacagttttctcttttttggtgagtacaataattgtatttttatcttgtaatagattagttttattcatacgacaagcactatgcactgtgatatttgttgatttttcctttacctgccccccttgcactttctaattaaatgtttttgactatggaatggatcttttccattccatgtggtttgggggacaattgatgtgctttgctttgaagacagttgtagtggtcatctgattgtgaatttgtggtgcacaagttggctatgtgttttttccaagaaaatattttcttaacatagtccagcactaggattctcgagtccccgatccccagcacaaacttgctgttgtttccacttttatcgtcaatagttgttagtacttactgattaaattcacattctttaatatatgaactttattgctttctgattgtgcattcagaggggcaacagtacatcattaatccatcaaatgttcaaaaatgtgcatccataggtgcaacattataacagggatacagtcactgctacgtacaataattttatggggctactgtaccacctgtacagtttttcatgatctgtttgagggaccttaacctaggtactaggcaaattttaccattgttgtgaactgactataaaactccttttaaggtggccttaaagtaaatttaagcatgtttgcttgaagccgctcagcctcagatcatcttaagaggttgtggatttattgagtccaacacaagtttggtgttcctttgtacagttttactatggagtaccagactacgagtcattgtttgtgccatgggtccttgacctttgtaactaattcaagtcagatgatatgtatctccttatgaaattcttttctcaactaccgtgatgatatttcaataattgatttcagtttcttctatgcattcaaagtagccaggctatcatgacggcattaagttcttgtatttaaccgttcgaccaaatttgtccaattgttataggtatctgtgaaaatccatgaacaacttatgtgttcatgtctctcattttatgtccttgcatgtcaataactataggtatctgtgtttatcacatatacaagctaacaatatacagttatgggtgagacaacgtcttagttcactgatcacacacatatttttgacagtcaatacttgcaataatgtgatatttgtaaactaatttttcctcaaaaattgtaacctgcatcaggcaaatatgagaaactagcatttgttgatgtttgaagtatatttatgtggatttgtgacttccttacatctcctctttcaaacaattggttcattattattattggtatggtggtgttatcgccccatttgcattaagctgctcactaagtcaaagtagtaaaaagccatggctgttgttacctagaagatgttgtgtatattcaaatcatagtgcttgtgttttgggctggagatagcacaaaataactactaaaactatctattatcaagtgatccatttgcagttttttcaatctgacactcacagactcactggttatatttcagagctgggaagaagctaacgatataccatacttagactcactggttaaggttatgagtgcattggtttgtaaaaaaaatatttcatggtcaccacagtaggagcaacatatccctgtttagcatattgggtaataactgtgctgatagtgtcacttaaacttggtaaacctgcaactgtaaatactgatacgtggactataagttttggccgtgcagttgctgtgtgataactattttgagttttcctaaacagtttcttacctagattgtcgtgaacttgcggtgtagtagcattgtacctattttaacttggccttgtttgtttgattttgtaagtgagggttttaatttagttgctagctcgatgaaagactatgattcgcaagactggatattttcctgcttatgaagaagcggtggcaaccaaattttcgaaaaagtcggggccattactcagatggtaaacaaacttgggccatgtaaatggtcgaccttgcctaaactatacctggacgtattggaaagcaatgctgggaaagctatgccatgaaagatatttgtagcagtgttacatgatggcatcaagtgctgggaaaatatttattaatttatggttttgtttctatggaatataggagtcatgattttgtgcatttgatcagagactacattaactagaggatactttctttttttcaaaattacaaaaacaatactaagtgtacctattattgtctactcgtctcatgatgattactatgtagataaattctctaagctatgaacagtgaccaatgaaatatattcatttgcatacagttctcaaactaatgtattcacgtcattatatattgtgccagctttgtcaattacgcaaattctaaaatgagcatatcacataactttgattccttttgagcaatttagtttttgatttcttttgaacaatttagtttacgaaacaacaatgtgtatatgaacagatgatagtttagcaatgcatagacaccttactatatattttaaag

SEQ ID NO: 4743 - DNA, 3464 bp, Zea Mays
atgcacccacgccccgtctctttgaagccgcccgcgtctccacccgagaccccgacccaccccgccctcccccgccgtcgcgctcgcgctcccccgcgacagccgccatgcgccctatctccgccatgcctgcgcctcctcccccgcccgcccgagaaccaccaagtttcccttccttacacagcgaggtccaccatcaacgcccccttccctggcaagccacagccgtccacgttcctggccaccagcgacctcccttctctagcccttagcagcgagcaacacctcctccccatggctgcccccagaccccagtcccgtccgcgcatccgctcccccgtcagcgacgcacctattctcctcgacgtcgcccatggcgtggacggcgacctccctcaccctgcactctggtatgtcaccgtattgcccgcctcctttccccgcaccggcgcagccccctgttgcggcggccccttccccaaacagcacggcaccacgtgctccccctgccgcgcccgcactctccttccccaaacagcacggccccacgacgctcacactctccttccctggcgatatcccctcatctgcgccttgtccctcggagatccccttccatcttcggcaccgagaggaaaatggatggcaatcccatccatcggcgccaaaccctacacatcctccatagtaggcacccgcccctccttacgcggcaccatcggtggggatatcccccaatctgctggaaggagtccgcgccaaatcagagcccgaaatccgtgccaaatccacgctggatgaggtggtggggagaccccccaatctgcgtcccttctacatgcctacacatcctccatagaaggcgccctcctactaaccactaaaaaaccccttccacacgctgacaactccatatatattagtccaaagggagagcacgattaaggccacgcctaccagcttcaccctcctcgcatttgtaagtccaatttttagatttatgatttcagatgttgagttgattttgcaaactggtaagtgttttgtttcatacggcaactctgcacatggacagaatcacagctctgttagcgttgttttatcaaggtacgtccaattccttctatttagttgactgtgattcaatatgcttgttgttcggttttacttgcgacatgctgttggggcatgtgtttgggatggatgacgtttggactagatagtttcagtcagtagccatctaaacaagcccttacagtattcgctatttcatattgaattttcctcatattgtagagaaaatcgcagctaatctgttcactgtggatgagttgccccatggtttgttcttaatcagaagaatggacgtgtgcaccacagtttagtgctaaatcatatggatataggagagatgtgctctctcctgtcctaaaacagttcatgttctcgtttttctattctgacagttcataagcgccggtcttttagatgcccactgacctggacatgttggtagaaatactgggcaggtgggatcaactccgatatttggtcaatttctcaaccactttctgttaatacgcaatttttattgaaaaacataatgacgtgcaatgcaaccaccctattcaatattcgtatggttagcaaaccatacgatcaatagaagatctttttggtagcactaaactacctacatacttgcatgcatgcgtcctaatccttgagtttgagtcaaaattaaatcaaaaattgtcatgatcaatcaaacaggaaagaattgacattctatagtttgcgtaggaaagtgtctctgtgtgttttctttttgaaggatcaaggattgaaggattttcctgcttgacggattagcacttcagtaccagtagttaagttattaggagcagtagcaaaaaggggctatatttgtttagggcttgttcgttttcatctcaatccatgtggatcagaggggtttgagtagctttaaatctacaataggtcaaaagctctactaaaatttttcaatctcatcaaatccatatgtcatatgaccgaacaaggccttagcgggtagggcacatcatcttaacgccaaactgctgcctcgaaaacgagtgtatagggcacaacatttgaaccacatatatgatatcaatcttatcaatctattgtgttaattatgaatcctgcatcaatcaaccagggcccggggcacattttcccaagccattgacaaatgttggtagatgcaggattcatagttacagaaactatgtggttcaaattttgccagtatttgactcatcacatttttcttctctatttcagttcttctagcagttgaagtagtgttttcttggcagatgttcgcctttaggacattgctgcgaggggaatcggatatgccacaggctgcatgttgttggagtttctatgtatccccatatcaaatttgtttttccctaatcagggaactcaattgtgcgagtaatagcaggagctcttccgaaaggccttcacatgttaatcctatcgaagaataacatatcaattattgaacgcctcagagaattgacacgattgcgcttgttggatatcaactataataggatatctagaattggccatgatcatctgttaggattggcctcatgttcctctttgaaggagttgtatctggtcggtaacaagatcagtgaggtagatggtcttcaccgacttctgaagctcaaggtgcagaggatgctaggaaaatactcaataattatgtgagggttttaatttagttgctagctcgatgaaagactatgattcgcaagactggatattttcctgcttatgaagaagcggtggcaaccaaattttcgaaaaagtcggggccattactcagatggtaaacaaacttgggccatgtaaatggtcgaccttgcctaaactatacctggacgtattggaaagcaatgctgggaaagctatgccatgaaagatatttgtagcagtgttacatgatggcatcaagtgctgggaaaatatttattaatttatggttttgtttctatggaatataggagtcatgattttgtgcatttgatcagagactacattaactagaggatactttctttttttcaaaattacaaaaacaatactaagtgtacctattattgtctactcgtctcatgatgattactatgtagataaattctctaagctatgaacagtgaccaatgaaatatattcatttgcatacagttctcaaactaatgtattcacgtcattatatattgtgccagctttgtcaattacgcaaattctaaaatgagcatatcacataactttgattccttttgagcaatttagtttttgatttcttttgaacaatttagtttacgaaacaacaatgtgtatatgaacagatgatagtttagcaatgcatagacaccttactatatattttaaag

SEQ ID NO: 4744 - DNA, 3706 bp, Zea Mays
atgcacccacgccccgtctctttgaagccgcccgcgtctccacccgagaccccgacccaccccgccctcccccgccgtcgcgctcgcgctcccccgcgacagccgccatgcgccctatctccgccatgcctgcgcctcctcccccgcccgcccgagaaccaccaagtttcccttccttacacagcgaggtccaccatcaacgcccccttccctggcaagccacagccgtccacgttcctggccaccagcgacctcccttctctagcccttagcagcgagcaacacctcctccccatggctgcccccagaccccagtcccgtccgcgcatccgctcccccgtcagcgacgcacctattctcctcgacgtcgcccatggcgtggacggcgacctccctcaccctgcactctggtatgtcaccgtattgcccgcctcctttccccgcaccggcgcagccccctgttgcggcggccccttccccaaacagcacggcaccacgtgctccccctgccgcgcccgcactctccttccccaaacagcacggccccacgacgctcacactctccttccctggcgatatcccctcatctgcgccttgtccctcggagatccccttccatcttcggcaccgagaggaaaatggatggcaatcccatccatcggcgccaaaccctacacatcctccatagtaggcacccgcccctccttacgcggcaccatcggtggggatatcccccaatctgctggaaggagtccgcgccaaatcagagcccgaaatccgtgccaaatccacgctggatgaggtggtggggagaccccccaatctgcgtcccttctacatgcctacacatcctccatagaaggcgccctcctactaaccactaaaaaaccccttccacacgctgacaactccatatatattagtccaaagggagagcacgattaaggccacgcctaccagcttcaccctcctcgcatttgtaagtccaatttttagatttatgatttcagatgttgagttgattttgcaaactggtaagtgttttgtttcatacggcaactctgcacatggacagaatcacagctctgttagcgttgttttatcaagagaaaatcgcagctaatctgttcactgtggatgagttgccccatggtttgttcttaatcagaagaatggacgtgtgcaccacagtttagtgctaaatcatatggatataggagagatgtgctctctcctgtcctaaaacagttcatgttctcgtttttctattctgacagttcataagcgccggtcttttagatgcccactgacctggacatgttggtagaaatactgggcaggtgggatcaactccgatatttggtcaatttctcaaccactttctgttaatacgcaatttttattgaaaaacataatgacgtgcaatgcaaccaccctattcaatattcgtatggttagcaaaccatacgatcaatagaagatctttttggtagcactaaactacctacatacttgcatgcatgcgtcctaatccttgagtttgagtcaaaattaaatcaaaaattgtcatgatcaatcaaacaggaaagaattgacattctatagtttgcgtaggaaagtgtctctgtgtgttttctttttgaaggatcaaggattgaaggattttcctgcttgacggattagcacttcagtaccagtagttaagttattaggagcagtagcaaaaaggggctatatttgtttagggcttgttcgttttcatctcaatccatgtggatcagaggggtttgagtagctttaaatctacaataggtcaaaagctctactaaaatttttcaatctcatcaaatccatatgtcatatgaccgaacaaggccttagcgggtagggcacatcatcttaacgccaaactgctgcctcgaaaacgagtgtatagggcacaacatttgaaccacatatatgatatcaatcttatcaatctattgtgttaattatgaatcctgcatcaatcaaccagggcccggggcacattttcccaagccattgacaaatgttggtagatgcaggattcatagttacagaaactatgtggttcaaattttgccagtatttgactcatcacatttttcttctctatttcagttcttctagcagttgaagtagtgttttcttggcagatgttcgcctttaggacattgctgcgaggggaatcggatatgccacaggctgcatgttgttggagtttctatgtatccccatatcaaatttgtttttccctaatcagggaactcaattgtgcgagtaatagcaggagctcttccgaaaggccttcacatgttaatcctatcgaagaataacatatcaattattgaacgcctcagagaattgacacgattgcgcttgttggatatcaactataataggatatctagaattggccatgatcatctgttaggattggcctcatgttcctctttgaaggagttgtatctggtcggtaacaagatcagtgaggtagatggtcttcaccgacttctgaagctcaaggttctggacttgtgccacattcagtcttctgtagccactatacttggggttggtgaggctggtggaaggtttcagttcttctatacgtggaactaacctataggaggccagactgctagagcggtagagccagaaagtaatagttggtgacttggcggggacatttatgttatgctacctaattattaatctgtggaaaaggggaagcttttggagtagagcttattttttgttcgggttactatttcctctaattgtgtgaaaactgaaaagtatggttcgtgtctgaaaagcaatagttggtcgaggcatatttttgtatggttccactgtactaccttctatctggtgaattagatcccgattctaaataagttgctctctaatcagattaaacactttaatgtagctggcaattgcttattttgcaggtgcagaggatgctaggaaaatactcaataattatgtgagggttttaatttagttgctagctcgatgaaagactatgattcgcaagactggatattttcctgcttatgaagaagcggtggcaaccaaattttcgaaaaagtcggggccattactcagatggtaaacaaacttgggccatgtaaatggtcgaccttgcctaaactatacctggacgtattggaaagcaatgctgggaaagctatgccatgaaagatatttgtagcagtgttacatgatggcatcaagtgctgggaaaatatttattaatttatggttttgtttctatggaatataggagtcatgattttgtgcatttgatcagagactacattaactagaggatactttctttttttcaaaattacaaaaacaatactaagtgtacctattattgtctactcgtctcatgatgattactatgtagataaattctctaagctatgaacagtgaccaatgaaatatattcatttgcatacagttctcaaactaatgtattcacgtcattatatattgtgccagctttgtcaattacgcaaattctaaaatgagcatatcacataactttgattccttttgagcaatttagtttttgatttcttttgaacaatttagtttacgaaacaacaatgtgtatatgaacagatgatagtttagcaatgcatagacaccttactatatattttaaag

SEQ ID NO: 4745 - DNA, 6290 bp, Zea Mays
atgcacccacgccccgtctctttgaagccgcccgcgtctccacccgagaccccgacccaccccgccctcccccgccgtcgcgctcgcgctcccccgcgacagccgccatgcgccctatctccgccatgcctgcgcctcctcccccgcccgcccgagaaccaccaagtttcccttccttacacagcgaggtccaccatcaacgcccccttccctggcaagccacagccgtccacgttcctggccaccagcgacctcccttctctagcccttagcagcgagcaacacctcctccccatggctgcccccagaccccagtcccgtccgcgcatccgctcccccgtcagcgacgcacctattctcctcgacgtcgcccatggcgtggacggcgacctccctcaccctgcactctggtatgtcaccgtattgcccgcctcctttccccgcaccggcgcagccccctgttgcggcggccccttccccaaacagcacggcaccacgtgctccccctgccgcgcccgcactctccttccccaaacagcacggccccacgacgctcacactctccttccctggcgatatcccctcatctgcgccttgtccctcggagatccccttccatcttcggcaccgagaggaaaatggatggcaatcccatccatcggcgccaaaccctacacatcctccatagtaggcacccgcccctccttacgcggcaccatcggtggggatatcccccaatctgctggaaggagtccgcgccaaatcagagcccgaaatccgtgccaaatccacgctggatgaggtggtggggagaccccccaatctgcgtcccttctacatgcctacacatcctccatagaaggcgccctcctactaaccactaaaaaaccccttccacacgctgacaactccatatatattagtccaaagggagagcacgattaaggccacgcctaccagcttcaccctcctcgcatttgtaagtccaatttttagatttatgatttcagatgttgagttgattttgcaaactggtaagtgttttgtttcatacggcaactctgcacatggacagaatcacagctctgttagcgttgttttatcaaggtacgtccaattccttctatttagttgactgtgattcaatatgcttgttgttcggttttacttgcgacatgctgttggggcatgtgtttgggatggatgacgtttggactagatagtttcagtcagtagccatctaaacaagcccttacagtattcgctatttcatattgaattttcctcatattgtagagaaaatcgcagctaatctgttcactgtggatgagttgccccatggtttgttcttaatcagaagaatggacgtgtgcaccacagtttagtgctaaatcatatggatataggagagatgtgctctctcctgtcctaaaacagttcatgttctcgtttttctattctgacagttcataagcgccggtcttttagatgcccactgacctggacatgttggtagaaatactgggcaggtgggatcaactccgatatttggtcaatttctcaaccactttctgttaatacgcaatttttattgaaaaacataatgacgtgcaatgcaaccaccctattcaatattcgtatggttagcaaaccatacgatcaatagaagatctttttggtagcactaaactacctacatacttgcatgcatgcgtcctaatccttgagtttgagtcaaaattaaatcaaaaattgtcatgatcaatcaaacaggaaagaattgacattctatagtttgcgtaggaaagtgtctctgtgtgttttctttttgaaggatcaaggattgaaggattttcctgcttgacggattagcacttcagtaccagtagttaagttattaggagcagtagcaaaaaggggctatatttgtttagggcttgttcgttttcatctcaatccatgtggatcagaggggtttgagtagctttaaatctacaataggtcaaaagctctactaaaatttttcaatctcatcaaatccatatgtcatatgaccgaacaaggccttagcgggtagggcacatcatcttaacgccaaactgctgcctcgaaaacgagtgtatagggcacaacatttgaaccacatatatgatatcaatcttatcaatctattgtgttaattatgaatcctgcatcaatcaaccagggcccggggcacattttcccaagccattgacaaatgttggtagatgcaggattcatagttacagaaactatgtggttcaaattttgccagtatttgactcatcacatttttcttctctatttcagttcttctagcagttgaagtagtgttttcttggcagatgttcgcctttaggacattgctgcgaggggaatcggatatgccacaggctgcatgttgttggagtttctatgtatccccatatcaaatttgtttttccctaatcagggaactcaattgtgcgagtaatagcaggagctcttccgaaaggccttcacatgttaatcctatcgaagaataacatatcaattattgaacgcctcagagaattgacacgattgcgcttgttggatatcaactataataggatatctagaattggccatggtatgtgttttagcttctcatatgatcttttttatgtgtttctccttggttgtggccacatgataggttcttactttgttcctatcccctttcccccattttcgtcttttgatatggcaagttcactgtgctttggattcttaactatctcaagtcatatgagaaaccccgttcatggatacttcctgataattatattcttcttgcattgacttgtgttttagatcatctgttaggattggcctcatgttcctctttgaaggagttgtatctggtcggtaacaagatcagtgaggtagatggtcttcaccgacttctgaagctcaaggttctggacttgtgccacattcagtcttctgtagccactatacttggggttggtgaggctggtggaaggtttcagttcttctatacgtggaactaacctataggaggccagactgctagagcggtagagccagaaagtaatagttggtgacttggcggggacatttatgttatgctacctaattattaatctgtggaaaaggggaagcttttggagtagagcttattttttgttcgggttactatttcctctaattgtgtgaaaactgaaaagtatggttcgtgtctgaaaagcaatagttggtcgaggcatatttttgtatggttccactgtactaccttctatctggtgaattagatcccgattctaaataagttgctctctaatcagattaaacactttaatgtagctggcaattgcttattttgcaggtgcagaggatgctaggaaaatactcaataattatggtacatgtccaattctaagtatggtatattgtgctctaatatttttaggcatcattgtttctgttaaatactttgcccatggttaaggttatgagtgcattggttaatgaaatgtatgacattaaacggtggctgcgtggtgttccatcgtttcgccttgagccattatttaggcgaagagttccacaattgcatactgcacttgaacatatatagtactcatgaagttgttctacatcatattggatttcaatgcttttttatcagtgacagttttctcttttttggtgagtacaataattgtatttttatcttgtaatagattagttttattcatacgacaagcactatgcactgtgatatttgttgatttttcctttacctgccccccttgcactttctaattaaatgtttttgactatggaatggatcttttccattccatgtggtttgggggacaattgatgtgctttgctttgaagacagttgtagtggtcatctgattgtgaatttgtggtgcacaagttggctatgtgttttttccaagaaaatattttcttaacatagtccagcactaggattctcgagtccccgatccccagcacaaacttgctgttgtttccacttttatcgtcaatagttgttagtacttactgattaaattcacattctttaatatatgaactttattgctttctgattgtgcattcagaggggcaacagtacatcattaatccatcaaatgttcaaaaatgtgcatccataggtgcaacattataacagggatacagtcactgctacgtacaataattttatggggctactgtaccacctgtacagtttttcatgatctgtttgagggaccttaacctaggtactaggcaaattttaccattgttgtgaactgactataaaactccttttaaggtggccttaaagtaaatttaagcatgtttgcttgaagccgctcagcctcagatcatcttaagaggttgtggatttattgagtccaacacaagtttggtgttcctttgtacagttttactatggagtaccagactacgagtcattgtttgtgccatgggtccttgacctttgtaactaattcaagtcagatgatatgtatctccttatgaaattcttttctcaactaccgtgatgatatttcaataattgatttcagtttcttctatgcattcaaagtagccaggctatcatgacggcattaagttcttgtatttaaccgttcgaccaaatttgtccaattgttataggtatctgtgaaaatccatgaacaacttatgtgttcatgtctctcattttatgtccttgcatgtcaataactataggtatctgtgtttatcacatatacaagctaacaatatacagttatgggtgagacaacgtcttagttcactgatcacacacatatttttgacagtcaatacttgcaataatgtgatatttgtaaactaatttttcctcaaaaattgtaacctgcatcaggcaaatatgagaaactagcatttgttgatgtttgaagtatatttatgtggatttgtgacttccttacatctcctctttcaaacaattggttcattattattattggtatggtggtgttatcgccccatttgcattaagctgctcactaagtcaaagtagtaaaaagccatggctgttgttacctagaagatgttgtgtatattcaaatcatagtgcttgtgttttgggctggagatagcacaaaataactactaaaactatctattatcaagtgatccatttgcagttttttcaatctgacactcacagactcactggttatatttcagagctgggaagaagctaacgatataccatacttagactcactggttaaggttatgagtgcattggtttgtaaaaaaaatatttcatggtcaccacagtaggagcaacatatccctgtttagcatattgggtaataactgtgctgatagtgtcacttaaacttggtaaacctgcaactgtaaatactgatacgtggactataagttttggccgtgcagttgctgtgtgataactattttgagttttcctaaacagtttcttacctagattgtcgtgaacttgcggtgtagtagcattgtacctattttaacttggccttgtttgtttgattttgtaagtgagggttttaatttagttgctagctcgatgaaagactatgattcgcaagactggatattttcctgcttatgaagaagcggtggcaaccaaattttcgaaaaagtcggggccattactcagatggtaaacaaacttgggccatgtaaatggtcgaccttgcctaaactatacctggacgtattggaaagcaatgctgggaaagctatgccatgaaagatatttgtagcagtgttacatgatggcatcaagtgctgggaaaatatttattaatttatggttttgtttctatggaatataggagtcatgattttgtgcatttgatcagagactacattaactagaggatactttctttttttcaaaattacaaaaacaatactaagtgtacctattattgtctactcgtctcatgatgattactatgtagataaattctctaagctatgaacagtgaccaatgaaatatattcatttgcatacagttctcaaactaatgtattcacgtcattatatattgtgccagctttgtcaattacgcaaattctaaaatgagcatatcacataactttgattccttttgagcaatttagtttttgatttcttttgaacaatttagtttacgaaacaacaatgtgtatatgaacagatgatagtttagcaatgcatagacaccttactatatattttaaag

SEQ ID NO: 4746 - DNA, 3869 bp, Zea Mays
atgcacccacgccccgtctctttgaagccgcccgcgtctccacccgagaccccgacccaccccgccctcccccgccgtcgcgctcgcgctcccccgcgacagccgccatgcgccctatctccgccatgcctgcgcctcctcccccgcccgcccgagaaccaccaagtttcccttccttacacagcgaggtccaccatcaacgcccccttccctggcaagccacagccgtccacgttcctggccaccagcgacctcccttctctagcccttagcagcgagcaacacctcctccccatggctgcccccagaccccagtcccgtccgcgcatccgctcccccgtcagcgacgcacctattctcctcgacgtcgcccatggcgtggacggcgacctccctcaccctgcactctggtatgtcaccgtattgcccgcctcctttccccgcaccggcgcagccccctgttgcggcggccccttccccaaacagcacggcaccacgtgctccccctgccgcgcccgcactctccttccccaaacagcacggccccacgacgctcacactctccttccctggcgatatcccctcatctgcgccttgtccctcggagatccccttccatcttcggcaccgagaggaaaatggatggcaatcccatccatcggcgccaaaccctacacatcctccatagtaggcacccgcccctccttacgcggcaccatcggtggggatatcccccaatctgctggaaggagtccgcgccaaatcagagcccgaaatccgtgccaaatccacgctggatgaggtggtggggagaccccccaatctgcgtcccttctacatgcctacacatcctccatagaaggcgccctcctactaaccactaaaaaaccccttccacacgctgacaactccatatatattagtccaaagggagagcacgattaaggccacgcctaccagcttcaccctcctcgcatttgtaagtccaatttttagatttatgatttcagatgttgagttgattttgcaaactggtaagtgttttgtttcatacggcaactctgcacatggacagaatcacagctctgttagcgttgttttatcaaggtacgtccaattccttctatttagttgactgtgattcaatatgcttgttgttcggttttacttgcgacatgctgttggggcatgtgtttgggatggatgacgtttggactagatagtttcagtcagtagccatctaaacaagcccttacagtattcgctatttcatattgaattttcctcatattgtagagaaaatcgcagctaatctgttcactgtggatgagttgccccatggtttgttcttaatcagaagaatggacgtgtgcaccacagtttagtgctaaatcatatggatataggagagatgtgctctctcctgtcctaaaacagttcatgttctcgtttttctattctgacagttcataagcgccggtcttttagatgcccactgacctggacatgttggtagaaatactgggcaggtgggatcaactccgatatttggtcaatttctcaaccactttctgttaatacgcaatttttattgaaaaacataatgacgtgcaatgcaaccaccctattcaatattcgtatggttagcaaaccatacgatcaatagaagatctttttggtagcactaaactacctacatacttgcatgcatgcgtcctaatccttgagtttgagtcaaaattaaatcaaaaattgtcatgatcaatcaaacaggaaagaattgacattctatagtttgcgtaggaaagtgtctctgtgtgttttctttttgaaggatcaaggattgaaggattttcctgcttgacggattagcacttcagtaccagtagttaagttattaggagcagtagcaaaaaggggctatatttgtttagggcttgttcgttttcatctcaatccatgtggatcagaggggtttgagtagctttaaatctacaataggtcaaaagctctactaaaatttttcaatctcatcaaatccatatgtcatatgaccgaacaaggccttagcgggtagggcacatcatcttaacgccaaactgctgcctcgaaaacgagtgtatagggcacaacatttgaaccacatatatgatatcaatcttatcaatctattgtgttaattatgaatcctgcatcaatcaaccagggcccggggcacattttcccaagccattgacaaatgttggtagatgcaggattcatagttacagaaactatgtggttcaaattttgccagtatttgactcatcacatttttcttctctatttcagttcttctagcagttgaagtagtgttttcttggcagatgttcgcctttaggacattgctgcgaggggaatcggatatgccacaggctgcatgttgttggagtttctatgtatccccatatcaaatttgtttttccctaatcagggaactcaattgtgcgagtaatagcaggagctcttccgaaaggccttcacatgttaatcctatcgaagaataacatatcaattattgaacgcctcagagaattgacacgattgcgcttgttggatatcaactataataggatatctagaattggccatgatcatctgttaggattggcctcatgttcctctttgaaggagttgtatctggtcggtaacaagatcagtgaggtagatggtcttcaccgacttctgaagctcaaggtgcagaggatgctaggaaaatactcaataattatgtgagggttttaatttagttgctagctcgatgaaagactatgattcgcaagactggatattttcctgcttatgaagaagcggtggcaaccaaattttcgaagtatgtgagttaaaaatctcgtcatgaatgaactcatgttgtttatagatttgcactggaatatgggcatgtagtgggcactactgggctaggagaagatgaagtgtttgtttttaattgcgtctttttgattgctttggcatgtatggctggcaatgtcatgttttttcatttttgtccacttcaatacacatgaaaccgttttggagactaattttgaagtatgtttaaacaattattctatttaaataagatctgcatatgtgatatattgaaaccattttggcaatgtcgtgtttttttatttttgtttaccatctgcatacctttacaaatgtcattttggttattttactgaattatattatatgccacatgactcttttattatttcttttttttaagaaagtcggggccattactcagatggtaaacaaacttgggccatgtaaatggtcgaccttgcctaaactatacctggacgtattggaaagcaatgctgggaaagctatgccatgaaagatatttgtagcagtgttacatgatggcatcaagtgctgggaaaatatttattaatttatggttttgtttctatggaatataggagtcatgattttgtgcatttgatcagagactacattaactagaggatactttctttttttcaaaattacaaaaacaatactaagtgtacctattattgtctactcgtctcatgatgattactatgtagataaattctctaagctatgaacagtgaccaatgaaatatattcatttgcatacagttctcaaactaatgtattcacgtcattatatattgtgccagctttgtcaattacgcaaattctaaaatgagcatatcacataactttgattccttttgagcaatttagtttttgatttcttttgaacaatttagtttacgaaacaacaatgtgtatatgaacagatgatagtttagcaatgcatagacaccttactatatattttaaag

SEQ ID NO: 4747 - DNA, 5471 bp, Zea Mays
atgcacccacgccccgtctctttgaagccgcccgcgtctccacccgagaccccgacccaccccgccctcccccgccgtcgcgctcgcgctcccccgcgacagccgccatgcgccctatctccgccatgcctgcgcctcctcccccgcccgcccgagaaccaccaagtttcccttccttacacagcgaggtccaccatcaacgcccccttccctggcaagccacagccgtccacgttcctggccaccagcgacctcccttctctagcccttagcagcgagcaacacctcctccccatggctgcccccagaccccagtcccgtccgcgcatccgctcccccgtcagcgacgcacctattctcctcgacgtcgcccatggcgtggacggcgacctccctcaccctgcactctggtatgtcaccgtattgcccgcctcctttccccgcaccggcgcagccccctgttgcggcggccccttccccaaacagcacggcaccacgtgctccccctgccgcgcccgcactctccttccccaaacagcacggccccacgacgctcacactctccttccctggcgatatcccctcatctgcgccttgtccctcggagatccccttccatcttcggcaccgagaggaaaatggatggcaatcccatccatcggcgccaaaccctacacatcctccatagtaggcacccgcccctccttacgcggcaccatcggtggggatatcccccaatctgctggaaggagtccgcgccaaatcagagcccgaaatccgtgccaaatccacgctggatgaggtggtggggagaccccccaatctgcgtcccttctacatgcctacacatcctccatagaaggcgccctcctactaaccactaaaaaaccccttccacacgctgacaactccatatatattagtccaaagggagagcacgattaaggccacgcctaccagcttcaccctcctcgcatttgtaagtccaatttttagatttatgatttcagatgttgagttgattttgcaaactggtaagtgttttgtttcatacggcaactctgcacatggacagaatcacagctctgttagcgttgttttatcaagttcttctagcagttgaagtagtgttttcttggcagatgttcgcctttaggacattgctgcgaggggaatcggatatgccacaggctgcatgttgttggagtttctatgtatccccatatcaaatttgtttttccctaatcagggaactcaattgtgcgagtaatagcaggagctcttccgaaaggccttcacatgttaatcctatcgaagaataacatatcaattattgaacgcctcagagaattgacacgattgcgcttgttggatatcaactataataggatatctagaattggccatggtatgtgttttagcttctcatatgatcttttttatgtgtttctccttggttgtggccacatgataggttcttactttgttcctatcccctttcccccattttcgtcttttgatatggcaagttcactgtgctttggattcttaactatctcaagtcatatgagaaaccccgttcatggatacttcctgataattatattcttcttgcattgacttgtgttttagatcatctgttaggattggcctcatgttcctctttgaaggagttgtatctggtcggtaacaagatcagtgaggtagatggtcttcaccgacttctgaagctcaaggttctggacttgtgccacattcagtcttctgtagccactatacttggggttggtgaggctggtggaaggtttcagttcttctatacgtggaactaacctataggaggccagactgctagagcggtagagccagaaagtaatagttggtgacttggcggggacatttatgttatgctacctaattattaatctgtggaaaaggggaagcttttggagtagagcttattttttgttcgggttactatttcctctaattgtgtgaaaactgaaaagtatggttcgtgtctgaaaagcaatagttggtcgaggcatatttttgtatggttccactgtactaccttctatctggtgaattagatcccgattctaaataagttgctctctaatcagattaaacactttaatgtagctggcaattgcttattttgcaggtgcagaggatgctaggaaaatactcaataattatggtacatgtccaattctaagtatggtatattgtgctctaatatttttaggcatcattgtttctgttaaatactttgcccatggttaaggttatgagtgcattggttaatgaaatgtatgacattaaacggtggctgcgtggtgttccatcgtttcgccttgagccattatttaggcgaagagttccacaattgcatactgcacttgaacatatatagtactcatgaagttgttctacatcatattggatttcaatgcttttttatcagtgacagttttctcttttttggtgagtacaataattgtatttttatcttgtaatagattagttttattcatacgacaagcactatgcactgtgatatttgttgatttttcctttacctgccccccttgcactttctaattaaatgtttttgactatggaatggatcttttccattccatgtggtttgggggacaattgatgtgctttgctttgaagacagttgtagtggtcatctgattgtgaatttgtggtgcacaagttggctatgtgttttttccaagaaaatattttcttaacatagtccagcactaggattctcgagtccccgatccccagcacaaacttgctgttgtttccacttttatcgtcaatagttgttagtacttactgattaaattcacattctttaatatatgaactttattgctttctgattgtgcattcagaggggcaacagtacatcattaatccatcaaatgttcaaaaatgtgcatccataggtgcaacattataacagggatacagtcactgctacgtacaataattttatggggctactgtaccacctgtacagtttttcatgatctgtttgagggaccttaacctaggtactaggcaaattttaccattgttgtgaactgactataaaactccttttaaggtggccttaaagtaaatttaagcatgtttgcttgaagccgctcagcctcagatcatcttaagaggttgtggatttattgagtccaacacaagtttggtgttcctttgtacagttttactatggagtaccagactacgagtcattgtttgtgccatgggtccttgacctttgtaactaattcaagtcagatgatatgtatctccttatgaaattcttttctcaactaccgtgatgatatttcaataattgatttcagtttcttctatgcattcaaagtagccaggctatcatgacggcattaagttcttgtatttaaccgttcgaccaaatttgtccaattgttataggtatctgtgaaaatccatgaacaacttatgtgttcatgtctctcattttatgtccttgcatgtcaataactataggtatctgtgtttatcacatatacaagctaacaatatacagttatgggtgagacaacgtcttagttcactgatcacacacatatttttgacagtcaatacttgcaataatgtgatatttgtaaactaatttttcctcaaaaattgtaacctgcatcaggcaaatatgagaaactagcatttgttgatgtttgaagtatatttatgtggatttgtgacttccttacatctcctctttcaaacaattggttcattattattattggtatggtggtgttatcgccccatttgcattaagctgctcactaagtcaaagtagtaaaaagccatggctgttgttacctagaagatgttgtgtatattcaaatcatagtgcttgtgttttgggctggagatagcacaaaataactactaaaactatctattatcaagtgatccatttgcagttttttcaatctgacactcacagactcactggttatatttcagagctgggaagaagctaacgatataccatacttagactcactggttaaggttatgagtgcattggtttgtaaaaaaaatatttcatggtcaccacagtaggagcaacatatccctgtttagcatattgggtaataactgtgctgatagtgtcacttaaacttggtaaacctgcaactgtaaatactgatacgtggactataagttttggccgtgcagttgctgtgtgataactattttgagttttcctaaacagtttcttacctagattgtcgtgaacttgcggtgtagtagcattgtacctattttaacttggccttgtttgtttgattttgtaagtgagggttttaatttagttgctagctcgatgaaagactatgattcgcaagactggatattttcctgcttatgaagaagcggtggcaaccaaattttcgaagtatgtgagttaaaaatctcgtcatgaatgaactcatgttgtttatagatttgcactggaatatgggcatgtagtgggcactactgggctaggagaagatgaagtgtttgtttttaattgcgtctttttgattgctttggcatgtatggctggcaatgtcatgttttttcatttttgtccacttcaatacacatgaaaccgttttggagactaattttgaagtatgtttaaacaattattctatttaaataagatctgcatatgtgatatattgaaaccattttggcaatgtcgtgtttttttatttttgtttaccatctgcatacctttacaaatgtcattttggttattttactgaattatattatatgccacatgactcttttattatttcttttttttaagaaagtcggggccattactcagatggtaaacaaacttgggccatgtaaatggtcgaccttgcctaaactatacctggacgtattggaaagcaatgctgggaaagctatgccatgaaagatatttgtagcagtgttacatgatggcatcaagtgctgggaaaatatttattaatttatggttttgtttctatggaatataggagtcatgattttgtgcatttgatcagagactacattaactagaggatactttctttttttcaaaattacaaaaacaatactaagtgtacctattattgtctactcgtctcatgatgattactatgtagataaattctctaagctatgaacagtgaccaatgaaatatattcatttgcatacagttctcaaactaatgtattcacgtcattatatattgtgccagctttgtcaattacgcaaattctaaaatgagcatatcacataactttgattccttttgagcaatttagtttttgatttcttttgaacaatttagtttacgaaacaacaatgtgtatatgaacagatgatagtttagcaatgcatagacaccttactatatattttaaag

SEQ ID NO: 4748 - DNA, 5936 bp, Zea Mays
atgcacccacgccccgtctctttgaagccgcccgcgtctccacccgagaccccgacccaccccgccctcccccgccgtcgcgctcgcgctcccccgcgacagccgccatgcgccctatctccgccatgcctgcgcctcctcccccgcccgcccgagaaccaccaagtttcccttccttacacagcgaggtccaccatcaacgcccccttccctggcaagccacagccgtccacgttcctggccaccagcgacctcccttctctagcccttagcagcgagcaacacctcctccccatggctgcccccagaccccagtcccgtccgcgcatccgctcccccgtcagcgacgcacctattctcctcgacgtcgcccatggcgtggacggcgacctccctcaccctgcactctggtatgtcaccgtattgcccgcctcctttccccgcaccggcgcagccccctgttgcggcggccccttccccaaacagcacggcaccacgtgctccccctgccgcgcccgcactctccttccccaaacagcacggccccacgacgctcacactctccttccctggcgatatcccctcatctgcgccttgtccctcggagatccccttccatcttcggcaccgagaggaaaatggatggcaatcccatccatcggcgccaaaccctacacatcctccatagtaggcacccgcccctccttacgcggcaccatcggtggggatatcccccaatctgctggaaggagtccgcgccaaatcagagcccgaaatccgtgccaaatccacgctggatgaggtggtggggagaccccccaatctgcgtcccttctacatgcctacacatcctccatagaaggcgccctcctactaaccactaaaaaaccccttccacacgctgacaactccatatatattagtccaaagggagagcacgattaaggccacgcctaccagcttcaccctcctcgcatttgtaagtccaatttttagatttatgatttcagatgttgagttgattttgcaaactggtaagtgttttgtttcatacggcaactctgcacatggacagaatcacagctctgttagcgttgttttatcaaggtacgtccaattccttctatttagttgactgtgattcaatatgcttgttgttcggttttacttgcgacatgctgttggggcatgtgtttgggatggatgacgtttggactagatagtttcagtcagtagccatctaaacaagcccttacagtattcgctatttcatattgaattttcctcatattgtagagaaaatcgcagctaatctgttcactgtggatgagttgccccatggtttgttcttaatcagaagaatggacgtgtgcaccacagtttagtgctaaatcatatggatataggagagatgtgctctctcctgtcctaaaacagttcatgttctcgtttttctattctgacagttcataagcgccggtcttttagatgcccactgacctggacatgttggtagaaatactgggcaggtgggatcaactccgatatttggtcaatttctcaaccactttctgttaatacgcaatttttattgaaaaacataatgacgtgcaatgcaaccaccctattcaatattcgtatggttagcaaaccatacgatcaatagaagatctttttggtagcactaaactacctacatacttgcatgcatgcgtcctaatccttgagtttgagtcaaaattaaatcaaaaattgtcatgatcaatcaaacaggaaagaattgacattctatagtttgcgtaggaaagtgtctctgtgtgttttctttttgaaggatcaaggattgaaggattttcctgcttgacggattagcacttcagtaccagtagttaagttattaggagcagtagcaaaaaggggctatatttgtttagggcttgttcgttttcatctcaatccatgtggatcagaggggtttgagtagctttaaatctacaataggtcaaaagctctactaaaatttttcaatctcatcaaatccatatgtcatatgaccgaacaaggccttagcgggtagggcacatcatcttaacgccaaactgctgcctcgaaaacgagtgtatagggcacaacatttgaaccacatatatgatatcaatcttatcaatctattgtgttaattatgaatcctgcatcaatcaaccagggcccggggcacattttcccaagccattgacaaatgttggtagatgcaggattcatagttacagaaactatgtggttcaaattttgccagtatttgactcatcacatttttcttctctatttcagttcttctagcagttgaagtagtgttttcttggcagatgttcgcctttaggacattgctgcgaggggaatcggatatgccacaggctgcatgttgttggagtttctatgtatccccatatcaaatttgtttttccctaatcagggaactcaattgtgcgagtaatagcaggagctcttccgaaaggccttcacatgttaatcctatcgaagaataacatatcaattattgaacgcctcagagaattgacacgattgcgcttgttggatatcaactataataggatatctagaattggccatggtgcagaggatgctaggaaaatactcaataattatggtacatgtccaattctaagtatggtatattgtgctctaatatttttaggcatcattgtttctgttaaatactttgcccatggttaaggttatgagtgcattggttaatgaaatgtatgacattaaacggtggctgcgtggtgttccatcgtttcgccttgagccattatttaggcgaagagttccacaattgcatactgcacttgaacatatatagtactcatgaagttgttctacatcatattggatttcaatgcttttttatcagtgacagttttctcttttttggtgagtacaataattgtatttttatcttgtaatagattagttttattcatacgacaagcactatgcactgtgatatttgttgatttttcctttacctgccccccttgcactttctaattaaatgtttttgactatggaatggatcttttccattccatgtggtttgggggacaattgatgtgctttgctttgaagacagttgtagtggtcatctgattgtgaatttgtggtgcacaagttggctatgtgttttttccaagaaaatattttcttaacatagtccagcactaggattctcgagtccccgatccccagcacaaacttgctgttgtttccacttttatcgtcaatagttgttagtacttactgattaaattcacattctttaatatatgaactttattgctttctgattgtgcattcagaggggcaacagtacatcattaatccatcaaatgttcaaaaatgtgcatccataggtgcaacattataacagggatacagtcactgctacgtacaataattttatggggctactgtaccacctgtacagtttttcatgatctgtttgagggaccttaacctaggtactaggcaaattttaccattgttgtgaactgactataaaactccttttaaggtggccttaaagtaaatttaagcatgtttgcttgaagccgctcagcctcagatcatcttaagaggttgtggatttattgagtccaacacaagtttggtgttcctttgtacagttttactatggagtaccagactacgagtcattgtttgtgccatgggtccttgacctttgtaactaattcaagtcagatgatatgtatctccttatgaaattcttttctcaactaccgtgatgatatttcaataattgatttcagtttcttctatgcattcaaagtagccaggctatcatgacggcattaagttcttgtatttaaccgttcgaccaaatttgtccaattgttataggtatctgtgaaaatccatgaacaacttatgtgttcatgtctctcattttatgtccttgcatgtcaataactataggtatctgtgtttatcacatatacaagctaacaatatacagttatgggtgagacaacgtcttagttcactgatcacacacatatttttgacagtcaatacttgcaataatgtgatatttgtaaactaatttttcctcaaaaattgtaacctgcatcaggcaaatatgagaaactagcatttgttgatgtttgaagtatatttatgtggatttgtgacttccttacatctcctctttcaaacaattggttcattattattattggtatggtggtgttatcgccccatttgcattaagctgctcactaagtcaaagtagtaaaaagccatggctgttgttacctagaagatgttgtgtatattcaaatcatagtgcttgtgttttgggctggagatagcacaaaataactactaaaactatctattatcaagtgatccatttgcagttttttcaatctgacactcacagactcactggttatatttcagagctgggaagaagctaacgatataccatacttagactcactggttaaggttatgagtgcattggtttgtaaaaaaaatatttcatggtcaccacagtaggagcaacatatccctgtttagcatattgggtaataactgtgctgatagtgtcacttaaacttggtaaacctgcaactgtaaatactgatacgtggactataagttttggccgtgcagttgctgtgtgataactattttgagttttcctaaacagtttcttacctagattgtcgtgaacttgcggtgtagtagcattgtacctattttaacttggccttgtttgtttgattttgtaagtgagggttttaatttagttgctagctcgatgaaagactatgattcgcaagactggatattttcctgcttatgaagaagcggtggcaaccaaattttcgaagtatgtgagttaaaaatctcgtcatgaatgaactcatgttgtttatagatttgcactggaatatgggcatgtagtgggcactactgggctaggagaagatgaagtgtttgtttttaattgcgtctttttgattgctttggcatgtatggctggcaatgtcatgttttttcatttttgtccacttcaatacacatgaaaccgttttggagactaattttgaagtatgtttaaacaattattctatttaaataagatctgcatatgtgatatattgaaaccattttggcaatgtcgtgtttttttatttttgtttaccatctgcatacctttacaaatgtcattttggttattttactgaattatattatatgccacatgactcttttattatttcttttttttaagaaagtcggggccattactcagatggtaaacaaacttgggccatgtaaatggtcgaccttgcctaaactatacctggacgtattggaaagcaatgctgggaaagctatgccatgaaagatatttgtagcagtgttacatgatggcatcaagtgctgggaaaatatttattaatttatggttttgtttctatggaatataggagtcatgattttgtgcatttgatcagagactacattaactagaggatactttctttttttcaaaattacaaaaacaatactaagtgtacctattattgtctactcgtctcatgatgattactatgtagataaattctctaagctatgaacagtgaccaatgaaatatattcatttgcatacagttctcaaactaatgtattcacgtcattatatattgtgccagctttgtcaattacgcaaattctaaaatgagcatatcacataactttgattccttttgagcaatttagtttttgatttcttttgaacaatttagtttacgaaacaacaatgtgtatatgaacagatgatagtttagcaatgcatagacaccttactatatattttaaag

SEQ ID NO: 4749 - DNA, 1579 bp, Zea Mays
atctaagagaaaaaaaaggaaacttaacttcaaagaaataattgtctttaaatgcagacgtgggagtctggaagatttcgaataggttttaataaaagctcttggcttctcctatcccattctaaaatctctctggcgaagaggaacgggctcaaggcgagctgttctcttctcctgtagaaagcgtttctacccctggacctcgcaagaatcctgtactgtaccaagatgagaaagccttcaaatggatgcaaggagagggatgtgatttaccaccggaatgatcacacggatgacaatgggaagcatttcttcaagattttgattggtgatttccataaaagattggtcataccggttaaatttgctaaaaaattcagaggaaaagtagaaagaaatattaagcttgaatcacttggtggttatacttttgatgttcaagttgcacagaatttgggcagaatcatgtttcaatctgggtggaagtcgtttgttagtgcccatgacttgaaaatgtttgacttgttggtattcaagtatgatgggatgtctcggatgaaggtcctgatatttgatcctagtggttgcgagaaagtaccgcctttttttgtcacgaaaaatgctatgagtggtggacgaaagagagaagaaccccaagaaccccttgacatttcaagcagctatgctgatcttcccatgaaaacaccagagactaaaaagaaagcaagaaagcaaagagacaggagtaggatcaatattagtccatgtagatccatatccaactcatcaggaggaatgagaagttcagaagacgatgaagcacattctgttccaagttgcatactcccacgaggcaccatccttgatagtatgcagaggagaaaagtgaaagagagactccgagctatttgttctgaaatcccaatctacgtgtttgtcgtgaagaagtcaaacatttttggacgatctcaagatatggtcttctccagaaaatatcctgatgtatgtctcccattcaagagcggagcggtgattcttcagtgtcatggcaagagctgggaagtgattcttgaggttcggaaagatcaaggtgaatccaaaaggcttcgcattgggtgggcagagtttgctcgtgacaacaatttgcagctgggagatatctgcctctttgagccactgaagaccatgaagtacaccatgaatgtgcacatcgttcgcagaagagtgagatctgggaaatgatttctgctgttctttgcgacttttgcagcggtagccgttgacagtagtgcttcttggtttgataagagttgctaatggtcatgtcagccattattagtgccaacttttgcagcagtgatattaacgatttaacgcttttatgcttgggaggctccaactcctttcatcctaaaataaatatcattctcgcatatttttagttttaactgaatatacataagaaatagttaagatatgtagtgcagaattagtattagactagtggattatatagtggtatagataaatcactgatttatatttttataataaacttattgaggatataattattgct

SEQ ID NO: 4750 - DNA, 1646 bp, Zea Mays
ataggttttaataaaagctcttggcttctcctatcccattctaaaatctctctggcgaagaggaacgggctcaaggcgagctgttctcttctcctgtagaaagcgtttctacccctggacctcgcaagaatcctgtaaggttttcttgtcctttggttccttgcgggttgctttagatagtctttttttttttgcctttaaatagtcttgaggaaattcttttgacctatacatcgttattagagttccgtgtttttctgtttcttccgctgcctgtccccctgttaattccattttttctaaactctctctctctctctctctctctctctctctctctctctctctctctctgagattgatcgttcaggtaaaaaaatgcccaatttccttcctttttctctcaagaagttacttctccatctctactgtatactattgcaaactttattgcaggtactgtaccaagatgagaaagccttcaaatggatgcaaggagagggatgtgatttaccaccggaatgatcacacggatgacaatgggaagcatttcttcaagattttgattggtgatttccataaaagattggtcataccggttaaatttgctaaaaaattcagaggaaaaagagaagaaccccaagaaccccttgacatttcaagcagctatgctgatcttcccatgaaaacaccagagactaaaaagaaagcaagaaagcaaagagacaggagtaggatcaatattagtccatgtagatccatatccaactcatcaggttgagtcgcaatgtcgtcgaacctagtagcatctatgtatatctacaagatcatgatatcactgtcttgtttgattataggaggaatgagaagttcagaagacgatgaagcacattctgttccaagttgcatactcccacgaggcaccatccttgatagtatgcagaggagaaaagtgaaagagagactccgagctatttgttctgaaatcccaatctacgtgtttgtcgtgaagaagtcaaacatttttggacgatctcaagatatggtcttctccagaaaatatcctgatgtatgtctcccattcaagagcggagcggtgattcttcagtgtcatggcaagagctgggaagtgattcttgaggttcggaaagatcaaggtgaatccaaaaggcttcgcattgggtgggcagagtttgctcgtgacaacaatttgcagctgggagatatctgcctctttgagccactgaagaccatgaagtacaccatgaatgtgcacatcgttcgcagaagagtgagatctgggaaatgatttctgctgttctttgcgacttttgcagcggtagccgttgacagtagtgcttcttggtttgataagagttgctaatggtcatgtcagccattattagtgccaacttttgcagcagtgatattaacgatttaacgcttttatgcttgggaggctccaactcctttcatcctaaaataaatatcattctcgcatatttttagttttaactgaatatacataagaaatagttaagatatgtagtgcagaattagtattagactagtggattatatagtggtatagataaatcactgatttatatttttataataaacttattgaggatataattattgct

SEQ ID NO: 4751 - DNA, 1537 bp, Zea Mays
ctctctggcgaagaggaacgggctcaaggcgagctgttctcttctcctgtagaaagcgtttctacccctggacctcgcaagaatcctgtaaaaaaatgcccaatttccttcctttttctctcaagaagttacttctccatctctactgtatactattgcaaactttattgcaggtactgtaccaagatgagaaagccttcaaatggatgcaaggagagggatgtgatttaccaccggaatgatcacacggatgacaatgggaagcatttcttcaagattttgattggtgatttccataaaagattggtcataccggttaaatttgctaaaaaattcagaggaaaagtagaaagaaatattaagcttgaatcacttggtggttatacttttgatgttcaagttgcacagaatttgggcagaatcatgtttcaatctgggtggaagtcgtttgttagtgcccatgacttgaaaatgtttgacttgttggtattcaagtatgatgggatgtctcggatgaaggtcctgatatttgatcctagtggttgcgagaaagtaccgcctttttttgtcacgaaaaatgctatgagtggtggacgaaagagagaagaaccccaagaaccccttgacatttcaagcagctatgctgatcttcccatgaaaacaccagagactaaaaagaaagcaagaaagcaaagagacaggagtaggatcaatattagtccatgtagatccatatccaactcatcaggaggaatgagaagttcagaagacgatgaagcacattctgttccaagttgcatactcccacgaggcaccatccttgatagtatgcagaggagaaaagtgaaagagagactccgagctatttgttctgaaatcccaatctacgtgtttgtcgtgaagaagtcaaacatttttggacgatctcaagatatggtcttctccagaaaatatcctgatgtatgtctcccattcaagagcggagcggtgattcttcagtgtcatggcaagagctgggaagtgattcttgaggttcggaaagatcaaggtgaatccaaaaggcttcgcattgggtgggcagagtttgctcgtgacaacaatttgcagctgggagatatctgcctctttgagccactgaagaccatgaagtacaccatgaatgtgcacatcgttcgcagaagagtgagatctgggaaatgatttctgctgttctttgcgacttttgcagcggtagccgttgacagtagtgcttcttggtttgataagagttgctaatggtcatgtcagccattattagtgccaacttttgcagcagtgatattaacgatttaacgcttttatgcttgggaggctccaactcctttcatcctaaaataaatatcattctcgcatatttttagttttaactgaatatacataagaaatagttaagatatgtagtgcagaattagtattagactagtggattatatagtggtatagataaatcactgatttatatttttataataaacttattgaggatataattattgct

SEQ ID NO: 4752 - DNA, 1687 bp, Zea Mays
ctctctggcgaagaggaacgggctcaaggcgagctgttctcttctcctgtagaaagcgtttctacccctggacctcgcaagaatcctgtaaggttttcttgtcctttggttccttgcgggttgctttagatagtctttttttttttgcctttaaatagtcttgaggaaattcttttgacctatacatcgttattagagttccgtgtttttctgtttcttccgctgcctgtccccctgttaattccattttttctaaactctctctctctctctctctctctctctctctctctctctctctctctctgagattgatcgttcaggtactgtaccaagatgagaaagccttcaaatggatgcaaggagagggatgtgatttaccaccggaatgatcacacggatgacaatgggaagcatttcttcaagattttgattggtgatttccataaaagattggtcataccggttaaatttgctaaaaaattcagaggaaaagtagaaagaaatattaagcttgaatcacttggtggttatacttttgatgttcaagttgcacagaatttgggcagaatcatgtttcaatctgggtggaagtcgtttgttagtgcccatgacttgaaaatgtttgacttgttggtattcaagtatgatgggatgtctcggatgaaggtcctgatatttgatcctagtggttgcgagaaagtaccgcctttttttgtcacgaaaaatgctatgagtggtggacgaaagagagaagaaccccaagaaccccttgacatttcaagcagctatgctgatcttcccatgaaaacaccagagactaaaaagaaagcaagaaagcaaagagacaggagtaggatcaatattagtccatgtagatccatatccaactcatcaggaggaatgagaagttcagaagacgatgaagcacattctgttccaagttgcatactcccacgaggcaccatccttgatagtatgcagaggagaaaagtgaaagagagactccgagctatttgttctgaaatcccaatctacgtgtttgtcgtgaagaagtcaaacatttttggacgatctcaagatatggtcttctccagaaaatatcctgatgtatgtctcccattcaagagcggagcggtgattcttcagtgtcatggcaagagctgggaagtgattcttgaggttcggaaagatcaaggtgaatccaaaaggcttcgcattgggtgggcagagtttgctcgtgacaacaatttgcagctgggagatatctgcctctttgagccactgaagaccatgaagtacaccatgaatgtgcacatcgttcgcagaagagtgagatctgggaaatgatttctgctgttctttgcgacttttgcagcggtagccgttgacagtagtgcttcttggtttgataagagttgctaatggtcatgtcagccattattagtgccaacttttgcagcagtgatattaacgatttaacgcttttatgcttgggaggctccaactcctttcatcctaaaataaatatcattctcgcatatttttagttttaactgaatatacataagaaatagttaagatatgtagtgcagaattagtattagactagtggattatatagtggtatagataaatcactgatttatatttttataataaacttattgaggatataattattgct

SEQ ID NO: 4753 - DNA, 1848 bp, Zea Mays
acaaaaaacaaaagtcaccgaatctagcgcaggcaccgatctccctctcacgaggttgagcgtcaaccatccctgcacatctcagcatgaggcgaactggcgaacctccacaagtccactgccatggacgacgctttcgtgcaggccatcgaataccggcctgtgtcgcccatcccccaggccaccggcattccggtcgtcgacctgtcacccctagctcgcatgccgccatcgccaggcgccatgaacgcgctggcggccggggtgggcgcggcgtgccgggattggggcttcttcctggcggtgggccacggcgtgccggacgcgacggtggcgcgggcggtggaggccgggcgggcgttcttcgcgctgccgccggagcgcaaggcggccgtgcggcgcaccgagcaggcgccgctcggttactacgacgccgagcacaccaagaacgtccgggactggaaggaggtgttcgacgttttcccgcacgagccgcggtcgcttgccggggcggccgacgacgagctggtgttcgtgaacaagtggccggacgacagcgaactgccggggttccgagcggcgctcgaggagtatgcggcggcgatggaggagttggccctaaagctgctggagctgatcgctcggagcctgcacctgagacctgaccgcctgcacggcttcttcggagacgaccagacaacgtacatgcgggtcaaccggtaccctccctgcccgaggcccgacctcgcgctcggcctcggccgccacaaggacagcggcgccctgaccatcctgctccaggacgacgacgtcggcgggctcgaagtgcggaggcgaaccgacggcgagtgggtgcgcgtggagcctgttcgtggctcgttcgtcgtcaacgtcggcgacatcgttcaggtctggagcaacgacaggtacgagagcgtggaacaccgggcgtcggtgaactcggagaaggagaggttctccatcccctacttcttcaacccggctatggccaccctggtggagccgttggaggagatggtgagcgaggagaacccggcaaggtacgcctcgtacagttggggcgacttcttcagaaccaggaggagaagcaacttcaggaagctggacgtcgacaacattcagatcgcgcaactcagaaaggacaaatgaaataaattaaagccaaaaacaactttgttcagcaataaaagccagaacatgatcatcagcaacgctgccgtggggaaaaacacatgcatcggtttctttatttttcattttcctttatttttcttttttttcattttccacatcacgtcacacacttagacgactccattagatatcggattcgcatttctattttaggagctacagtacgtaggagtaggacccacacaaaactctccctatctatttctttttttccagcggctcttcctattccagctcgcatttgcaactgccgctgtagacagaagatgggcgaggcagccatactgcgggtgtgggacggttgtttgatttggatttaggagaggagagagaaagcgtagaaaaggaaagtgtcgcgagcccctcgcaatttgcacccgcggggcaggttcgacaacccgaacatagttgagtgtgaaaagggttttgaatctaacccgtggggaacccaccggcccgaactacataagaatagtccagaatttcatatacagcctaaaaggcccgtcatttctttatgagatgtcttgctcacgattcaagaagacaagaacctgtatgtgcacttcagctgttccgcacttgtgtttttgaacttgtaagacataacatattgtttgagttgcgagattg

SEQ ID NO: 4754 - DNA, 2285 bp, Zea Mays
gttttatttaaaagaatagtgacttatcatttttttatttgttttatcacttaaagtttgtgtttaacttaaatttttgcatttttaataaatattatgaataaaatgagtgattaaagttttcaaaaaaaggttaatggagtcatatatctatgaacaggtaatactctttaggaagaagtacttgaaaaacaaaactcgaacaaaaagaaaaaaagaaagaaaaacggtccaccacaccttgtatgtgccctccggcgggcgggtcagagctcgcaactcgcaccagcacagcagcaccggcagcaccaccaaccccagggcagccgcgccgccagccacgacaagcttagcagcccctcgcactcgctagggtatttattggtacaatcgggtgatctgcgtgccgcatcgcgccgggacacgggagacaatggcgttcacgacgctcggcggctgtggggcgcaggcttcagtgcggttggctccccagaatggaatccttggatctaattcgaagccattcgcgggcatcatactcaagaaacctcagcaggttggatccctgcccctccgtgcaaggggatccattttttcttcaccacgcaggcttttctcccctaaggcagcagcccctaaatcaggggattccatacgcattgcagtgctaggggccagcggttatactggagctgagattgttcggattctagcgaaccaccctcagtttcatataaaagtgatgactgcagatagaaaagctggcgagcaatttggatcagtatttcctcacttgataacacaggacctgccgagactggtcgcaataaaagacgctgacttttcagatgttgatgctgttttttgctgcttgccacatggaaattatcaaaagcttaccccgacacttaaagattgttgatctctcagcggacttccgactacgcgacatcaatgagtatgctgagtggtatggacattcccacagggcaccggaacttcagggggaagctgtgtatggtttgaccgaacttaaacgagatgacataagaaatgcacgcctggtagcaaatccagggtgttatcccacatctattcaacttccgctcgttcctttggtaaaggcaaaactgatcaagctaaccaacattattattgatgcaaaatctggagtcagtggtgcaggacgtggggctaaggaagcaaatctttacactgaaatcgctgagggtatccatgcttatgggataacaagccatcggcatgtgcctgagattgagcaaggacttacagatgctgctgaatcaaaagttactatcagctttactccacatttgatgtgtatgaaacgtgggatgcaatctactgtgtatgttgaattggcatctggagtgactcccagggatttgtatgaacacctaaagtctacttacgagaatgaagaatttgtcaagctgttacatggtagcaatgttccttgcacaagccatgttgtgggatcaaattactgcttcatgaatgtctatgaggatagaatacctggaagggccatcatcatctctgtcatagataatcttgtgaagggagcatctggtcaggctttgcaaaatcttaatctgatgatgggactgcctgagaatatggggctgcaataccagcccctgttcccttgatcttttgtgtcattatctattattacattatttaggagtccagaaaccaaattatcattactgtcaagaggtggcaaggagcctgacatcagaattcagtcaagtcgaagttagacagttagtgtagcttggtctgtgttgttttagctttattaaaccattaagagaataatgatgatggcaatttagcagtacaatggtagtattatgtgggcagcttggttccaataaaatcataagcctatacacatcttgtgcccgcaatgttgtttgctattttgatcacgaaatcaatattgagcttgaattcagttctgaggcagctatccttggcatcactggataactttatggtatcttttttactatgttcaagcaaaaagtttagcccattacagttgtactttgagaagattgaaatgtctcttagtatagttcttaagtctcttagtatgattctcaagttttatcctatagcagtatagctgcatggactcatagcttgctactgtagctatcttatctgcagcgtttcttttaacaggattttcatctctgcagcgttgctgctgtgtaaacatctgtaatacagacaactacgaaacgaacttt

SEQ ID NO: 4755 - DNA, 2243 bp, Zea Mays
gttttatttaaaagaatagtgacttatcatttttttatttgttttatcacttaaagtttgtgtttaacttaaatttttgcatttttaataaatattatgaataaaatgagtgattaaagttttcaaaaaaaggttaatggagtcatatatctatgaacaggtaatactctttaggaagaagtacttgaaaaacaaaactcgaacaaaaagaaaaaaagaaagaaaaacggtccaccacaccttgtatgtgccctccggcgggcgggtcagagctcgcaactcgcaccagcacagcagcaccggcagcaccaccaaccccagggcagccgcgccgccagccacgacaagcttagcagcccctcgcactcgctagggtatttattggtacaatcgggtgatctgcgtgccgcatcgcgccgggacacgggagacaatggcgttcacgacgctcggcggctgtggggcgcaggcttcagtgcggttggctccccagaatggaatccttggatctaattcgaagccattcgcgggcatcatactcaagaaacctcagcaggcttttctcccctaaggcagcagcccctaaatcaggggattccatacgcattgcagtgctaggggccagcggttatactggagctgagattgttcggattctagcgaaccaccctcagtttcatataaaagtgatgactgcagatagaaaagctggcgagcaatttggatcagtatttcctcacttgataacacaggacctgccgagactggtcgcaataaaagacgctgacttttcagatgttgatgctgttttttgctgcttgccacatggtacaacccaggaaattatcaaaagcttaccccgacacttaaagattgttgatctctcagcggacttccgactacgcgacatcaatgagtatgctgagtggtatggacattcccacagggcaccggaacttcagggggaagctgtgtatggtttgaccgaacttaaacgagatgacataagaaatgcacgcctggtagcaaatccagggtgttatcccacatctattcaacttccgctcgttcctttggtaaaggcaaaactgatcaagctaaccaacattattattgatgcaaaatctggagtcagtggtgcaggacgtggggctaaggaagcaaatctttacactgaaatcgctgagggtatccatgcttatgggataacaagccatcggcatgtgcctgagattgagcaaggacttacagatgctgctgaatcaaaagttactatcagctttactccacatttgatgtgtatgaaacgtgggatgcaatctactgtgtatgttgaattggcatctggagtgactcccagggatttgtatgaacacctaaagtctacttacgagaatgaagaatttgtcaagctgttacatggtagcaatgttccttgcacaagccatgttgtgggatcaaattactgcttcatgaatgtctatgaggatagaatacctggaagggccatcatcatctctgtcatagataatcttgtgaagggagcatctggtcaggctttgcaaaatcttaatctgatgatgggactgcctgagaatatggggctgcaataccagcccctgttcccttgatcttttgtgtcattatctattattacattatttaggagtccagaaaccaaattatcattactgtcaagaggtggcaaggagcctgacatcagaattcagtcaagtcgaagttagacagttagtgtagcttggtctgtgttgttttagctttattaaaccattaagagaataatgatgatggcaatttagcagtacaatggtagtattatgtgggcagcttggttccaataaaatcataagcctatacacatcttgtgcccgcaatgttgtttgctattttgatcacgaaatcaatattgagcttgaattcagttctgaggcagctatccttggcatcactggataactttatggtatcttttttactatgttcaagcaaaaagtttagcccattacagttgtactttgagaagattgaaatgtctcttagtatagttcttaagtctcttagtatgattctcaagttttatcctatagcagtatagctgcatggactcatagcttgctactgtagctatcttatctgcagcgtttcttttaacaggattttcatctctgcagcgttgctgctgtgtaaacatctgtaatacagacaactacgaaacgaacttt

SEQ ID NO: 4756 - DNA, 909 bp, Zea Mays
catgagagtctggtatatactttgcaaggcgatacttctacacaagcaccaaagaaatgaaaatattggctgcaatcaagcatcttgtaatgaaaatgtaatcttgtaaagtgtgtacctagaaaaatcaagagaatcaacaattgaagacattttgaaatagaggaaatatttctttagtatcaaattcgttagaaaaacattgtaacccaaaataatgaatgaacacgacagtaatgaccatatcttgaccggagggagtacacatttgtttatggataacttcaatggagctaccaacacatagaaaaatctttgagctgatacgaacaatgttattagaacagttcaaatagtcggcggtatcaaaacactttcttggaacatgatccgcctgggttaccatgttggggctagatttacagactcgaagatgagcaacataaattgacgataaaatcaaacaactaacatcgaacaaaaaagtagccctgacacaaccagtgtccctaaactaacttaacctcctctaacactcaattagtccgtgcttgaaaacattcatcagtcaaagtccagggcaccaaaaaaataacagtccaggtctactgatgattctagcagagcagtgtattctgaacctcttaaatgaacactgaagcaagccgaaacacaagcatatgcaaaaggtatatgtttcagtctttctatatttataaaatgtgtcgctgtagggagcttccccaacagtttttcctgtaaaaaaatgtcgatcttatatgtataacgagaagtgtataaaaagtccgtacctgttgacactgcatagaatttcaaccaaatgtgcatacatatagataaagatgcaatactccgattgtcagaagttacttgttctgtcagttttag

SEQ ID NO: 4757 - DNA, 3947 bp, Zea Mays
aattccccgtcgatcccgcgcaccatttcgaaaccccgcccccaaatccccgacgtccccgcccaatgccgcccgcgcgccgccgcccccgccgtggcgggactcccgctggcgccggggacgactccgtcccctcctcctccgccgacctcctcgcgcttgccgccacgctcatcccggccgccgccaccgccgcactcaaagccccgccccaactcaagcaactcgtgcactcgctccccgtctcccacccgctcctcatctctctcccgcaagcgctcaccctagccctcgctaccccctccgaccccgacgccggctccacttccgacgcacccccgcccccaccccctcctccacgccccgccgccgtcctcctccacctgctcgtcacacaccccacccacccgcctagatgggaagacctcgtctgcccgctcgcgctgctccacggtcgcctcgcgctcctcgccaccgccgacccaccgctcgcagcccttgccgccgcgtgcttcgagctcgcctggcgcgccgacgcgcctggacgcgaagccctagttgcgcagacgctgccctacctcgtggccctggcgctcacctccggcaccagcgccaggccgatcctccgccgcctcttcgcgctccgcgacgcgctgccgctgctcgactacgacgacgaccagagcatttctgatttcaagatgctcctgcttcgctgcttcgtctcgccgctcttcctcaaggccgaggaagggaggaagttcctcgcactcgtgctcggggtcagcgaggggatcgccagggatgggctggagctcatcagggcgcaggtggggatgaccggggccaagcgcgccgcggttgtagcctacggggaggtcgtcttcagggcatggaaggacgggggttgggtcaagggggaggtcggggaggcgttcctgcaggggatggtggagggcgccgtacacgcagggagcaaggaggtggccaaggcggccaggaagatcctgtcgcctttcgtggagcagagggcggttgctggggttgaaaagttggtgttccagcttgccgaacctgtgttgttccgttcgttgcaggttgcaaactccaatgttcgccataatgctttgcatcttctgttagatttgtttcccctcgaagatccagatgtgactaaggatgttaatgatcctctcctagagaagcagttcttcttgatagacaggctcctcatggatgaatacccagaaataagaacagttgcagttgaaggaatctctcgtattcttaaccaatactgggaaattgtccctgcccccactatttcaaaatttctgagtaaaattgttgatgacatgtccaaggattcttgcaatgagggctgctgctgttgatcttcttttagctattcgagatcttcgatcattccaatacaataaggttgttggtctgggtactttattgtcttcacttgctaatgatcatccccgcattgctcaaaaaattacaaagctcctcattccttcttattttccatcaaagttgagcccaaaagaagcatgtgctcgctgcattgctctaatcaagaggtcaccaacagctggagcaagattttgtgaatttgctctgtctgaagggtcatccccaaggtccattgttgagctagtcaaatattcaattactctcgcattatcacaaacaggacttaactcagatcaaattgatggcctaattattgcttcagtcaatcttattaaaagcttatccaatgagcgctctagtttggctgctttgcgagaatttttggcaaatgggaagctaaggttggtccttcaagttgctgtttctgagcgtgcccgggctgcccttcttggcatagttccagttgttttacctgatgaactatctgtgcttcatgaggaatgcatggatatagttgtgaatgcagctaggatttcaaagcaagaagaatatcaggaaacggtgctggaagcacataagttgatagttttgggtggctggtctgatgaactgtttgaagcattgaccaatactctgcaatctaaagcctctgattttgctgagatttatggagttgaacctcctccatgtcccgttgcatcttcaaggaggaagaaaggcaagtcacttaagaaaatacctgtacgtgacaatgttgttggaaaggggtcatccaaatcaaaaatcagtaatgaagagcttgctgttgcagcgggggcagcatggcaggtcaatgaaatagtaaaaactaaagacttgagagatgcttttcttcaatcctcttattcagagattgtgttttcctccctgaagatcatttctcaagtgtacatcgagcagtgcctatatttggactctttagaccttgcacctgtattggcctatttgagtttggctacatgtaatgaccttccagatgtcaatcaaactggaagctgctttgagtcgtcaacggcaaatcagtcactggatcatctgctcaattgtttcgacaaacttctaaatggaactgttagcaatccaccatcgaaattgaacaagaatggaaaagctttacgatcaaaagaccagcagaaaggagcatctgaagcgaaaggcacatttaatgtgattatgctgggtgcttcaattctgaagtttatcattgacacaaatatgaagccactcaatgatgacaaaataaggtgcctcaaatttgcatcatcctacataaaatatgcagtatcatccataaaaaagcatcaggaacagagttcatgtttcaaggggggtgatctgaaggacgctttgttgcttgtacggagctcctttacatacgcttcgaagctacttcaattggttttatcaagctcccctgaggagtcatgccctccagaggaggccttcttccttgcaaatgatcttcttgatattgtgcccgctgtcgagtcctttgctggctcaagatttgcacccagcatagtttctgctctgaagcaatggctgcctgtgctcttgttgggtcttgtatgccggtggctaattggatcacataatgaaatggcacccaacgtattccactttgctgactctgtcttaccactgtgggtcactgccgtggcaaagaatgagcttgttgattccaaagagcctggccaggacgagcaaagcaatctgactgcggagggcgaggactcactgttatccagaaagctagcagaaatgatggcgatcctcttgaagaaaggaagccccagaatcctcgattgcgcgagtggagtccttctgtccactttccagttgacgctgcgaagatcagactatgacattgtcctgggcatgactcgtttcatttgtgacaagttgcttgggaacaactccctagcattggaaaagctgcagcttacccgtgactttcttcgtgagaatttcctcgagattgataggtatgtccgcgatgagcttgtccatgatgacgattcgaggcagcaactggagaaagcaaaagcgctgataagatcagttctcaccgatgtctgattgatgtacataccagttgtaagcaacaaaccgataagtttccaccggtgtctggagaaagcaaaagcgctgatagtagggctgattagtatcacgttgtgtcattgttcaacaaaggcactgcagtgaccatgtgtgattggatagaagatcatttccactgacaagtagagaccagaaatgaactgtttgaatcaacaatcaagctagagttataactgtgttgcattcaaatttgcagtctacttacaactgacacaggtacaaactgtgtaacaatcccacgttattgtaatccaccacatcccatttcataatagcaaatggacgctggtgtatacaagccacaaggtactatttgtaaggaaaaaataaaactaaatggacgactcaatatacagtttagt

SEQ ID NO: 4758 - DNA, 1318 bp, Zea Mays
accaaaccagaccaaacataatacgatgctgcggcgccttgtcggcggagccgccgccgtgcgttcgccgctgccgccgccgttctgtcggctgcttcacaacggcggcggaggtggtgggtgtagctcgggggagccggagagcgtggcgtaccgcatgtcgatgctgcggcgcccctctaccgtcagcaagaaggggctcacctggaactggtgcagcctcatcggtcgcctcgccgcaccggtgaggccgatcgacactagctttcttgaagtccccagggcgtacaccttcctctccgtcaccctctcgtcgcccgcgccctcttcgagctcgtccaacataaatgtgacattgcagctgaatggtgagctggcaaatgttggcctaaagcatctgaagcatgatgacctcgtttatgtatctggtcatctgggctcttatcataaagtcagtccaagtggtgaacggcacattgtctataagatttatgtcagagagctgaattatgttgttgatcaaaataagaagcctcagaatgatgcagactcaacaagtccaccatcaatgacatctgtcaccctcaaatgctaaaagagaatgaatgtataggcaggcttcgcttgtggcaggtcttctttgcgaacccatatgagtggtgggacaaccgacgatccaaaccatgggccaactaccctgatttcaagcacaaggacactcgtgagaaaatatggcttcgtccagatgaccctccttgggtacgaaagcagcttgaattatatgacctggaagtagcagagaatggccataggtgtaaaagtcgactgtcaaaaaaacaaaattggaaaacccaagattttgactactttgatgatgaagaagtacagcatttagcggaagcatgaataggacgcatggcattgtctgccaagaatgaagaaattcaccaggccatttgggtggtttgggggtgggggcggctgtttctttgctcagggatcgtactcaattgtatcgatgtatgtttggtaggatgtggatatgttgagtcttctagtttgtaattttatttatgcgtattttgagatgcaagtgtgagggaacctcgacagtcgacatattagcgaggccctatcaattaacatgcctcgaagtttgctaagtgatacttgggcctgtttggttcaacttttttctgaccagcttttctgaaaatctggctgtgtagagaatctggttgtgtagagaatctgagtatcattagaattatgtgcggagaaagataaaggtgtccataggactcgggatctaaaaagt

SEQ ID NO: 4759 - DNA, 1306 bp, Zea Mays
accaaaccagaccaaacataatacgatgctgcggcgccttgtcggcggagccgccgccgtgcgttcgccgctgccgccgccgttctgtcggctgcttcacaacggcggcggaggtggtgggtgtagctcgggggagccggagagcgtggcgtaccgcatgtcgatgctgcggcgcccctctaccgtcagcaagaaggggctcacctggaactggtgcagcctcatcggtcgcctcgccgcaccggtgaggccgatcgacactagctttcttgaagtccccagggcgtacaccttcctctccgtcaccctctcgtcgcccgcgccctcttcgagctcgtccaacataaactgaatggtgagctggcaaatgttggcctaaagcatctgaagcatgatgacctcgtttatgtatctggtcatctgggctcttatcataaagtcagtccaagtggtgaacggcacattgtctataagatttatgtcagagagctgaattatgttgttgatcaaaataagaagcctcagaatgatgcagactcaacaagtccaccatcaatgacatctgtcacccttcaaatgctaaaagagaatgaatgtataggcaggcttcgcttgtggcaggtcttctttgcgaacccatatgagtggtgggacaaccgacgatccaaaccatgggccaactaccctgatttcaagcacaaggacactcgtgagaaaatatggcttcgtccagatgaccctccttgggtacgaaagcagcttgaattatatgacctggaagtagcagagaatggccataggtgtaaaagtcgactgtcaaaaaaacaaaattggaaaacccaagattttgactactttgatgatgaagaagtacagcatttagcggaagcatgaataggacgcatggcattgtctgccaagaatgaagaaattcaccaggccatttgggtggtttgggggtgggggcggctgtttctttgctcagggatcgtactcaattgtatcgatgtatgtttggtaggatgtggatatgttgagtcttctagtttgtaattttatttatgcgtattttgagatgcaagtgtgagggaacctcgacagtcgacatattagcgaggccctatcaattaacatgcctcgaagtttgctaagtgatacttgggcctgtttggttcaacttttttctgaccagcttttctgaaaatctggctgtgtagagaatctggttgtgtagagaatctgagtatcattagaattatgtgcggagaaagataaaggtgtccataggactcgggatctaaaaagt

SEQ ID NO: 4760 - DNA, 1256 bp, Zea Mays
accaaaccagaccaaacataatacgatgctgcggcgccttgtcggcggagccgccgccgtgcgttcgccgctgccgccgccgttctgtcggctgcttcacaacggcggcggaggtggtgggtgtagctcgggggagccggagagcgtggcgtaccgcatgtcgatgctgcggcgcccctctaccgtcagcaagaaggggctcacctggaactggtgcagcctcatcggtcgcctcgccgcaccggtgaggccgatcgacactagctttcttgaagtccccagggcgtacaccttcctctccgtcaccctctcgtcgcccgcgccctcttcgagctcgtccaacataaactgaatggtgagctggcaaatgttggcctaaagcatctgaagcatgatgacctcgtttatgtatctggtcatctgggctcttatcataaagtcagtccaagtggtgaacggcacattgtctataagatttatgtcagagagctgaattatgttgttgatcaaaataagaagcctcagaatgatgcagactcaacaagtccaccatcaatgacatctgtcacccgtcttctttgcgaacccatatgagtggtgggacaaccgacgatccaaaccatgggccaactaccctgatttcaagcacaaggacactcgtgagaaaatatggcttcgtccagatgaccctccttgggtacgaaagcagcttgaattatatgacctggaagtagcagagaatggccataggtgtaaaagtcgactgtcaaaaaaacaaaattggaaaacccaagattttgactactttgatgatgaagaagtacagcatttagcggaagcatgaataggacgcatggcattgtctgccaagaatgaagaaattcaccaggccatttgggtggtttgggggtgggggcggctgtttctttgctcagggatcgtactcaattgtatcgatgtatgtttggtaggatgtggatatgttgagtcttctagtttgtaattttatttatgcgtattttgagatgcaagtgtgagggaacctcgacagtcgacatattagcgaggccctatcaattaacatgcctcgaagtttgctaagtgatacttgggcctgtttggttcaacttttttctgaccagcttttctgaaaatctggctgtgtagagaatctggttgtgtagagaatctgagtatcattagaattatgtgcggagaaagataaaggtgtccataggactcgggatctaaaaagt

SEQ ID NO: 4761 - DNA, 2333 bp, Zea Mays
accaaaccagaccaaacataatacgatgctgcggcgccttgtcggcggagccgccgccgtgcgttcgccgctgccgccgccgttctgtcggctgcttcacaacggcggcggaggtggtgggtgtagctcgggggagccggagagcgtggcgtaccgcatgtcgatgctgcggcgcccctctaccgtcagcaagaaggggctcacctggaactggtgcagcctcatcggtcgcctcgccgcaccggtgaggccgatcgacactagctttcttgaagtccccagggcgtacaccttcctctccgtcaccctctcgtcgcccgcgccctcttcgagctcgtccaacataaagttgagtccctcgctccggatccccctcagccaatccttgtgttatttcctctctcactttctgcagagttatttgttctctcctagtaagggctttcctagtaagggcttgttaggttattcccatcccatagggattgagagagattttggcttgacaaggatttaaacccgcccaatctgctcccatccactgatccacatggattgtaattaaaacgaacagaccctaattgggtgcattctcatagccttctttttatatatatcatgtgggacgtcatgtttcgattgtgtgccgcatatatagtttcatcattatgtagagttaatatacttcgattaaaatatttttgtcttgtgtaaaatttggtgccttaagccctatgagaaacaaagggcatacaaccacaagaacaattgagcacagttctaacagaatcagtagggactttctgtgatgcgattcactccattctggtaacatcccatcttccatgcttcagtggagcaaacatttagctgaaggtccgccatgtttatagttgtataaagtactttggtgcatcatgaatagcttggggcgaatttcgcaccaaacaaaatcgaagtcgtacttccaaatttggaagccttatgtttgactaagactgaaccttctcatgcttagtgtgcaagaaaagtcaatgtaccattcaaatagagaattgaatccatcaagcaaactaggcagtaggcactatttgccacaaagtagcttaagaagcaactcattttcatgatacccaggaacaaatcaggagctccacaatgcatgcctgatttaataatacttcttttaattttatttttcctactaccatgttaaactgttattattatttggactgatttactgaatgaaaattaggttgtatcactataattacagcatgaaggacttgagctaggtgatctaacgatatatttatttgcatgtttttgttcaagtaactttattgtgattttggctaaatgaaactggggttatatcattatgcttacaatatgaagaacttgaacagtgtgacattgcagctgaatggtgagctggcaaatgttggcctaaagcatctgaagcatgatgacctcgtttatgtatctggtcatctgggctcttatcataaagtcagtccaagtggtgaacggcacattgtctataagatttatgtcagagagctgaattatgttgttgatcaaaataagaagcctcagaatgatgcagactcaacaagtccaccatcaatgacatctgtcacccgtcttctttgcgaacccatatgagtggtgggacaaccgacgatccaaaccatgggccaactaccctgatttcaagcacaaggacactcgtgagaaaatatggcttcgtccagatgaccctccttgggtacgaaagcagcttgaattatatgacctggaagtagcagagaatggccataggtgtaaaagtcgactgtcaaaaaaacaaaattggaaaacccaagattttgactactttgatgatgaagaagtacagcatttagcggaagcatgaataggacgcatggcattgtctgccaagaatgaagaaattcaccaggccatttgggtggtttgggggtgggggcggctgtttctttgctcagggatcgtactcaattgtatcgatgtatgtttggtaggatgtggatatgttgagtcttctagtttgtaattttatttatgcgtattttgagatgcaagtgtgagggaacctcgacagtcgacatattagcgaggccctatcaattaacatgcctcgaagtttgctaagtgatacttgggcctgtttggttcaacttttttctgaccagcttttctgaaaatctggctgtgtagagaatctggttgtgtagagaatctgagtatcattagaattatgtgcggagaaagataaaggtgtccataggactcgggatctaaaaagt

SEQ ID NO: 4762 - DNA, 2092 bp, Zea Mays
tcgtcttcttcggttcgtctctgctctgctgctgggatcaccgtcaccggcaaccgcgagggagggagagggacagagcgaagagagagaaaactgaagaaacaacattttccgtttttcttgcttagtgaaaccagtggaagagggagagaaaagaagacgaagacgacaatataagtaaataaaaaaaaggcagcgagcgaggtggggaaaaaggggcgagttgatagagagaaagatagagagagaaggcgagggaggcagggatcacgaggtgtgcttcctcctccgcccaatcgggcccaaccaaatcccgccagcgccgcctcctttatactcccacctctttcccggagcttcttggatcacgggacgcgcgccgcgggccggtacgctgctggtgctggaccgctcgactctcgcctaccagctgctgctttggctggcgcgccggcgagagagagagagagagagggacgcgacggcgatggaccgggcggcgctcaccgtgggcccggggatggacatgcccataatgcacgacggcgaccgctacgagcttgtccgcgacatcggctccggcaacttcggcgtcgcgcgcctcatgcgcaaccgcgccgacggccagctcgtcgccgtcaagtacatcgaccgaggcgagaagattgacgagaacgtgcagcgggagatcatcaaccaccgctcgctgcgccaccccaacatcatccgcttcaaggaggtcatcctcaccccgacgcacctggccatcgtcatggagtacgcctccggcggcgagctcttcgagcgcatctgcaacgccggcagattcagcgaggacgaggcgcgtttctttttccaacaactcatatcaggggtcagctactgccattccatgtatgccatcgtgacttgaagctagagaacaccctgttggacggcagcaccgcgcctcgcgtcaagatatgtgatttcggctactcaaagtcatcagttctacactctcagcccaaatctaccgtgggaactccagcatacattgctcctgaggttcttctgaagaaggaatacgatgggaaggttgccgacgtgtggtcgtgtggggtaaccctctacgtgatgctggtcggcgcgtatccattcgaggacccagacgagcctaagaatttcaggaagacgatccagagaatactgggcgtgcagtactcggttccagactacgtccacatatctccggaatgccaggacctaatctccaggatcttcgtcgccaacccgtccaccaggatcaccatgcccgagatacggagccacccttggttcctgaagaacctcccggccgacctggtggacgacagcgcgacgacgacgagcaagcagtacgaggagcccgagcagccgatgcagggcatggacgagatcatgcagatcctgggcgaggccaccattccggcggcggggtcccgcgggctcaaccagttcctgaacgacggcctggacctcgacgacgacatggaggacctggactcggacgccgacctcgacctggagagcagcggggagatcgtgtacgctatgtgacggcgccgagtgctcagcgacgaggcaatgtctcgttgcgctcgcaggttgccgagataactagagagacggagagggtgggtgtgtgctgctgctgcctgcagcctgcgtgtagttgtgtgctttcaggtctctgctgctcatgcctgatgccgtcgttcgtgatggcccctttttaccgtcctgttgtgtttggccgttgttatttggtgcgccttcagtgcagtgttttgcaacggtttagccatttggaatcgctactgctacaacctcgttcatccgagaggaccctttgtttctgcatccccagcgatgtacttgtattactacactgtatcatatgttatatttggtgtaggaaaataaaggaactccattgcccgttctctgtctgtccccatctttatttcatccgtatctcagttttgtgagaacccgctggagatctttctcgattttggtgtcttcttggctcatatatctcaagtcgtgcacaccctctatcagagcaaat

SEQ ID NO: 4763 - DNA, 639 bp, Zea Mays
ctcggctaacgtccaggtgcgttcgacaagctccgtagtgtaagtgtggttctcattccattgtaatggtgaagaagtttctgagaacatgtttgttaaggataccactacaataaattcagtataggtacttgaacatgtacacattttaactcgaccaaaaaaagcatcatgtaattaaggaggggtggggcgagagagtatctttataagccaaaccctcaatgaagtcactcggcatgccatatgggtagagcaaaataacaagctagtgaagcatgccctgctcatccaactttagcttctttacccctgtcagctcttaataggatgccttgccaagtttcacccctctctttcccatagcagcaggaagatcctacatagactcaatagacagaacataatagagaatagaacattgttattaaaacgtcgcttaaacgtcgtttaagcgttaaaacgtgattagcagttggaacgtccaagcgttttaggtaagccgcgtagaacgtccgtttcgagcgtttaagcgtcgcttaagcgtcctaatcgtgttttaggacgttttatgcgtgctgaggacgttctacccgttctgggcctttcctgggcctttaggttttctctaggtgttgg

SEQ ID NO: 4764 - DNA, 2806 bp, Zea Mays
cgctgtcgtccctgccctgcatcgcaacttgctcacaggacacagccgataagcagcggccaaaacagaaagcgcgatttgtttgatcgcttcctcctccactaccactagctagcctgccgccgtccgccgtgcagtgtgcgagctccgcccgccggtgccggaggcagaggaggaagatgcaggtgctgccgaggaagaggaggcgctccgggtcctggcttctagacgttgtgaaccagatcttggtgcggttgcccgagtagtttactcgtctagaggaggggtttggttctcgacccgattcggtgggggcttcgccactgggatagggggacagtttggcctgctggatctttatcgccagttgttggttctgtcctttccattgggctggtactttcttgacggattggttaagcgctgtctgtggggttgttgtgctgctcctcccttcatctcgttttgtggtgattggtggggggaggaggaagagctaggaggattctctctcttgttcttgggtcagttcttggcacggcaggatgaagtatatgaagcttggatcaaagccggatgtccttcagacggaggggagcaatatcaggtttgtcgcgacagatttggcaacagacgttgttatattgattggggatgtcaagttttaccttcacaagttccctcttctatcaaagagttcacgcctgcaaagattagttgcttcaatcaatgaggagaaaaatgacgaagtggatatctctgacatccctggtgggccttcagcatttgaaatatgtgctaagttctgctatggcatgattgtgacactcaatgcgtataatgtcctcgccgcccggtgcgcagccgagtacctagagatgttcgagaccattgacaaaggaaacctcatatacaagatcgatgtgtttctgacatcaagtgtgttccgcacctggaaggactcgatcatagttctacagagcacaaggtcactggtaccttggtgtgaggatttgaaagtgatcagccactgcatcgactctatcgcgtcgaaggcgtcgattgatccatcagaggttgagtggtcatacacttacaacagaaagaaactcccgtctgagaacggtatcgattcgcattggaatggtgtcaggatgcaacctatggtccctactgactggtgggtagaggacctctgtgagcttgaagtggactcgtacaagcgggtgatcatgagcatcaaggcaaagggaagcacgccagctgttgtcgtcggagaagcattgagggcctacgcgtaccgacggctgcttggctccctggaagacgctgtgagcaatggagttgattgcgcaaagcctcgtgcagttcttgacgctattgtatctctcttgcccgctgaggaaggctcggtgtcatgtggttttcttcttaagctgctgggagctgcatgtttgctggaatctgcatagatctggtcatggcaatagtggaggaatttcatgtcgttacagaatagcgacagtggcaaggagaaatttcaagatgatgaagagatcgtggagactgagaaacgtggcatcggtttccagcacgtcaaagctgggcagttgcaaagctgatcgatggatatcttgctgaggttgccaaaggatcccaaccttcctcttccgaagctgaccgcgcttgctgaaatgggtgtcttccctaccccggccaacgcatgacggcctctaccgtgccattgacatgtatctgaaggagcaccccagcctgtcgaagagcgagaagaagaaactatgcgggctgatggactgcaagcagctgtcgcacgatgcgtgcatgcacgccgtgcagaacgagcgtctccccttgcgtgtggtcgtgcaggttctcttcttcgagcaggtccgggcgtctgtcgcctctgcgaggagtgacccttcttcagctgagcttccatctgccgttcgctcgcttcttcccagagagaacggtaactctgttggcagctccaggtcagctgccacgacgacaacggaggaggacggatgtggggtcccgacgtcgagtgacgtcaactcgttgaggtcaacaaggctcgccaacaacagcggcggaagcgagaggagcagtggcagcagcgacatcaacaggagcgccgcggggaggggggcaagggggattctgatgccgaagaagatgctgagcaagctctggtctgggaaaacgaacgccggtgagaacagcagctcagacacgtcgcagagccctgggtccgtcaacaacccggaggaggtgaagtccacgcagtcaaggatcacaaggcgctcggtatcctagtcgcggaggggtaaccgcggtcacagcctagttttgttcttgctcttgatttttgccttcactggagagtagtggcaatctaaaaaatgtggagttactggagtaggtttggtcattgatgatgttttcagccatgttccatgggaactttttacatacaaagaaagtataggttgttataattgatgtatttttgctggcaaaatcatagtgttttagtttgctttttacggccaccggccaagcccggcacgattaatttcaagggctgaagacagagtgaagtaaatgctttatgatgtgattggatttgttagagcaactataaagagactctctctagcctttctaattgttaagaataaaaatattggtaaaagaatatactttagtaactttttaaatggttatctaaatatagtcatctttagttctgaatttgtcgctagtcaaaaataaaaaa

SEQ ID NO: 4765 - DNA, 2373 bp, Zea Mays
cgctgtcgtccctgccctgcatcgcaacttgctcacaggacacagccgataagcagcggccaaaacagaaagcgcgatttgtttgatcgcttcctcctccactaccactagctagcctgccgccgtccgccgtgcagtgtgcgagctccgcccgccggtgccggaggcagaggaggaaggtttgtcgcgacagatttggcaacagacgttgttatattgattggggatgtcaagttttaccttcacaagttccctcttctatcaaagagttcacgcctgcaaagattagttgcttcaatcaatgaggagaaaaatgacgaagtggatatctctgacatccctggtgggccttcagcatttgaaatatgtgctaagttctgctatggcatgattgtgacactcaatgcgtataatgtcctcgccgcccggtgcgcagccgagtacctagagatgttcgagaccattgacaaaggaaacctcatatacaagatcgatgtgtttctgacatcaagtgtgttccgcacctggaaggactcgatcatagttctacagagcacaaggtcactggtaccttggtgtgaggatttgaaagtgatcagccactgcatcgactctatcgcgtcgaaggcgtcgattgatccatcagaggttgagtggtcatacacttacaacagaaagaaactcccgtctgagaacggtatcgattcgcattggaatggtgtcaggatgcaacctatggtccctactgactggtgggtagaggacctctgtgagcttgaagtggactcgtacaagcgggtgatcatgagcatcaaggcaaagggaagcacgccagctgttgtcgtcggagaagcattgagggcctacgcgtaccgacggctgcttggctccctggaagacgctgtgagcaatggagttgattgcgcaaagcctcgtgcagttcttgacgctattgtatctctcttgcccgctgaggaaggctcggtgtcatgtggttttcttcttaagctgctgggagctgcatgtttgctggaatctgatctggtcatggcaatagtggaggaatttcatgtcgttacagaatagcgacagtggcaaggagaaatttcaagatgatgaagagatcgtggagactgagaaacgtggcatcggtttccagcacgtcaaagctgggcagttgcaaagctgatcgatggatatcttgctgaggttgccaaaggatcccaaccttcctcttccgaagctgaccgcgcttgctgaaatgggtgtcttccctaccccggccaacgcatgacggcctctaccgtgccattgacatgtatctgaaggagcaccccagcctgtcgaagagcgagaagaagaaactatgcgggctgatggactgcaagcagctgtcgcacgatgcgtgcatgcacgccgtgcagaacgagcgtctccccttgcgtgtggtcgtgcaggttctcttcttcgagcaggtccgggcgtctgtcgcctctgcgaggagtgacccttcttcagctgagcttccatctgccgttcgctcgcttcttcccagagagaacggtaactctgttggcagctccaggtcagctgccacgacgacaacggaggaggacggatgtggggtcccgacgtcgagtgacgtcaactcgttgaggtcaacaaggctcgccaacaacagcggcggaagcgagaggagcagtggcagcagcgacatcaacaggagcgccgcggggaggggggcaagggggattctgatgccgaagaagatgctgagcaagctctggtctgggaaaacgaacgccggtgagaacagcagctcagacacgtcgcagagccctgggtccgtcaacaacccggaggaggtgaagtccacgcagtcaaggatcacaaggcgctcggtatcctagtcgcggaggggtaaccgcggtcacagcctagttttgttcttgctcttgatttttgccttcactggagagtagtggcaatctaaaaaatgtggagttactggagtaggtttggtcattgatgatgttttcagccatgttccatgggaactttttacatacaaagaaagtataggttgttataattgatgtatttttgctggcaaaatcatagtgttttagtttgctttttacggccaccggccaagcccggcacgattaatttcaagggctgaagacagagtgaagtaaatgctttatgatgtgattggatttgttagagcaactataaagagactctctctagcctttctaattgttaagaataaaaatattggtaaaagaatatactttagtaactttttaaatggttatctaaatatagtcatctttagttctgaatttgtcgctagtcaaaaataaaaaa

SEQ ID NO: 4766 - DNA, 1886 bp, Zea Mays
aaggcccagtttggcaattggagccctaaagcctgcagagtccccccctctcccagtccggtactccccaagtccccatcgggcatcggcgctgccacgccacggccgacgcttgagacgctccccgccgcctgccaggccgccaccgcgcgtgacttcgcctcatcctctccggagatggacttccaggtcgtcgtcctcgccggaggcacctccgagaaactctcgcccctcgtttccaaggacgttcccaaggcgttgctcccggtcgccaatcgccccgtactctcttacgcgctggacctccttgaggccagcgacctcaaggacctcatcgtggtggttgaggggcaggaggcagcgcagcttgtcgacgcttgggtatccagtgcgtacctggatcggcttcgagtggaggtagttgtggtttctgaagaccttggaagtgctggtgcattacgagctatttcaaagcgactgatggcaaacgatattttggtagttagcggtgacctggtaacagatgtgttgcctggggctgttgctgctactcatagaagaaatggtgctgctgttactgctttactatgttctgttcctgtcagtggtccttcagacacttcttcttctagtgggaaagataaagctaaaaagccaaatcgtttgaacatagtaggactggacaggagtaaacaattcttgttacatattgtgtcaggaactgatgttgaaaaagatattcaagttcataaaagaaaaatacaggctgttggtcagatggaaattcgaagtgacctaatggatgcacatctttatgcttttaagaggacaatattacaggacgtactggaacaaaaggaagcataccgtagcattagacttgaagtcctcccgtatttagttaggagtcaattgagatcaactccatcaggtggcagtggaacatcagttgacgaaattgagagtagtgcctttcagtccagtggtaatttgcagtgtttgtcgcagcatcgggtcattgcaccatctgctttcaagcaggatgtattatcaagatcaagtggtggacataggtgctgtgcttatattgctagtaaaagcaaatactgtcaccgcttgaactcaatccagtcatattgtgatatcaatcgagatgttataggggaagttagccacctgtctggttattcgttttctgcacaaaacaatattatccacccatcctctgttcttggatcaaagactacagaccacactgtattcttgctgagggttcacagcttggtgacaagtgtagtgtgaagcgatctgtgattggtcgtcattgccgaattggttccaatgtaaagatcgtcaactctgttgtgatgaatcatgttgttattgaagatggttgccacatccaaggttctgttgtatgtaataatgttcaactgcaagaacgggcagttctgaaagattgccaggttggagctggttatattgtgactgctggcagcgagcacaaagcagaatccctagcaagaaagtacagtgagctttgactggtttgttagatcctgaatgttttttttttgtgttcacttgagatgcaccccctcagaaaaaagggtagcagttgtccaaattttataaaatgtcattatgtacaacagcacagttcagtgcgaaaggtttggttgcttatctttcctaccaggcggcttgttagagcgaaaggtttggtcgcctatctatcctaccagctgcttgagcaagttgcatgctgtctgaggacgatgggttgatagttggggcatgtagttgggacctactattgtcggaaattctggattcggtttctcttccgccttgtgtttttgtgaggccaggtgattgcctcttat

SEQ ID NO: 4767 - DNA, 1741 bp, Zea Mays
aaggcccagtttggcaattggagccctaaagcctgcagagtccccccctctcccagtccggtactccccaagtccccatcgggcatcggcgctgccacgccacggccgacgcttgagacgctccccgccgcctgccaggccgccaccgcgcgtgacttcgcctcatcctctccggagatggacttccaggtcgtcgtcctcgccggaggcagcgcagcttgtcgacgcttgggtatccagtgcgtacctggatcggcttcgagtggaggtagttgtggtttctgaagaccttggaagtgctggtgcattacgagctatttcaaagcgactgatggcaaacgatattttggtagttagcggtgacctggtaacagatgtgttgcctggggctgttgctgctactcatagaagaaatggtgctgctgttactgctttactatgttctgttcctgtcagtggtccttcagacacttcttcttctagtgggaaagataaagctaaaaagccaaatcgtttgaacatagtaggactggacaggagtaaacaattcttgttacatattgtgtcaggaactgatgttgaaaaagatattcaagttcataaaagaaaaatacaggctgttggtcagatggaaattcgaagtgacctaatggatgcacatctttatgcttttaagaggacaatattacaggacgtactggaacaaaaggaagcataccgtagcattagacttgaagtcctcccgtatttagttaggagtcaattgagatcaactccatcaggtggcagtggaacatcagttgacgaaattgagagtagtgcctttcagtccagtggtaatttgcagtgtttgtcgcagcatcgggtcattgcaccatctgctttcaagcaggatgtattatcaagatcaagtggtggacataggtgctgtgcttatattgctagtaaaagcaaatactgtcaccgcttgaactcaatccagtcatattgtgatatcaatcgagatgttataggggaagttagccacctgtctggttattcgttttctgcacaaaacaatattatccacccatcctctgttcttggatcaaagactacaataggaccacactgtattcttgctgagggttcacagcttggtgacaagtgtagtgtgaagcgatctgtgattggtcgtcattgccgaattggttccaatgtaaagatcgtcaactctgttgtgatgaatcatgttgttattgaagatggttgccacatccaaggttctgttgtatgtaataatgttcaactgcaagaacgggcagttctgaaagattgccaggttggagctggttatattgtgactgctggcagcgagcacaaagcagaatccctagcaagaaagtacagtgagctttgactggtttgttagatcctgaatgttttttttttgtgttcacttgagatgcaccccctcagaaaaaagggtagcagttgtccaaattttataaaatgtcattatgtacaacagcacagttcagtgcgaaaggtttggttgcttatctttcctaccaggcggcttgttagagcgaaaggtttggtcgcctatctatcctaccagctgcttgagcaagttgcatgctgtctgaggacgatgggttgatagttggggcatgtagttgggacctactattgtcggaaattctggattcggtttctcttccgccttgtgtttttgtgaggccaggtgattgcctcttat

SEQ ID NO: 4768 - DNA, 1874 bp, Zea Mays
aaggcccagtttggcaattggagccctaaagcctgcagagtccccccctctcccagtccggtactccccaagtccccatcgggcatcggcgctgccacgccacggccgacgcttgagacgctccccgccgcctgccaggccgccaccgcgcgtgacttcgcctcatcctctccggagatggacttccaggtcgtcgtcctcgccggaggcacctccgagaaactctcgcccctcgtttccaaggacgttcccaaggcgttgctcccggtcgccaatcgccccgtactctcttacgcgctggacctccttgaggccagcgacctcaaggacctcatcgtggtggttgaggggcaggaggcagcgcagcttgtcgacgcttgggtatccagtgcgtacctggatcggcttcgagtggaggtagttgtggtttctgaagaccttggaagtgctggtgcattacgagctatttcaaagcgactgatggcaaacgatattttggtagttagcggtgacctggtaacagatgtgttgcctggggctgttgctgctactcatagaagaaatggtgctgctgttactgctttactatgttctgttcctgtcagtggtccttcagacacttcttcttctagtgggaaagataaagctaaaaagccaaatcgtttgaacatagtaggactggacaggagtaaacaattcttgttacatattgtgtcaggaactgatgttgaaaaagatattcaagttcataaaagaaaaatacaggctgttggtcagatggaaattcgaagtgacctaatggatgcacatctttatgcttttaagaggacaatattacaggacgtactggaacaaaaggaagcataccgtagcattagacttgaagtcctcccgtatttagttaggagtcaattggtggcagtggaacatcagttgacgaaattgagagtagtgcctttcagtccagtggtaatttgcagtgtttgtcgcagcatcgggtcattgcaccatctgctttcaagcaggatgtattatcaagatcaagtggtggacataggtgctgtgcttatattgctagtaaaagcaaatactgtcaccgcttgaactcaatccagtcatattgtgatatcaatcgagatgttataggggaagttagccacctgtctggttattcgttttctgcacaaaacaatattatccacccatcctctgttcttggatcaaagactacaataggaccacactgtattcttgctgagggttcacagcttggtgacaagtgtagtgtgaagcgatctgtgattggtcgtcattgccgaattggttccaatgtaaagatcgtcaactctgttgtgatgaatcatgttgttattgaagatggttgccacatccaaggttctgttgtatgtaataatgttcaactgcaagaacgggcagttctgaaagattgccaggttggagctggttatattgtgactgctggcagcgagcacaaagcagaatccctagcaagaaagtacagtgagctttgactggtttgttagatcctgaatgttttttttttgtgttcacttgagatgcaccccctcagaaaaaagggtagcagttgtccaaattttataaaatgtcattatgtacaacagcacagttcagtgcgaaaggtttggttgcttatctttcctaccaggcggcttgttagagcgaaaggtttggtcgcctatctatcctaccagctgcttgagcaagttgcatgctgtctgaggacgatgggttgatagttggggcatgtagttgggacctactattgtcggaaattctggattcggtttctcttccgccttgtgtttttgtgaggccaggtgattgcctcttat

SEQ ID NO: 4769 - DNA, 1886 bp, Zea Mays
aaggcccagtttggcaattggagccctaaagcctgcagagtccccccctctcccagtccggtactccccaagtccccatcgggcatcggcgctgccacgccacggccgacgcttgagacgctccccgccgcctgccaggccgccaccgcgcgtgacttcgcctcatcctctccggagatggacttccaggtcgtcgtcctcgccggaggcacctccgagaaactctcgcccctcgtttccaaggacgttcccaaggcgttgctcccggtcgccaatcgccccgtactctcttacgcgctggacctccttgaggccagcgacctcaaggacctcatcgtggtggttgaggggcaggaggcagcgcagcttgtcgacgcttgggtatccagtgcgtacctggatcggcttcgagtggaggtagttgtggtttctgaagaccttggaagtgctggtgcattacgagctatttcaaagcgactgatggcaaacgatattttgttagcggtgacctggtaacagatgtgttgcctggggctgttgctgctactcatagaagaaatggtgctgctgttactgctttactatgttctgttcctgtcagtggtccttcagacacttcttcttctagtgggaaagataaagctaaaaagccaaatcgtttgaacatagtaggactggacaggagtaaacaattcttgttacatattgtgtcaggaactgatgttgaaaaagatattcaagttcataaaagaaaaatacaggctgttggtcagatggaaattcgaagtgacctaatggatgcacatctttatgcttttaagaggacaatattacaggacgtactggaacaaaaggaagcataccgtagcattagacttgaagtcctcccgtatttagttaggagtcaattgagatcaactccatcaggtggcagtggaacatcagttgacgaaattgagagtagtgcctttcagtccagtggtaatttgcagtgtttgtcgcagcatcgggtcattgcaccatctgctttcaagcaggatgtattatcaagatcaagtggtggacataggtgctgtgcttatattgctagtaaaagcaaatactgtcaccgcttgaactcaatccagtcatattgtgatatcaatcgagatgttataggggaagttagccacctgtctggttattcgttttctgcacaaaacaatattatccacccatcctctgttcttggatcaaagactacaataggaccacactgtattcttgctgagggttcacagcttggtgacaagtgtagtgtgaagcgatctgtgattggtcgtcattgccgaattggttccaatgtaaagatcgtcaactctgttgtgatgaatcatgttgttattgaagatggttgccacatccaaggttctgttgtatgtaataatgttcaactgcaagaacgggcagttctgaaagattgccaggttggagctggttatattgtgactgctggcagcgagcacaaagcagaatccctagcaagaaagtacagtgagctttgactggtttgttagatcctgaatgttttttttttgtgttcacttgagatgcaccccctcagaaaaaagggtagcagttgtccaaattttataaaatgtcattatgtacaacagcacagttcagtgcgaaaggtttggttgcttatctttcctaccaggcggcttgttagagcgaaaggtttggtcgcctatctatcctaccagctgcttgagcaagttgcatgctgtctgaggacgatgggttgatagttggggcatgtagttgggacctactattgtcggaaattctggattcggtttctcttccgccttgtgtttttgtgaggccaggtgattgcctcttat

SEQ ID NO: 4770 - DNA, 2137 bp, Zea Mays
gttgttgcgaaacggtgccgcttcgagccaggtgcgggagggaccgagggaggcggagcaagtgggagctctggagctggagcgggtggaagtgggctgggactgggagccctagcaaagggccatcgcatcccctcttgcatactctctctctctctctcgtgattctcccgtgccccggtctctctgtctctagtggcgacgactgcgctgcgccgccgccctacgcaggtgcccaagtgtctatcttcgggactgcgccggcgacgagcacccaccagaaattgttggacctgggtctgcccctggactcgagcttggggccaagctaattcgagctctgagcatttgatttctagcatcttacatgcaaaaagctagtacttggaatccgagcaagatctaacccagacagtgcagtggcagttcagcgcagcatatcaagattgtctctgttaatttgtgtatgagatcagttaactgataaggatatgtaaagaaccaatgatcagtaatttttacactccagattgtagtatcctctaagatggacggaagagaatcagtcttatggtaaatcctggtgaatattcatgggaggtcagcaagttctggcctgactaagtctggtaaaaaaagttgcttcatctcagatcatcaatggtgagaatgaggttcccgaaacgttatctcatagtattgctgacattcatctgcacaaatgtttgctacattgagcgcgtgggtttctcgattgcttacactgttgcagccgatgccattggtgtgaatcaggccaacaagggcatgatactctctatgttctattatggttatgttttatcacagattcctggtggatgggcagcacagagaataggaggcagacgtgttctgctactgtcatttgtattgtggtctatgatatgtggtttaatcccactcgaccccaacagagtaaccattctggtcctttctcgcctatttgtcggtgtagcacaaggtttcatattccctgccattcacactgttctggcgcagtgggtgccaccgcaggagcgctctcgctcggtatctctcactacctcggggatgtatcttggtgcagctggtggcatgcttttcttcccaagtctggtgaagcacacgggaccccagtcagttttctttgtcgaagcagtgctgggagtagcatggtctgtcatatggttgaaattttccagcgacccacctcgtaccgatcttccaaaggtatcgatgccgaaagtggcatctcgggacatgattaaggcacaagcaggaggggttgttgcacctcgcacagtaaagatcccgtggcgaaggataatattcagtctacctgtttgggcaatcgttgtaaacaacttcaccttccactatgccctgtatgttcttatgaactggctccctacctattttgagcttggcctcaagcttagcctccaggacatgggttcctcaaagatgctcccttatttcaacatgttcattttctccaacatcggtggtgtgatcgccgatcacttgattacaaggaggattctgtctgttaccaagacgaggaagcttctgaacaccatcggattcatcgtctcagcatttgcactcatggcccttcctttattcagcacaccctcaggcactgtaacgtgttcggcgatatccctcggttttcttgccctgggaagagcagggtttgccgtaaaccacatggatgttgctccgaagtttgcagggatagtgatgggcgtctctaacacggcggggacactggctgggattattggcgtcggcctcactggtaatatcctggaggcggcgaaggcttctaacaaggatctaacagactcggaaacctggaaaacagtcttctttgttccggcatacctttgtatcttcagctctgtcatttttttaatcttttcgactggcgaaaagatattcgagtagatggtgattatattttttgtttctcatttacagtgaggcaggatagcagaacgggaatctcacatgtacccgtagcatttgttacaaaatttcatactgtatcatacacatgatctaaagctatgtcaggaaatctcacatttttcattatgaggactcatctcat

SEQ ID NO: 4771 - DNA, 1961 bp, Zea Mays
gttgttgcgaaacggtgccgcttcgagccaggtgcgggagggaccgagggaggcggagcaagtgggagctctggagctggagcgggtggaagtgggctgggactgggagccctagcaaagggccatcgcatcccctcttgcatactctctctctctctctcgtgattctcccgtgccccggtctctctgtctctagtggcgacgactgcgctgcgccgccgccctacgcaggtgcccaagtgtctatcttcgggactgcgccggcgacgagcacccaccagaaattgttggacctgggtctgcccctggactcgagcttggggccaagctaattcgagctctgagcatttgatttctagcatcttacatgcaaaaagctagtacttggaatccgagcaagatctaacccagacagtgcagtggcaggtcttttcagttcagcgcagcatatcaagattgtctctgttaatttgtgtatgagatcagttaactgataaggatatgtaaagaaccaatgatcagtaatttttacactccagattgtagtatcctctaagatggacggaagagaatcagtcttatggtaaatcctggtgaatattcatgggaggtcagcaagttctggcctgactaagtctggtaaaaaaagttgcttcatctcagatcatcaatgattcctggtggatgggcagcacagagaataggaggcagacgtgttctgctactgtcatttgtattgtggtctatgatatgtggtttaatcccactcgaccccaacagagtaaccattctggtcctttctcgcctatttgtcggtgtagcacaaggtttcatattccctgccattcacactgttctggcgcagtgggtgccaccgcaggagcgctctcgctcggtatctctcactacctcggggatgtatcttggtgcagctggtggcatgcttttcttcccaagtctggtgaagcacacgggaccccagtcagttttctttgtcgaagcagtgctgggagtagcatggtctgtcatatggttgaaattttccagcgacccacctcgtaccgatcttccaaaggtatcgatgccgaaagtggcatctcgggacatgattaaggcacaagcaggaggggttgttgcacctcgcacagtaaagatcccgtggcgaaggataatattcagtctacctgtttgggcaatcgttgtaaacaacttcaccttccactatgccctgtatgttcttatgaactggctccctacctattttgagcttggcctcaagcttagcctccaggacatgggttcctcaaagatgctcccttatttcaacatgttcattttctccaacatcggtggtgtgatcgccgatcacttgattacaaggaggattctgtctgttaccaagacgaggaagcttctgaacaccatcggattcatcgtctcagcatttgcactcatggcccttcctttattcagcacaccctcaggcactgtaacgtgttcggcgatatccctcggttttcttgccctgggaagagcagggtttgccgtaaaccacatggatgttgctccgaagtttgcagggatagtgatgggcgtctctaacacggcggggacactggctgggattattggcgtcggcctcactggtaatatcctggaggcggcgaaggcttctaacaaggatctaacagactcggaaacctggaaaacagtcttctttgttccggcatacctttgtatcttcagctctgtcatttttttaatcttttcgactggcgaaaagatattcgagtagatggtgattatattttttgtttctcatttacagtgaggcaggatagcagaacgggaatctcacatgtacccgtagcatttgttacaaaatttcatactgtatcatacacatgatctaaagctatgtcaggaaatctcacatttttcattatgaggactcatctcat

SEQ ID NO: 4772 - DNA, 2034 bp, Zea Mays
gttgttgcgaaacggtgccgcttcgagccaggtgcgggagggaccgagggaggcggagcaagtgggagctctggagctggagcgggtggaagtgggctgggactgggagccctagcaaagggccatcgcatcccctcttgcatactctctctctctctctcgtgattctcccgtgccccggtctctctgtctctagtggcgacgactgcgctgcgccgccgccctacgcaggtgcccaagtgtctatcttcgggactgcgccggcgacgagcacccaccagaaattgttggacctgggtctgcccctggactcgagcttggggccaagctaattcgagctctgagcatttgatttctagcatcttacatgcaaaaagctagtacttggaatccgagcaagatctaacccagacagtgcagtggcagattgtagtatcctctaagatggacggaagagaatcagtcttatggtaaatcctggtgaatattcatgggaggtcagcaagttctggcctgactaagtctggtaaaaaaagttgcttcatctcagatcatcaatggtgagaatgaggttcccgaaacgttatctcatagtattgctgacattcatctgcacaaatgtttgctacattgagcgcgtgggtttctcgattgcttacactgttgcagccgatgccattggtgtgaatcaggccaacaagggcatgatactctctatgttctattatggttatgttttatcacagattcctggtggatgggcagcacagagaataggaggcagacgtgttctgctactgtcatttgtattgtggtctatgatatgtggtttaatcccactcgaccccaacagagtaaccattctggtcctttctcgcctatttgtcggtgtagcacaaggtttcatattccctgccattcacactgttctggcgcagtgggtgccaccgcaggagcgctctcgctcggtatctctcactacctcggggatgtatcttggtgcagctggtggcatgcttttcttcccaagtctggtgaagcacacgggaccccagtcagttttctttgtcgaagcagtgctgggagtagcatggtctgtcatatggttgaaattttccagcgacccacctcgtaccgatcttccaaaggtatcgatgccgaaagtggcatctcgggacatgattaaggcacaagcaggaggggttgttgcacctcgcacagtaaagatcccgtggcgaaggataatattcagtctacctgtttgggcaatcgttgtaaacaacttcaccttccactatgccctgtatgttcttatgaactggctccctacctattttgagcttggcctcaagcttagcctccaggacatgggttcctcaaagatgctcccttatttcaacatgttcattttctccaacatcggtggtgtgatcgccgatcacttgattacaaggaggattctgtctgttaccaagacgaggaagcttctgaacaccatcggattcatcgtctcagcatttgcactcatggcccttcctttattcagcacaccctcaggcactgtaacgtgttcggcgatatccctcggttttcttgccctgggaagagcagggtttgccgtaaaccacatggatgttgctccgaagtttgcagggatagtgatgggcgtctctaacacggcggggacactggctgggattattggcgtcggcctcactggtaatatcctggaggcggcgaaggcttctaacaaggatctaacagactcggaaacctggaaaacagtcttctttgttccggcatacctttgtatcttcagctctgtcatttttttaatcttttcgactggcgaaaagatattcgagtagatggtgattatattttttgtttctcatttacagtgaggcaggatagcagaacgggaatctcacatgtacccgtagcatttgttacaaaatttcatactgtatcatacacatgatctaaagctatgtcaggaaatctcacatttttcattatgaggactcatctcat

SEQ ID NO: 4773 - DNA, 1545 bp, Zea Mays
agcctccagctagcttcgtctatataagcaaccagccatcagccttccttctctcctagctagctactagtacctgtcctgctgtccttcacatacatctatccatcggtttctcagctgctgctgcatacacacctcggccgccgccatcgtcgtcgcctagctagctctgctcctgggtcgtgcgcctccatcgccgagctagcgagcaacggcgtgccgatcgatcgatcgacagagcggggcagatcgatgagctgcaacggctgccgcgtcctgcgcaagggctgcagcgacgcctgcgtgctccgccccagcatcgactggatccacggcgcgcagccgcaggccaacgccaccgtcttcgtcgccaagttcttcggccgcgccggcctcgtcgcctccctcgccgcagtcccgctgcaccaccgcccagccctcttccggtccctgctgtacgaggcctgcgggcggaccatcaacccggtgagcggcgccatcgggctcatgtggacgggcaactgggacctgtgccaggccgccgcggacgccgtgctccgcggcgagtcgctgcgcgcgctctccgccgtccccgccgcgttcacggaccgcgacatggacgggctctacggcagcgtcggcggcctggtcgccgccgccgccgccgccgcgtcgcccgagaactcctcctcctccgcgccgtccacaacgaagcgcaggaacgcgaacggcggctccagcaacaacgccgtccctgcggccgcggcctctcaccaccgcccgccgccgccggctgctgccgctgctgggctgctgctgcagtcgtcgtgccaccagctcgacctctgcctgacgccagcgctgtcgccgccgggcgccgggccgcggggctgcgccgccggcgcgtccgacgagtactcggccacgaccacgtgcgaggaccagaccggtgatcacggacacggagagcccaggcctcccccgccgctgctaaacctcttcaactgaactgactgactgacgggtgactgtgcagagagcgagggttcttcaggggcagggtgtacgtgtggtaattaagtaaagaagaaacccgtcaattagcgctgttaataggatggatttttttttatattttcggaggcgatcccatgattcgaattcgaacaccaagttataatttctgtgttttagctaaatgcaattttcagaagatgaaaaaaaaacgataaagaaatccacaataatatgaaacgataaatgatctggacgcaacatttgtctctagtctagtctagttaagacacacgtacgctaaaaaaaacataaggagaccaggtcaaccaatcacctcatggcgattgatatcgttctgatattgctgggctgtttgttcgttcttctcgcctaccgatggtgatgcaaaaccagacatggtgaccgtgcaggattcgctatacaggatatatatatttgtccgatactgttgggctatttgttttttttgtcgtgtacatttgatgatggagaaaacatacttggtgg

SEQ ID NO: 4774 - DNA, 3451 bp, Zea Mays
gtccactcttcctctacccccatcacccccaatcccagccgccgtctctcctaaatcaagcaaggagatatgtagatcaaccggatggtgaaggatccgggcggtggcagactaggtgtggcctgcagcggagacggggaggagctccttcactgctgtgcggacgagcgctaaccccgcgtggtaaaccctaaccgactcacacacttcttctctcccccgcgtggtggtcccttgaggacgagggcacggcgtggacggagtgctgcccgtatttccccccaacgatttggcggtgatgacgatctcaaaacggtttggaggcttcacgactctgtgtgagtggaagaagaaagcaaactgaactactgcaccttagcttcccgatgcggtttgttgctaccgaggaaagctttgcatatcctatttataagcaaaagctaatcgagatgagtcacacatactacacaaatatattcaaacgtgctagatggcctgatgctccacagcagtatcctggaaacacccatctatgatgaatggaagaataatttcccagaccaggaaacagaggaagatcaacccttcataggccactctatcgtccatgttgtggttagaattttagatatgggaactagctggcttgcccgcactgcgatgacatgttatgcgctttctccaatggctaaggtatgcaccctcctccctttggatcatatctgtggtgtttctacctatgcagtgtctcccctttgatgcgaatttaatgcatactttagaccagcatgactattggtttgataaaagcttgcaatcatcaagttttgaaatacatttttgttttagtggtactaattgataaactataaatttcagaagtaacgtttcttccttacatatgttgctctgatcagtgatggccagggacatacatgtgtattcttgctgcaaaaaataaaaaattgctatagtctatgagttggttcttagccttctactcgaagaggtgagtaaatgcaaatcttttttaaatgattgtttattatcctccaatcatgatctcctctatgtgttgcgaaagttggagcagatgatgaatgttttgattcaaatattaaggtagaaaaatgtttcaatggcaaataagacaccactttaatttctgaaggcaattaaggaaacaggaacttttgtagtatatcctaaaaacctgccggttacaatcaagttacctcaactgagaacagacgcaagcatcacctgcatccaagtgcactaaacccctagctcccctctaactgataaggtagttagattaaaggtacatgttcagctggcatagccttaccctttcattttttatgttaaagtgctaagaactgaatttatgcttcgaagccaaggattataattctggtacattgaggttgagcattcaagtcaacattcatgcttcttgggcttcggcagcagcgcaacatgcatacatgtttcaggaagtctcatcaggcacaaaagcaagtctaaaattctgatataggtttaataaatgtatgaataacttgatccttccatctattcttcttttctttctttctctgcaaccatgcctaagcaaactttttcataagagaaaagaagttttacaacaaatggtattattaagccaaggcttctgtaatctaggattttggtttctttaactatttttttctcaaacactaatgctggaagtaagtatgattgtattaaagccttgtcatgactgtttaaaagttgttgcagtgtagaatcagtgaaagtatggacatagcagaataattcatatgtttcaactcttttgcctgttgaactgtttgacttagccaaaaagatacatcactcagctcggaaagccaatcctttcagctcatactcatgaattgtgataccccaattttctgaaaagaagttaaatttctttttctcttttctttcatgttctgtggcattggggtttggagtttcaagaggcattcctcaggaaacagtagatcttttggcattttttccgctagggtcgggagctcaaatgggagagcgagtttgggccattgatctcgatctgatggatgggagcctcctctcctccccaaccctagccgaccccctctccttctccctaatggttgcagctacccccaccctttccacccctttggccgccgccccctccctctcttccccattggcagccgccccctaccctctccatggcttcctcctcgctctaggtctcccccacgcagcaaggatcaagaagaggaggagcatgttgaattgaagatgaagagaggatcaaggagatgttctaccccatctcttcttgcagatcttcttggggaaaccctaggtggctacactctggatcattcctagtacacttttcttcttcgataaaggcaagtgaatgtagcggtggttgctaccgttttgacttgttgtttttttatcgcctacactttaatattcagaattatggaattctttcataattgaactctatggtgatgctttacttgcttgtattatactaatgctcaaccatatattgatgatgattatgattcgagtatgacccaggagattaattcacacccctgaaggtaaacaaaatattatttgaggtttgtattgtatgtgaaggaagtgaagtatattgttaaatgcagcatgccatatacattgcatgattcacttgcatctgaaatttgtcgtgacctaatgtctgactgtaccggtacaacttagcatcgtacgttgcccgaggaggggtacgatgcggcttcatacccttagaggtatgaaggcagaggacatatgcattgcattcatatgcattcttgaagtgatatttgcagaggacatggttttatactctcataggtacgaaggcagaggacctacatattgcattcctatgcatacattgaagttatatttgcaggtattgttgaagcagggaagtgttatacaacctattgtggttgttcgaagaaatgagatggtattgcggttattgggactattgagttctatatctacacgtattttggatcttaattgtgatttctttaaaatgttgattaattcaatttgtggtttaaatatctcgtcaaaacaatttgcttgctgagatgtttcatctcactcttgcattactcagtgcaggtgcttgatgctcgtcaaggggagtgggaagtagcggcacgttgcacacactgtttaaagaaccaaataattagctttggttattgacttttgaagttcatattttgaaatatgatgtaggcataagctggttcattcatggttaatcatctttgatgagaattatatcatattagtatgattcattttgtattgatatatctcttttgcttctgcgatgcttataattacaaaggag

SEQ ID NO: 4775 - DNA, 3687 bp, Zea Mays
gtccactcttcctctacccccatcacccccaatcccagccgccgtctctcctaaatcaagcaaggagatatgtagatcaaccggatggtgaaggatccgggcggtggcagactaggtgtggcctgcagcggagacggggaggagctccttcactgctgtgcggacgagcgctaaccccgcgtggtaaaccctaaccgactcacacacttcttctctcccccgcgtggtggtcccttgaggacgagggcacggcgtggacggagtgctgcccgtatttccccccaacgatttggcggtgatgacgatctcaaaacggtttggaggcttcacgactctgtgtgagtggaagaagaaagcaaactgaactactgcaccttagcttcccgatgcggtttgttgctaccgaggaaagctttgcatatcctatttataagcaaaagctaatcgagatgagtcacacatactacacaaatatattcaaacgtgctagatggcctgatgctccacagcagtatcctggaaacacccatctatgatgaatggaagaataatttcccagaccaggaaacagaggaagatcaacccttcataggccactctatcgtccatgttgtggttagaattttagatatgggaactagctggcttgcccgcactgcgatgacatgttatgcgctttctccaatggctaaggtatgcaccctcctccctttggatcatatctgtggtgtttctacctatgcagtgtctcccctttgatgcgaatttaatgcatactttagaccagcatgactattggtttgataaaagcttgcaatcatcaagttttgaaatacatttttgttttagtggtactaattgataaactataaatttcagaagtaacgtttcttccttacatatgttgctctgatcagtgatggccagggacatacatgtgtattcttgctgcaaaaaatgtaggtacatttggattttcgttgtccacaaatagtagcaattctatgctttcttgcttgatacagtgtggtggatgacggcttgcttccacttgtacggtagttattagggagattttcctaaagaatatagcctagccagaaacccgtgaaactatgatcaattagaggcattttgtgaaagagattaggttttagttagtttattatttttttgtctattttatttctttcagaaaaaattgctatagtctatgagttggttcttagccttctactcgaagaggtgagtaaatgcaaatcttttttaaatgattgtttattatcctccaatcatgatctcctctatgtgttgcgaaagttggagcagatgatgaatgttttgattcaaatattaaggtagaaaaatgtttcaatggcaaataagacaccactttaatttctgaaggcaattaaggaaacaggaacttttgtagtatatcctaaaaacctgccggttacaatcaagttacctcaactgagaacagacgcaagcatcacctgcatccaagtgcactaaacccctagctcccctctaactgataaggtagttagattaaaggtacatgttcagctggcatagccttaccctttcattttttatgttaaagtgctaagaactgaatttatgcttcgaagccaaggattataattctggtacattgaggttgagcattcaagtcaacattcatgcttcttgggcttcggcagcagcgcaacatgcatacatgtttcaggaagtctcatcaggcacaaaagcaagtctaaaattctgatataggtttaataaatgtatgaataacttgatccttccatctattcttcttttctttctttctctgcaaccatgcctaagcaaactttttcataagagaaaagaagttttacaacaaatggtattattaagccaaggcttctgtaatctaggattttggtttctttaactatttttttctcaaacactaatgctggaagtaagtatgattgtattaaagccttgtcatgactgtttaaaagttgttgcagtgtagaatcagtgaaagtatggacatagcagaataattcatatgtttcaactcttttgcctgttgaactgtttgacttagccaaaaagatacatcactcagctcggaaagccaatcctttcagctcatactcatgaattgtgataccccaattttctgaaaagaagttaaatttctttttctcttttctttcatgttctgtggcattggggtttggagtttcaagaggcattcctcaggaaacagtagatcttttggcattttttccgctagggtcgggagctcaaatgggagagcgagtttgggccattgatctcgatctgatggatgggagcctcctctcctccccaaccctagccgaccccctctccttctccctaatggttgcagctacccccaccctttccacccctttggccgccgccccctccctctcttccccattggcagccgccccctaccctctccatggcttcctcctcgctctaggtctcccccacgcagcaaggatcaagaagaggaggagcatgttgaattgaagatgaagagaggatcaaggagatgttctaccccatctcttcttgcagatcttcttggggaaaccctaggtggctacactctggatcattcctagtacacttttcttcttcgataaaggcaagtgaatgtagcggtggttgctaccgttttgacttgttgtttttttatcgcctacactttaatattcagaattatggaattctttcataattgaactctatggtgatgctttacttgcttgtattatactaatgctcaaccatatattgatgatgattatgattcgagtatgacccaggagattaattcacacccctgaaggtaaacaaaatattatttgaggtttgtattgtatgtgaaggaagtgaagtatattgttaaatgcagcatgccatatacattgcatgattcacttgcatctgaaatttgtcgtgacctaatgtctgactgtaccggtacaacttagcatcgtacgttgcccgaggaggggtacgatgcggcttcatacccttagaggtatgaaggcagaggacatatgcattgcattcatatgcattcttgaagtgatatttgcagaggacatggttttatactctcataggtacgaaggcagaggacctacatattgcattcctatgcatacattgaagttatatttgcaggtattgttgaagcagggaagtgttatacaacctattgtggttgttcgaagaaatgagatggtattgcggttattgggactattgagttctatatctacacgtattttggatcttaattgtgatttctttaaaatgttgattaattcaatttgtggtttaaatatctcgtcaaaacaatttgcttgctgagatgtttcatctcactcttgcattactcagtgcaggtgcttgatgctcgtcaaggggagtgggaagtagcggcacgttgcacacactgtttaaagaaccaaataattagctttggttattgacttttgaagttcatattttgaaatatgatgtaggcataagctggttcattcatggttaatcatctttgatgagaattatatcatattagtatgattcattttgtattgatatatctcttttgcttctgcgatgcttataattacaaaggag

SEQ ID NO: 4776 - DNA, 4267 bp, Zea Mays
cactcttcctctacccccatcacccccaatcccagccgccgtctctcctaaatcaagcaaggagatatgtagatcaaccggatggtgaaggatccgggcggtggcagactaggtgtggcctgcagcggagacggggaggagctccttcactgctgtgcggacgagcgctaaccccgcgtggtaaaccctaaccgactcacacacttcttctctcccccgcgtggtggtcccttgaggacgagggcacggcgtggacggagtgctgcccgtatttccccccaacgatttggcggtgatgacgatctcaaaacggtttggaggcttcacgactctgtgtgagtggaagaagaaagcaaactgaactactgcaccttagcttcccgatgcggtttgttgctaccgaggaaagctttgcatatcctatttataagcaaaagctaatcgagatgagtcacacatactacacaaatatattcaaacgtgctagatggcctgatgctccacagcagtatcctggaaacacccatctatgatgaatggaagaataatttcccagaccaggaaacagaggaagatcaacccttcataggccactctatcgtccatgttgtgcacaaggatattcgttagtttgctggtactgttccaaacgtgacggcaacaggagatatcgatatcatggccatgtatccgggtcagggtgttgggctaatcacggagatcataccagctactcaagttgtcaaaagtctggtcgctgaagcgaaggaagtcatcagagaaaagctttttggttaccaatagaatccttcctgaactgcaaactagaagtatctgtgtgtgagtagtcaccaatcagaataatcacactaaaacaaaaaaaaatgtctaaggtatttgagctccatacctttatagaggattgctggtcaaacatgaactgtcagtgagagaaaagaatcatgttatggtgaagggtttaatttgttatatcatatatatctaagtatttgagtcactcttatttctgcagatccttaaaccaaggagcatattaagaaattcctctcaatggggcatgtgtcttatgaagttctattacacgcacgtcccttattcttaaatggtcttccaagagcaatctttctgttttttcattgttatatgaccctgtgaacaccaaactattctgcaggttagaattttagatatgggaactagctggcttgcccgcactgcgatgacatgttatgcgctttctccaatggctaaggtatgcaccctcctccctttggatcatatctgtggtgtttctacctatgcagtgtctcccctttgatgcgaatttaatgcatactttagaccagcatgactattggtttgataaaagcttgcaatcatcaagttttgaaatacatttttgttttagtggtactaattgataaactataaatttcagaagtaacgtttcttccttacatatgttgctctgatcagtgatggccagggacatacatgtgtattcttgctgcaaaaaatgtaggtacatttggattttcgttgtccacaaatagtagcaattctatgctttcttgcttgatacagtgtggtggatgacggcttgcttccacttgtacggtagttattagggagattttcctaaagaatatagcctagccagaaacccgtgaaactatgatcaattagaggcattttgtgaaagagattaggttttagttagtttattatttttttgtctattttatttctttcagaaaaaattgctatagtctatgagttggttcttagccttctactcgaagaggtgagtaaatgcaaatcttttttaaatgattgtttattatcctccaatcatgatctcctctatgtgttgcgaaagttggagcagatgatgaatgttttgattcaaatattaaggtagaaaaatgtttcaatggcaaataagacaccactttaatttctgaaggcaattaaggaaacaggaacttttgtagtatatcctaaaaacctgccggttacaatcaagttacctcaactgagaacagacgcaagcatcacctgcatccaagtgcactaaacccctagctcccctctaactgataaggtagttagattaaaggtacatgttcagctggcatagccttaccctttcattttttatgttaaagtgctaagaactgaatttatgcttcgaagccaaggattataattctggtacattgaggttgagcattcaagtcaacattcatgcttcttgggcttcggcagcagcgcaacatgcatacatgtttcaggaagtctcatcaggcacaaaagcaagtctaaaattctgatataggtttaataaatgtatgaataacttgatccttccatctattcttcttttctttctttctctgcaaccatgcctaagcaaactttttcataagagaaaagaagttttacaacaaatggtattattaagccaaggcttctgtaatctaggattttggtttctttaactatttttttctcaaacactaatgctggaagtaagtatgattgtattaaagccttgtcatgactgtttaaaagttgttgcagtgtagaatcagtgaaagtatggacatagcagaataattcatatgtttcaactcttttgcctgttgaactgtttgacttagccaaaaagatacatcactcagctcggaaagccaatcctttcagctcatactcatgaattgtgataccccaattttctgaaaagaagttaaatttctttttctcttttctttcatgttctgtggcattggggtttggagtttcaagaggcattcctcaggaaacagtagatcttttggcattttttccgctagggtcgggagctcaaatgggagagcgagtttgggccattgatctcgatctgatggatgggagcctcctctcctccccaaccctagccgaccccctctccttctccctaatggttgcagctacccccaccctttccacccctttggccgccgccccctccctctcttccccattggcagccgccccctaccctctccatggcttcctcctcgctctaggtctcccccacgcagcaaggatcaagaagaggaggagcatgttgaattgaagatgaagagaggatcaaggagatgttctaccccatctcttcttgcagatcttcttggggaaaccctaggtggctacactctggatcattcctagtacacttttcttcttcgataaaggcaagtgaatgtagcggtggttgctaccgttttgacttgttgtttttttatcgcctacactttaatattcagaattatggaattctttcataattgaactctatggtgatgctttacttgcttgtattatactaatgctcaaccatatattgatgatgattatgattcgagtatgacccaggagattaattcacacccctgaaggtaaacaaaatattatttgaggtttgtattgtatgtgaaggaagtgaagtatattgttaaatgcagcatgccatatacattgcatgattcacttgcatctgaaatttgtcgtgacctaatgtctgactgtaccggtacaacttagcatcgtacgttgcccgaggaggggtacgatgcggcttcatacccttagaggtatgaaggcagaggacatatgcattgcattcatatgcattcttgaagtgatatttgcagaggacatggttttatactctcataggtacgaaggcagaggacctacatattgcattcctatgcatacattgaagttatatttgcaggtattgttgaagcagggaagtgttatacaacctattgtggttgttcgaagaaatgagatggtattgcggttattgggactattgagttctatatctacacgtattttggatcttaattgtgatttctttaaaatgttgattaattcaatttgtggtttaaatatctcgtcaaaacaatttgcttgctgagatgtttcatctcactcttgcattactcagtgcaggtgcttgatgctcgtcaaggggagtgggaagtagcggcacgttgcacacactgtttaaagaaccaaataattagctttggttattgacttttgaagttcatattttgaaatatgatgtaggcataagctggttcattcatggttaatcatctttgatgagaattatatcatattagtatgattcattttgtattgatatatctcttttgcttctgcgatgcttataattacaaaggag

SEQ ID NO: 4777 - DNA, 3475 bp, Zea Mays
cgcaccctcacgagatctagactagacgccgaggccacgacgctttgcctacctcgcctccttttccactgttgctacgagtagtagatcttgtttcagactcgagcattccagttattgccaatggggaattgtagatggacgtggctatgttgccacattagcactcggtgcccaaggtttgttgctaccgaggaaagctttgcatatcctatttataagcaaaagctaatcgagatgagtcacacatactacacaaatatattcaaacgtgctagatggcctgatgctccacagcagtatcctggaaacacccatctatgatgaatggaagaataatttcccagaccaggaaacagaggaagatcaacccttcataggccactctatcgtccatgttgtggttagaattttagatatgggaactagctggcttgcccgcactgcgatgacatgttatgcgctttctccaatggctaaggtatgcaccctcctccctttggatcatatctgtggtgtttctacctatgcagtgtctcccctttgatgcgaatttaatgcatactttagaccagcatgactattggtttgataaaagcttgcaatcatcaagttttgaaatacatttttgttttagtggtactaattgataaactataaatttcagaagtaacgtttcttccttacatatgttgctctgatcagtgatggccagggacatacatgtgtattcttgctgcaaaaaatgtaggtacatttggattttcgttgtccacaaatagtagcaattctatgctttcttgcttgatacagtgtggtggatgacggcttgcttccacttgtacggtagttattagggagattttcctaaagaatatagcctagccagaaacccgtgaaactatgatcaattagaggcattttgtgaaagagattaggttttagttagtttattatttttttgtctattttatttctttcagaaaaaattgctatagtctatgagttggttcttagccttctactcgaagaggtgagtaaatgcaaatcttttttaaatgattgtttattatcctccaatcatgatctcctctatgtgttgcgaaagttggagcagatgatgaatgttttgattcaaatattaaggtagaaaaatgtttcaatggcaaataagacaccactttaatttctgaaggcaattaaggaaacaggaacttttgtagtatatcctaaaaacctgccggttacaatcaagttacctcaactgagaacagacgcaagcatcacctgcatccaagtgcactaaacccctagctcccctctaactgataaggtagttagattaaaggtacatgttcagctggcatagccttaccctttcattttttatgttaaagtgctaagaactgaatttatgcttcgaagccaaggattataattctggtacattgaggttgagcattcaagtcaacattcatgcttcttgggcttcggcagcagcgcaacatgcatacatgtttcaggaagtctcatcaggcacaaaagcaagtctaaaattctgatataggtttaataaatgtatgaataacttgatccttccatctattcttcttttctttctttctctgcaaccatgcctaagcaaactttttcataagagaaaagaagttttacaacaaatggtattattaagccaaggcttctgtaatctaggattttggtttctttaactatttttttctcaaacactaatgctggaagtaagtatgattgtattaaagccttgtcatgactgtttaaaagttgttgcagtgtagaatcagtgaaagtatggacatagcagaataattcatatgtttcaactcttttgcctgttgaactgtttgacttagccaaaaagatacatcactcagctcggaaagccaatcctttcagctcatactcatgaattgtgataccccaattttctgaaaagaagttaaatttctttttctcttttctttcatgttctgtggcattggggtttggagtttcaagaggcattcctcaggaaacagtagatcttttggcattttttccgctagggtcgggagctcaaatgggagagcgagtttgggccattgatctcgatctgatggatgggagcctcctctcctccccaaccctagccgaccccctctccttctccctaatggttgcagctacccccaccctttccacccctttggccgccgccccctccctctcttccccattggcagccgccccctaccctctccatggcttcctcctcgctctaggtctcccccacgcagcaaggatcaagaagaggaggagcatgttgaattgaagatgaagagaggatcaaggagatgttctaccccatctcttcttgcagatcttcttggggaaaccctaggtggctacactctggatcattcctagtacacttttcttcttcgataaaggcaagtgaatgtagcggtggttgctaccgttttgacttgttgtttttttatcgcctacactttaatattcagaattatggaattctttcataattgaactctatggtgatgctttacttgcttgtattatactaatgctcaaccatatattgatgatgattatgattcgagtatgacccaggagattaattcacacccctgaaggtaaacaaaatattatttgaggtttgtattgtatgtgaaggaagtgaagtatattgttaaatgcagcatgccatatacattgcatgattcacttgcatctgaaatttgtcgtgacctaatgtctgactgtaccggtacaacttagcatcgtacgttgcccgaggaggggtacgatgcggcttcatacccttagaggtatgaaggcagaggacatatgcattgcattcatatgcattcttgaagtgatatttgcagaggacatggttttatactctcataggtacgaaggcagaggacctacatattgcattcctatgcatacattgaagttatatttgcaggtattgttgaagcagggaagtgttatacaacctattgtggttgttcgaagaaatgagatggtattgcggttattgggactattgagttctatatctacacgtattttggatcttaattgtgatttctttaaaatgttgattaattcaatttgtggtttaaatatctcgtcaaaacaatttgcttgctgagatgtttcatctcactcttgcattactcagtgcaggtgcttgatgctcgtcaaggggagtgggaagtagcggcacgttgcacacactgtttaaagaaccaaataattagctttggttattgacttttgaagttcatattttgaaatatgatgtaggcataagctggttcattcatggttaatcatctttgatgagaattatatcatattagtatgattcattttgtattgatatatctcttttgcttctgcgatgcttataattacaaaggag

SEQ ID NO: 4778 - DNA, 3474 bp, Zea Mays
actagacgccgaggccacgacgctttgcctacctcgcctccttttccactgttgctacgagtagtagatcttgtttcagactcgagcattccagttattgccaatggggaattgtagatggacgtggctatgttgccacattagcactcggtgcccaaggtgtttgtttaggaactaggtttgttgctaccgaggaaagctttgcatatcctatttataagcaaaagctaatcgagatgagtcacacatactacacaaatatattcaaacgtgctagatggcctgatgctccacagcagtatcctggaaacacccatctatgatgaatggaagaataatttcccagaccaggaaacagaggaagatcaacccttcataggccactctatcgtccatgttgtggttagaattttagatatgggaactagctggcttgcccgcactgcgatgacatgttatgcgctttctccaatggctaaggtatgcaccctcctccctttggatcatatctgtggtgtttctacctatgcagtgtctcccctttgatgcgaatttaatgcatactttagaccagcatgactattggtttgataaaagcttgcaatcatcaagttttgaaatacatttttgttttagtggtactaattgataaactataaatttcagaagtaacgtttcttccttacatatgttgctctgatcagtgatggccagggacatacatgtgtattcttgctgcaaaaaatgtaggtacatttggattttcgttgtccacaaatagtagcaattctatgctttcttgcttgatacagtgtggtggatgacggcttgcttccacttgtacggtagttattagggagattttcctaaagaatatagcctagccagaaacccgtgaaactatgatcaattagaggcattttgtgaaagagattaggttttagttagtttattatttttttgtctattttatttctttcagaaaaaattgctatagtctatgagttggttcttagccttctactcgaagaggtgagtaaatgcaaatcttttttaaatgattgtttattatcctccaatcatgatctcctctatgtgttgcgaaagttggagcagatgatgaatgttttgattcaaatattaaggtagaaaaatgtttcaatggcaaataagacaccactttaatttctgaaggcaattaaggaaacaggaacttttgtagtatatcctaaaaacctgccggttacaatcaagttacctcaactgagaacagacgcaagcatcacctgcatccaagtgcactaaacccctagctcccctctaactgataaggtagttagattaaaggtacatgttcagctggcatagccttaccctttcattttttatgttaaagtgctaagaactgaatttatgcttcgaagccaaggattataattctggtacattgaggttgagcattcaagtcaacattcatgcttcttgggcttcggcagcagcgcaacatgcatacatgtttcaggaagtctcatcaggcacaaaagcaagtctaaaattctgatataggtttaataaatgtatgaataacttgatccttccatctattcttcttttctttctttctctgcaaccatgcctaagcaaactttttcataagagaaaagaagttttacaacaaatggtattattaagccaaggcttctgtaatctaggattttggtttctttaactatttttttctcaaacactaatgctggaagtaagtatgattgtattaaagccttgtcatgactgtttaaaagttgttgcagtgtagaatcagtgaaagtatggacatagcagaataattcatatgtttcaactcttttgcctgttgaactgtttgacttagccaaaaagatacatcactcagctcggaaagccaatcctttcagctcatactcatgaattgtgataccccaattttctgaaaagaagttaaatttctttttctcttttctttcatgttctgtggcattggggtttggagtttcaagaggcattcctcaggaaacagtagatcttttggcattttttccgctagggtcgggagctcaaatgggagagcgagtttgggccattgatctcgatctgatggatgggagcctcctctcctccccaaccctagccgaccccctctccttctccctaatggttgcagctacccccaccctttccacccctttggccgccgccccctccctctcttccccattggcagccgccccctaccctctccatggcttcctcctcgctctaggtctcccccacgcagcaaggatcaagaagaggaggagcatgttgaattgaagatgaagagaggatcaaggagatgttctaccccatctcttcttgcagatcttcttggggaaaccctaggtggctacactctggatcattcctagtacacttttcttcttcgataaaggcaagtgaatgtagcggtggttgctaccgttttgacttgttgtttttttatcgcctacactttaatattcagaattatggaattctttcataattgaactctatggtgatgctttacttgcttgtattatactaatgctcaaccatatattgatgatgattatgattcgagtatgacccaggagattaattcacacccctgaaggtaaacaaaatattatttgaggtttgtattgtatgtgaaggaagtgaagtatattgttaaatgcagcatgccatatacattgcatgattcacttgcatctgaaatttgtcgtgacctaatgtctgactgtaccggtacaacttagcatcgtacgttgcccgaggaggggtacgatgcggcttcatacccttagaggtatgaaggcagaggacatatgcattgcattcatatgcattcttgaagtgatatttgcagaggacatggttttatactctcataggtacgaaggcagaggacctacatattgcattcctatgcatacattgaagttatatttgcaggtattgttgaagcagggaagtgttatacaacctattgtggttgttcgaagaaatgagatggtattgcggttattgggactattgagttctatatctacacgtattttggatcttaattgtgatttctttaaaatgttgattaattcaatttgtggtttaaatatctcgtcaaaacaatttgcttgctgagatgtttcatctcactcttgcattactcagtgcaggtgcttgatgctcgtcaaggggagtgggaagtagcggcacgttgcacacactgtttaaagaaccaaataattagctttggttattgacttttgaagttcatattttgaaatatgatgtaggcataagctggttcattcatggttaatcatctttgatgagaattatatcatattagtatgattcattttgtattgatatatctcttttgcttctgcgatgcttataattacaaaggag

SEQ ID NO: 4779 - DNA, 2294 bp, Zea Mays
cctgattccgcgcagagacagagagctagagacgagactctccccctccacaaccctccctccattaccatcacccaaacgaattgttctctccccatctccgatccctacgtcaaacgtgtcccccccgcccggcctcgcctcctctcactctctataaagcaaaccgcgaacctgaaagcaggctgatcttgatcacctgcaactgcaactgcaagcgacgatcgagagccaacaaacaacatcagcaacagcagcagcaggcttcagtttgcacgcagggtttatcgggcatggacttggagcgtatggacgagacgtcgtcggtgaacgatcagagcgcggaacggcggcccacggtggccggcggcggcggcggcgccatgccgtggctcgacctcacgctggccgtgaccgcccctcgcgacgagttcccggcgacaacggacggggactcctcgtccgccgcctcagacggcgagccgccgcccaagcccgtgcccgtgccgtcctctcctcctcctcctcctccctccgcgcccgcgccgcacaaggtgttctcgtgcaacttctgcatgcgcaagttcttcagctcgcaggcgctgggcgggcaccagaacgcgcacaagcgggagcgcagcgcggccaagcgctcctccgcgccgtcgcccgcctaccagtaccagtaccaccacctccacgcggcgcagcggatggtcatggccggcctgccgctcgaggcgcacgccgccctggtgcgcgccgcgctgcgggtcagcccggccagcgcggtcatccaaaagggcgccgccagccaggagctcgccgccgcggcgcggaaggctgccggtgccggggcccccggcgccacgagcacggcccccaggttccacgacggcaacagcgccgccgccacctcgtgggcgccggcgctgctctacgagatcgaggagccggtcagctcgacgtggccggggagcttccgcatgaggacgcagcctgagccgccgagctcggaggagcaggcgtcggcgtcggagcagagggaatcagatatgccacaggctgcgcgatggtgttgtgggtcttcggctacggctccctcatctggaacctcggcttcgacttcgacgacaaaatcctcggcttcatcaagggctacaaccgcacctttaatctcgcttgtattgaccacagaggcacaacagagcatccggcgaggacctgcacgcttgaaaccgacggcgaggcgacgacgaggccatatgcgtggtgacacagtattacatgtgcaatttagatatggatttggacgactaaaatcatttactgaaatgtacctaaataatgttctgtttgtgtagcatctttgcatgcccccctttttacacggtgacacagtgttacatgggcaaggtactttgcgtggcctgtcgtcatgaatttctttctgacaacagattggttcaacttgttttcttgccattagccataattacagaaaattgtttttaatgaattgttattcagttttgcgtcacaatttccatgttctcgcatgaatatgtagctctgcattggccttgaaatcttatcgaggtcttcactttggactaaggaattagaaaagagtggaagaatagggtagggagtaatttctttttctacttgtatagtgagctgtgtaaaatctcattactttaaccactccaatagctgttagctttgcacaccagtttggcatgttggacccatggatcagctttgtgtgacgacacaacatgcagcattatatagaagacattggcagagttcctgcatgtcgtgccagtgttcctggtcggtaaatgcagttgcacatgaaatgggaatcagggtgataattcagtgttacaggtaggggaagggagcaagaagcagccccgcttggtcagctttgatgatagatcatccgtcacagacttggacttcgacttggatgaagagggggccatcacgttatacaatttttattttttcattacttgttgtgtttgtttacagatagtcccaactcacttgaattcttgatagcctgttgtggttctagcaaatttgctcatcgttaccatctttggctgtcaaatatatttctatgctacaattttagcttaggacccttatgtgtatcatttctacatagaaatattgtccaagaaatgacttgaataggttgtccatttactactctcacatggcatcatctgaagataactctttgggttactatttatgtagtatgcacgtgtaaaaat

SEQ ID NO: 4780 - DNA, 1832 bp, Zea Mays
cacctcgatggccgccaaccacaacgctgatgatgccgctagagagcctgtcgcgagcgcctctccacccgcctctgaggccgagcaccgcgccctcctccgaccatcgtcgttcatctccgccatctcagacgacaatgaagggtgcaaggagcgggcgttcgagccatccgagaaggtcatcgtctccgtctccggcgaccccgaaggcgatgctagcgaagagcgcgccttctacgcctcggggggctgcatgccgcccttctcgtggcgcaagctgtgggcattctcggggcccggctttctgatgagcatcgcgttcgtagacccggggaacatcgagggcgacctgcaggccggtgccacagcgggcggcacgctgctctgggtgctcgtgtgggcgacggccatgggcctactcgtgcagcttcacgccgcgcgcctcggggtggccacagggaggcaccttgctgagctgtgccgtgacgagtacccggattgggcgcgccgcgcgctctggttgatggccgaggtcgccttggtcagcgctgacatccaggaggtcatcgggagcgccattgccatcaagatcctcagccacggcctgttgcctctctggggcggtgttgtcattaccgctttggattgctttatgattctttccctcgagaactatggggtgagaaagttggaagctctatttgcggttctaattacaacaatggcgtgctccttcgcatggatgtttgtagagaccgagcctagtggcaaagatctattcattggtattcttgtcccaaaactaagctcgagatcgataaaacaggccgttggccttgttggatgtgtcatcacaccccacaacgtgttcctccattccgctcttgtgcagtcaagaaagattgacccggacaaggaatacgaagtccgtgaagcgttgaggtactattccattgaatccaccctggcattggtagtgcccttgatgataaatttatttgtcacgacagtttttgcaaaggggttctatggtaccaaggaagcggatagtatcggccttgagaacgccgggaagtatctgcaggagaagtttgggggagactttttccctatcctttatatctggggtgttggactgttagccgccggcaccagtagcaccataactggaacttacgctgggcagtttataatgggtgggtttctgaactggcggctgaaaaaatggatcagggcattgatcactagaagctttgcgattgttccgacgataatcgtcgctttgtacttcaacaattctggctatgagctggatgttctcaatgagtggctcaatgtgctccagtcagttcagatccctttttctctcatcccactgataacactggtttcaaaggaggaagtcatgggggtgtacaagataggtccaagaatgaaaattctaacctggatagttgcctctctaccgatcctaatcaacagctatatgttgttggacttcttctctctggaaatgggaggcatgttgtacaacacaactctttgcgtggctgtggtggcttattctatgttcatattatatcttatttttcgaggcatgaaatttccttcctatctgacgacgacgtaacatgagaagagattcgtattgtgaaacttggatggagaaaattgttgtatggtagattattgccattagaagatcacaaaaatgcagtgtccattgtatagagtcacataaagtttcaattgttgcaaaggactagtaactagtaagactgttgtatggtttgtacataaacctctaactacgattaaaaaattatcatgag

SEQ ID NO: 4781 - DNA, 5324 bp, Zea Mays
cctgtctcccatccccagatcccatcgactacggatccgcctgctccttcagaacagagatctgtactcgagaaggttgcttcgcagcagactgctgaaggccggtggtcaggcggccggacgcagggtggggcgtgggggacagggagggtctccggccaggcaaattcggctcagggtggcagccaaacaagcccctgatgccggagcagtctagatccggcgccccgatggagtggacgacggtgcagcacctggatctccgccactccggcggccgccgcggtgcctcggcccgccctatgcagccgcacgccgctgccttccgctcctcccaggccatcgtcgctgtggccatcggcacccacgtcgtcgagttcgatgctctgtcgggaagcaagatagcttctattgaccttggtgcccgtgttgttcgtatggcatatagccctacaactagtcatgttgtcattgctattcttgaggatgctacaatcagatcctgtgatttcgccacggagcagacacttgtgctgcattcgcctgagaaaaaaacagatcatgtttcaatagatactgaagtccatcttgcattgacacctcttgagcctattgtattttttggtttccacaaaagaatgagtgtaacaggttactctcttagcttggcagttgctgttgacagtacaattaagctaattggagctggtgcttttgggtttcacccgaccctagagtggatatttgttggtgatagaggtggtactctcctggcatgggatgtatcaactgagaggccaagtatgattggcattacacaggctggttcccatcctatcacatctgtatcctggcttcctacactgcggctgcttgttactatttcaaaggatggagcactccaagtgtggaagacacgagttataataaaccctaacagacaaccaatggaaactcatttctttgagcgtgcagctgttgaaacaatggatatcacaaaaatactaactcttcaaggtggagaagcagtgtacccattaccccgaattaaaaatttggcagtgcatcccaaattcaatttggctgcagtaatttttgcggatatgtctgggacagaagctgcaaagaacaaagctgcatacacaagagaagggaggagacaactttttgctcttcttcagggagctaggggatcaactgctgctgttttaaaggagaaactattagccttgggatcatctggaatattagcagagcatcaacttcaggcacaactacaagagcagcacttgaagggccagagccagctgactatttcagatgttgcaaggaaggcattccttcacagtcatttcatggaagggcatgctcaaagcggtccaatccctcgcctacctcttgttacaatttcagattctagcaaccttttgcgagatgttcctgtttgtcagttgattttgcaactccagccattccatctagagctgaatttcttcaacaaggaaacccgtgttgttcagtatccagttagagctttctatttggatggatttaacctgatggcccataacttatcatctggggctgacaatctctataagaagctttactcaacgattccttcgaatgtggaatgccatcccacgaatatgtcatacagcccaaaacagcatttatttcttgtcgtgtttgaattaagtggtacaaatggagtggtacatgaagttgttctttactgggagcagactgatctacagacagtgaacagcaaaggaagttccataagaggtcgagatgctgcttttttgggcccagatgataatcaatatgctattctggaggaagatagaactggtctgaatctctttagtctcaaagctgtagctacaaaggaagctcttgaaaataatgctgctgtgcttgaagaaaacacttttgctgataatgctgctagtgctacctcaacggaacgtcaaggtcctctacagtttacttttgaatcagaggttgatcgcatattttcttctcctctagaatcaaccttgttgtatgttatttctggaaagcatattggacttgcgaagcttctgcagggatataggctgtctgcagacaacgggctatccattacaacaaaaactgatgggaagaagtttattaagttgaaaccaaatgagactgttcttcaggcccactggcaaacaaccctaagaggtcctgtggtaggaatattgacaaatcagagggtgctaattgcttctgctgatcttgatatactatcaagcagctcaacaaagtttgatcgtggtctcccatcatatcggtcaatgttgtgggttggaccagcacttatcttctcaagcgcaactgcaataagtatgcttgggtgggacaacaaagtccgatcaatcctctccactagcttccctcgctcagtattacttggtgcattgaatgaccgcctactgcttgtaaatccgacggatataaacccaagacagaaaaagggagtggaaataagggcctgtttagttgggcttcttgaacctcttctcattggatttgctaccatgcagcaacacttcgagcaaaaacttgatctttcagaagtcctgtaccaaataacctcgaggtttgatagtttacggatcactccaaggtcattggacatattaactaaaggacctcctgtttgtggagaccttgctgtatcattatctcaagcaggacctcagtttacccaaatcatgcgctgcaattatgcaatcaaagctctccggttctctactgcgctgtcaattttgaaagatgagttcctgcgctccagagattatcctcaatgccctcccacttctcatctgttccagcgtttccgagaattgggatatgcatgtataaagtatggtcagtttgacagtgcaaaagaaacttttgaggttattacagatcacgagagcatgctggatctatttatttgtcacctgaacccaagtgcattgcgacgccttgcacaaaagttagaggaatctgctacagattctgagctgaggcgataccttgagagaatattaagagttcgttcgactggatggacacagggtgtattcgccaattttgctgctgaaagtatggttcctaaaggccctgaatgggcaggaggaaactgggagatcaaaacacctaccaacattaagaatatacctcagtgggagcttgcaggagaagtcatgccttatatgaagacaactgatgctggtatcccatctgttgttgcagatcatattggtgtgtacctgggtgtgatgaaaggaaggggtaatgttgtggaagtaagtgaaaagagtttggttaaagctatagctgcagctagcagtgagaacacacagccggtgtcttctgcatcagcagagaaaagtaaggcaattcctcgtggtgattcggttggtgatactttggcaaggcaactgggagtccagattgcatcttctgatgaacaggcaaaagctgccgaggacttcaagaagactttatatggtgttgttgatgatggaagtagtgatgaagacgagtcaacctcaaagactaaaaagatacatataaggatacgtgataaaccggctgcacctactgtagatgtcaacaaattgaaagaagccactaaacagctaggcttgggtcctccgctgagtaggacaaggtcattatcagggacacctcaagacttcaatcaggctcctacacaaccaggaggtccagccgcagctgtttccccagcaatgccaaattctgcgattgatttatttggaacaaatactttagtgcagccgcaagcaccctctagttccacaggtcctgttattgcaggcatgggagtgacggctgggccgatccctgaggacttcttccagaacactattccatcgcatcaacttgcggctcaactacctcctcctggaatagtcctgtcacggatggctcaacccgctcctggcattgaacaaggccgaccagtacctaatcaaatgatggctaatgttggtcttccagatgatggggtgccaccacaagcaccaccgcagcagtcccagtttcctccgcagcagtcccagtttcctcagcaaccaggcattcctatggattctattggcctgcctgatggtggtgtccccccacagagtcagccacttccttcacaaggccagtttcttccttcacaggcacagggctttcaacttggtattcctgctccatcacaaccaattgatctcagcgctctcgagggtcctggagcggcgaagcaagctgctcgccctccagcacctactgctgtgcggcctggccaggtaccacgcggggcccctgctgcagaatgctacaagatggctcttgctcatcttgagcagaatcagcttaccgatgcactatcttgtttggacgaagcattcttagcccttgcaaaggaccagtcacgtgaagccgacatcaaagcgcaggccaccatttgtgctcagtacaagatcgcagttgctctgctgcaggaaattgctcgtctgcaaagggttcaaggagctggtgctctcagtgcgaaggaggaaatggccaggctatctcggcaccttgcttccctgcccatccaggccaagcacaggatcaactgcatcaggaccgccatcaagcggaacatggaggtccagaactacgcctacgccaagcagatgctggacctcctctactccaaggcgcccccgacgaagcaggacgagctcaagagcctgatcgacatgtgcgtccagaggggcctgacgaacaaatccatcgacccgttcgaggacccctcgcagttctgctccgtgaccctcagccggctgtcgaccatcggccacgacgtgtgcgacctctgcggcgccaagttctcggcgctctccgcacccggttgcgtcatctgtggcatggggagcatcaagagatccgacgccctcgctggtgggcctggacccgtgccgtcacctttcggctgaaggtcgagtctgctcctttcgtcctccatcggtcctgatattgtatctatagtgttcagtttgcgttcattacattcgattcgttgcagcttgtattgtatgtagcctttttgacgtgtagcacgcttggtgttgagagcaatgtacacctgtactgttgggttggttgtgattatacacgcggttttttttggagctagcaatgtaaggtgcatgtgcatatctgagacgcgaacgtcgacgtgaaacgttctagtctccatagttggtaaatacagttactgcagaaactcgcatctatacgat

SEQ ID NO: 4782 - DNA, 5433 bp, Zea Mays
catcgactacggatccgcctgctccttcagaacagagatctgtactcgagaaggttgcttcgcagcagactgctgaaggccggtggtcaggcggccggacgcagggtggggcgtgggggacagggagggtctccggccaggcaaattcggctcagggtggcagccaaacaagcccctgatgccggagcagtctagatccggcgccccgatggagtggacgacggtgcagcacctggatctccgccactccggcggccgccgcggtgcctcggcccgccctatgcagccgcacgccgctgccttccgctcctcccaggccatcgtcgctgtggccatcggcacccacgtcgtcgagttcgatgctctgtcgggaagcaagatagcttctattgaccttggtgcccgtgttgttcgtatggcatatagccctacaactagtcatgttgtcattgctattcttgaggatgctacaatcagatcctgtgatttcgccacggagcagacacttgtgctgcattcgcctgagaaaaaaacagatcatgtttcaatagatactgaagtccatcttgcattgacacctcttgagcctattgtattttttggtttccacaaaagaatgagtgtaacagttgtagggactgttgatggagggagaccgccaacaaaaataaagactgatcttaaaaaacccattgttaacctggcttgccatccccgcctccctgtcttgtatgtagcttatgctgaaggcttgatacgcgcctacaatatccagacatatgctgtacactataccttacaacttgctgttgacagtacaattaagctaattggagctggtgcttttgggtttcacccgaccctagagtggatatttgttggtgatagaggtggtactctcctggcatgggatgtatcaactgagaggccaagtatgattggcattacacaggctggttcccatcctatcacatctgtatcctggcttcctacactgcggctgcttgttactatttcaaaggatggagcactccaagtgtggaagacacgagttataataaaccctaacagacaaccaatggaaactcatttctttgagcgtgcagctgttgaaacaatggatatcacaaaaatactaactcttcaaggtggagaagcagtgtacccattaccccgaattaaaaatttggcagtgcatcccaaattcaatttggctgcagtaatttttgcggatatgtctgggacagaagctgcaaagaacaaagctgcatacacaagagaagggaggagacaactttttgctcttcttcagggagctaggggatcaactgctgctgttttaaaggagaaactattagccttgggatcatctggaatattagcagagcatcaacttcaggcacaactacaagagcagcacttgaagggagccagctgactatttcagatgttgcaaggaaggcattccttcacagtcatttcatggaagggcatgctcaaagcggtccaatccctcgcctacctcttgttacaatttcagattctagcaaccttttgcgagatgttcctgtttgtcagccattccatctagagctgaatttcttcaacaaggaaacccgtgttgttcagtatccagttagagctttctatttggatggatttaacctgatggcccataacttatcatctggggctgacaatctctataagaagctttactcaacgattccttcgaatgtggaatgccatcccacgaatatgtcatacagcccaaaacagcatttatttcttgtcgtgtttgaattaagtggtacaaatggagtggtacatgaagttgttctttactgggagcagactgatctacagacagtgaacagcaaaggaagttccataagaggtcgagatgctgcttttttgggcccagatgataatcaatatgctattctggaggaagatagaactggtctgaatctctttagtctcaaagctgtagctacaaaggaagctcttgaaaataatgctgctgtgcttgaagaaaacacttttgctgataatgctgctagtgctacctcaacggaacgtcaaggtcctctacagtttacttttgaatcagaggttgatcgcatattttcttctcctctagaatcaaccttgttgtatgttatttctggaaagcatattggacttgcgaagcttctgcagggatataggctgtctgcagacaacgggctatccattacaacaaaaactgatgggaagaagtttattaagttgaaaccaaatgagactgttcttcaggcccactggcaaacaaccctaagaggtcctgtggtaggaatattgacaaatcagagggtgctaattgcttctgctgatcttgatatactatcaagcagctcaacaaagtttgatcgtggtctcccatcatatcggtcaatgttgtgggttggaccagcacttatcttctcaagcgcaactgcaataagtatgcttgggtgggacaacaaagtccgatcaatcctctccactagcttccctcgctcagtattacttggtgcattgaatgaccgcctactgcttgtaaatccgacggatataaacccaagacagaaaaagggagtggaaataagggcctgtttagttgggcttcttgaacctcttctcattggatttgctaccatgcagcaacacttcgagcaaaaacttgatctttcagaagtcctgtaccaaataacctcgaggtttgatagtttacggatcactccaaggtcattggacatattaactaaaggacctcctgtttgtggagaccttgctgtatcattatctcaagcaggacctcagtttacccaaatcatgcgctgcaattatgcaatcaaagctctccggttctctactgcgctgtcaattttgaaagatgagttcctgcgctccagagattatcctcaatgccctcccacttctcatctgttccagcgtttccgagaattgggatatgcatgtataaagtatggtcagtttgacagtgcaaaagaaacttttgaggttattacagatcacgagagcatgctggatctatttatttgtcacctgaacccaagtgcattgcgacgccttgcacaaaagttagaggaatctgctacagattctgagctgaggcgataccttgagagaatattaagagttcgttcgactggatggacacagggtgtattcgccaattttgctgctgaaagtatggttcctaaaggccctgaatgggcaggaggaaactgggagatcaaaacacctaccaacattaagaatatacctcagtgggagcttgcaggagaagtcatgccttatatgaagacaactgatgctggtatcccatctgttgttgcagatcatattggtgtgtacctgggtgtgatgaaaggaaggggtaatgttgtggaagtaagtgaaaagagtttggttaaagctatagctgcagctagcagtgagaacacacagccggtgtcttctgcatcagcagagaaaagtaaggcaattcctcgtggtgattcggttggtgatactttggcaaggcaactgggagtccagattgcatcttctgatgaacaggcaaaagctgccgaggacttcaagaagactttatatggtgttgttgatgatggaagtagtgatgaagacgagtcaacctcaaagactaaaaagatacatataaggatacgtgataaaccggctgcacctactgtagatgtcaacaaattgaaagaagccactaaacagctaggcttgggtcctccgctgagtaggacaaggtcattatcagggacacctcaagacttcaatcaggctcctacacaaccaggaggtccagccgcagctgtttccccagcaatgccaaattctgcgattgatttatttggaacaaatactttagtgcagccgcaagcaccctctagttccacaggtcctgttattgcaggcatgggagtgacggctgggccgatccctgaggacttcttccagaacactattccatcgcatcaacttgcggctcaactacctcctcctggaatagtcctgtcacggatggctcaacccgctcctggcattgaacaaggccgaccagtacctaatcaaatgatggctaatgttggtcttccagatgatggggtgccaccacaagcaccaccgcagcagtcccagtttcctccgcagcagtcccagtttcctcagcaaccaggcattcctatggattctattggcctgcctgatggtggtgtccccccacagagtcagccacttccttcacaaggccagtttcttccttcacaggcacagggctttcaacttggtattcctgctccatcacaaccaattgatctcagcgctctcgagggtcctggagcggcgaagcaagctgctcgccctccagcacctactgctgtgcggcctggccaggtaccacgcggggcccctgctgcagaatgctacaagatggctcttgctcatcttgagcagaatcagcttaccgatgcactatcttgtttggacgaagcattcttagcccttgcaaaggaccagtcacgtgaagccgacatcaaagcgcaggccaccatttgtgctcagtacaagatcgcagttgctctgctgcaggaaattgctcgtctgcaaagggttcaaggagctggtgctctcagtgcgaaggaggaaatggccaggctatctcggcaccttgcttccctgcccatccaggccaagcacaggatcaactgcatcaggaccgccatcaagcggaacatggaggtccagaactacgcctacgccaagcagatgctggacctcctctactccaaggcgcccccgacgaagcaggacgagctcaagagcctgatcgacatgtgcgtccagaggggcctgacgaacaaatccatcgacccgttcgaggacccctcgcagttctgctccgtgaccctcagccggctgtcgaccatcggccacgacgtgtgcgacctctgcggcgccaagttctcggcgctctccgcacccggttgcgtcatctgtggcatggggagcatcaagagatccgacgccctcgctggtgggcctggacccgtgccgtcacctttcggctgaaggtcgagtctgctcctttcgtcctccatcggtcctgatattgtatctatagtgttcagtttgcgttcattacattcgattcgttgcagcttgtattgtatgtagcctttttgacgtgtagcacgcttggtgttgagagcaatgtacacctgtactgttgggttggttgtgattatacacgcggttttttttggagctagcaatgtaaggtgcatgtgcatatctgagacgcgaacgtcgacgtgaaacgttctagtctccatagttggtaaatacagttactgcagaaactcgcatctatacgat

SEQ ID NO: 4783 - DNA, 5413 bp, Zea Mays
ctgctccttcagaacagagatctgtactcgagaaggttgcttcgcagcagactgctgaaggccggtggtcaggcggccggacgcagggtggggcgtgggggacagggagggtctccggccaggcaaattcggctcagggtggcagccaaacaagcccctgatgccggagcagtctagatccggcgccccgatggagtggacgacggtgcagcacctggatctccgccactccggcggccgccgcggtgcctcggcccgccctatgcagccgcacgccgctgccttccgctcctcccaggccatcgtcgctgtggccatcggcacccacgtcgtcgagttcgatgctctgtcgggaagcaagatagcttctattgaccttggtgcccgtgttgttcgtatggcatatagccctacaactagtcatgttgtcattgctattcttgaggatgctacaatcagatcctgtgatttcgccacggagcagacacttgtgctgcattcgcctgagaaaaaaacagatcatgtttcaatagatactgaagtccatcttgcattgacacctcttgagcctattgtattttttggtttccacaaaagaatgagtgtaacagggactgttgatggagggagaccgccaacaaaaataaagactgatcttaaaaaacccattgttaacctggcttgccatccccgcctccctgtcttgtatgtagcttatgctgaaggcttgatacgcgcctacaatatccagacatatgctgtacactataccttacaacttgctgttgacagtacaattaagctaattggagctggtgcttttgggtttcacccgaccctagagtggatatttgttggtgatagaggtggtactctcctggcatgggatgtatcaactgagaggccaagtatgattggcattacacaggctggttcccatcctatcacatctgtatcctggcttcctacactgcggctgcttgttactatttcaaaggatggagcactccaagtgtggaagacacgagttataataaaccctaacagacaaccaatggaaactcatttctttgagcgtgcagctgttgaaacaatggatatcacaaaaatactaactcttcaaggtggagaagcagtgtacccattaccccgaattaaaaatttggcagtgcatcccaaattcaatttggctgcagtaatttttgcggatatgtctgggacagaagctgcaaagaacaaagctgcatacacaagagaagggaggagacaactttttgctcttcttcagggagctaggggatcaactgctgctgttttaaaggagaaactattagccttgggatcatctggaatattagcagagcatcaacttcaggcacaactacaagagcagcacttgaagggccagagccagctgactatttcagatgttgcaaggaaggcattccttcacagtcatttcatggaagggcatgctcaaagcggtccaatccctcgcctacctcttgttacaatttcagattctagcaaccttttgcgagatgttcctgtttgtcagccattccatctagagctgaatttcttcaacaaggaaacccgtgttgttcagtatccagttagagctttctatttggatggatttaacctgatggcccataacttatcatctggggctgacaatctctataagaagctttactcaacgattccttcgaatgtggaatgccatcccacgaatatgtcatacagcccaaaacagcatttatttcttgtcgtgtttgaattaagtggtacaaatggagtggtacatgaagttgttctttactgggagcagactgatctacagacagtgaacagcaaaggaagttccataagaggtcgagatgctgcttttttgggcccagatgataatcaatatgctattctggaggaagatagaactggtctgaatctctttagtctcaaagctgtagctacaaaggaagctcttgaaaataatgctgctgtgcttgaagaaaacacttttgctgataatgctgctagtgctacctcaacggaacgtcaaggtcctctacagtttacttttgaatcagaggttgatcgcatattttcttctcctctagaatcaaccttgttgtatgttatttctggaaagcatattggacttgcgaagcttctgcagggatataggctgtctgcagacaacgggctatccattacaacaaaaactgatgggaagaagtttattaagttgaaaccaaatgagactgttcttcaggcccactggcaaacaaccctaagaggtcctgtggtaggaatattgacaaatcagagggtgctaattgcttctgctgatcttgatatactatcaagcagctcaacaaagtttgatcgtggtctcccatcatatcggtcaatgttgtgggttggaccagcacttatcttctcaagcgcaactgcaataagtatgcttgggtgggacaacaaagtccgatcaatcctctccactagcttccctcgctcagtattacttggtgcattgaatgaccgcctactgcttgtaaatccgacggatataaacccaagacagaaaaagggagtggaaataagggcctgtttagttgggcttcttgaacctcttctcattggatttgctaccatgcagcaacacttcgagcaaaaacttgatctttcagaagtcctgtaccaaataacctcgaggtttgatagtttacggatcactccaaggtcattggacatattaactaaaggacctcctgtttgtggagaccttgctgtatcattatctcaagcaggacctcagtttacccaaatcatgcgctgcaattatgcaatcaaagctctccggttctctactgcgctgtcaattttgaaagatgagttcctgcgctccagagattatcctcaatgccctcccacttctcatctgttccagcgtttccgagaattgggatatgcatgtataaagtatggtcagtttgacagtgcaaaagaaacttttgaggttattacagatcacgagagcatgctggatctatttatttgtcacctgaacccaagtgcattgcgacgccttgcacaaaagttagaggaatctgctacagattctgagctgaggcgataccttgagagaatattaagagttcgttcgactggatggacacagggtgtattcgccaattttgctgctgaaagtatggttcctaaaggccctgaatgggcaggaggaaactgggagatcaaaacacctaccaacattaagaatatacctcagtgggagcttgcaggagaagtcatgccttatatgaagacaactgatgctggtatcccatctgttgttgcagatcatattggtgtgtacctgggtgtgatgaaaggaaggggtaatgttgtggaagtaagtgaaaagagtttggttaaagctatagctgcagctagcagtgagaacacacagccggtgtcttctgcatcagcagagaaaagtaaggcaattcctcgtggtgattcggttggtgatactttggcaaggcaactgggagtccagattgcatcttctgatgaacaggcaaaagctgccgaggacttcaagaagactttatatggtgttgttgatgatggaagtagtgatgaagacgagtcaacctcaaagactaaaaagatacatataaggatacgtgataaaccggctgcacctactgtagatgtcaacaaattgaaagaagccactaaacagctaggcttgggtcctccgctgagtaggacaaggtcattatcagggacacctcaagacttcaatcaggctcctacacaaccaggaggtccagccgcagctgtttccccagcaatgccaaattctgcgattgatttatttggaacaaatactttagtgcagccgcaagcaccctctagttccacaggtcctgttattgcaggcatgggagtgacggctgggccgatccctgaggacttcttccagaacactattccatcgcatcaacttgcggctcaactacctcctcctggaatagtcctgtcacggatggctcaacccgctcctggcattgaacaaggccgaccagtacctaatcaaatgatggctaatgttggtcttccagatgatggggtgccaccacaagcaccaccgcagcagtcccagtttcctccgcagcagtcccagtttcctcagcaaccaggcattcctatggattctattggcctgcctgatggtggtgtccccccacagagtcagccacttccttcacaaggccagtttcttccttcacaggcacagggctttcaacttggtattcctgctccatcacaaccaattgatctcagcgctctcgagggtcctggagcggcgaagcaagctgctcgccctccagcacctactgctgtgcggcctggccaggtaccacgcggggcccctgctgcagaatgctacaagatggctcttgctcatcttgagcagaatcagcttaccgatgcactatcttgtttggacgaagcattcttagcccttgcaaaggaccagtcacgtgaagccgacatcaaagcgcaggccaccatttgtgctcagtacaagatcgcagttgctctgctgcaggaaattgctcgtctgcaaagggttcaaggagctggtgctctcagtgcgaaggaggaaatggccaggctatctcggcaccttgcttccctgcccatccaggccaagcacaggatcaactgcatcaggaccgccatcaagcggaacatggaggtccagaactacgcctacgccaagcagatgctggacctcctctactccaaggcgcccccgacgaagcaggacgagctcaagagcctgatcgacatgtgcgtccagaggggcctgacgaacaaatccatcgacccgttcgaggacccctcgcagttctgctccgtgaccctcagccggctgtcgaccatcggccacgacgtgtgcgacctctgcggcgccaagttctcggcgctctccgcacccggttgcgtcatctgtggcatggggagcatcaagagatccgacgccctcgctggtgggcctggacccgtgccgtcacctttcggctgaaggtcgagtctgctcctttcgtcctccatcggtcctgatattgtatctatagtgttcagtttgcgttcattacattcgattcgttgcagcttgtattgtatgtagcctttttgacgtgtagcacgcttggtgttgagagcaatgtacacctgtactgttgggttggttgtgattatacacgcggttttttttggagctagcaatgtaaggtgcatgtgcatatctgagacgcgaacgtcgacgtgaaacgttctagtctccatagttggtaaatacagttactgcagaaactcgcatctatacgat

SEQ ID NO: 4784 - DNA, 5384 bp, Zea Mays
cgagaaggttgcttcgcagcagactgctgaaggccggtggtcaggcggccggacgcagggtggggcgtgggggacagggagggtctccggccaggcaaattcggctcagggtggcagccaaacaagcccctgatgccggagcagtctagatccggcgccccgatggagtggacgacggtgcagcacctggatctccgccactccggcggccgccgcggtgcctcggcccgccctatgcagccgcacgccgctgccttccgctcctcccaggccatcgtcgctgtggccatcggcacccacgtcgtcgagttcgatgctctgtcgggaagcaagatagcttctattgaccttggtgcccgtgttgttcgtatggcatatagccctacaactagtcatgttgtcattgctattcttgaggatgctacaatcagatcctgtgatttcgccacggagcagacacttgtgctgcattcgcctgagaaaaaaacagatcatgtttcaatagatactgaagtccatcttgcattgacacctcttgagcctattgtattttttggtttccacaaaagaatgagtgtaacagttgtagggactgttgatggagggagaccgccaacaaaaataaagactgatcttaaaaaacccattgttaacctggcttgccatccccgcctccctgtcttgtatgtagcttatgctgaaggcttgatacgcgcctacaatatccagacatatgctgtacactataccttacaacttgctgttgacagtacaattaagctaattggagctggtgcttttgggtttcacccgaccctagagtggatatttgttggtgatagaggtggtactctcctggcatgggatgtatcaactgagaggccaagtatgattggcatgctggttcccatcctatcacatctgtatcctggcttcctacactgcggctgcttgttactatttcaaaggatggagcactccaagtgtggaagacacgagttataataaaccctaacagacaaccaatggaaactcatttctttgagcgtgcagctgttgaaacaatggatatcacaaaaatactaactcttcaaggtggagaagcagtgtacccattaccccgaattaaaaatttggcagtgcatcccaaattcaatttggctgcagtaatttttgcggatatgtctgggacagaagctgcaaagaacaaagctgcatacacaagagaagggaggagacaactttttgctcttcttcagggagctaggggatcaactgctgctgttttaaaggagaaactattagccttgggatcatctggaatattagcagagcatcaacttcaggcacaactacaagagcagcacttgaagggccagagccagctgactatttcagatgttgcaaggaaggcattccttcacagtcatttcatggaagggcatgctcaaagcggtccaatccctcgcctacctcttgttacaatttcagattctagcaaccttttgcgagatgttcctgtttgtcagccattccatctagagctgaatttcttcaacaaggaaacccgtgttgttcagtatccagttagagctttctatttggatggatttaacctgatggcccataacttatcatctggggctgacaatctctataagaagctttactcaacgattccttcgaatgtggaatgccatcccacgaatatgtcatacagcccaaaacagcatttatttcttgtcgtgtttgaattaagtggtacaaatggagtggtacatgaagttgttctttactgggagcagactgatctacagacagtgaacagcaaaggaagttccataagaggtcgagatgctgcttttttgggcccagatgataatcaatatgctattctggaggaagatagaactggtctgaatctctttagtctcaaagctgtagctacaaaggaagctcttgaaaataatgctgctgtgcttgaagaaaacacttttgctgataatgctgctagtgctacctcaacggaacgtcaaggtcctctacagtttacttttgaatcagaggttgatcgcatattttcttctcctctagaatcaaccttgttgtatgttatttctggaaagcatattggacttgcgaagcttctgcagggatataggctgtctgcagacaacgggctatccattacaacaaaaactgatgggaagaagtttattaagttgaaaccaaatgagactgttcttcaggcccactggcaaacaaccctaagaggtcctgtggtaggaatattgacaaatcagagggtgctaattgcttctgctgatcttgatatactatcaagcagctcaacaaagtttgatcgtggtctcccatcatatcggtcaatgttgtgggttggaccagcacttatcttctcaagcgcaactgcaataagtatgcttgggtgggacaacaaagtccgatcaatcctctccactagcttccctcgctcagtattacttggtgcattgaatgaccgcctactgcttgtaaatccgacggatataaacccaagacagaaaaagggagtggaaataagggcctgtttagttgggcttcttgaacctcttctcattggatttgctaccatgcagcaacacttcgagcaaaaacttgatctttcagaagtcctgtaccaaataacctcgaggtttgatagtttacggatcactccaaggtcattggacatattaactaaaggacctcctgtttgtggagaccttgctgtatcattatctcaagcaggacctcagtttacccaaatcatgcgctgcaattatgcaatcaaagctctccggttctctactgcgctgtcaattttgaaagatgagttcctgcgctccagagattatcctcaatgccctcccacttctcatctgttccagcgtttccgagaattgggatatgcatgtataaagtatggtcagtttgacagtgcaaaagaaacttttgaggttattacagatcacgagagcatgctggatctatttatttgtcacctgaacccaagtgcattgcgacgccttgcacaaaagttagaggaatctgctacagattctgagctgaggcgataccttgagagaatattaagagttcgttcgactggatggacacagggtgtattcgccaattttgctgctgaaagtatggttcctaaaggccctgaatgggcaggaggaaactgggagatcaaaacacctaccaacattaagaatatacctcagtgggagcttgcaggagaagtcatgccttatatgaagacaactgatgctggtatcccatctgttgttgcagatcatattggtgtgtacctgggtgtgatgaaaggaaggggtaatgttgtggaagtaagtgaaaagagtttggttaaagctatagctgcagctagcagtgagaacacacagccggtgtcttctgcatcagcagagaaaagtaaggcaattcctcgtggtgattcggttggtgatactttggcaaggcaactgggagtccagattgcatcttctgatgaacaggcaaaagctgccgaggacttcaagaagactttatatggtgttgttgatgatggaagtagtgatgaagacgagtcaacctcaaagactaaaaagatacatataaggatacgtgataaaccggctgcacctactgtagatgtcaacaaattgaaagaagccactaaacagctaggcttgggtcctccgctgagtaggacaaggtcattatcagggacacctcaagacttcaatcaggctcctacacaaccaggaggtccagccgcagctgtttccccagcaatgccaaattctgcgattgatttatttggaacaaatactttagtgcagccgcaagcaccctctagttccacaggtcctgttattgcaggcatgggagtgacggctgggccgatccctgaggacttcttccagaacactattccatcgcatcaacttgcggctcaactacctcctcctggaatagtcctgtcacggatggctcaacccgctcctggcattgaacaaggccgaccagtacctaatcaaatgatggctaatgttggtcttccagatgatggggtgccaccacaagcaccaccgcagcagtcccagtttcctccgcagcagtcccagtttcctcagcaaccaggcattcctatggattctattggcctgcctgatggtggtgtccccccacagagtcagccacttccttcacaaggccagtttcttccttcacaggcacagggctttcaacttggtattcctgctccatcacaaccaattgatctcagcgctctcgagggtcctggagcggcgaagcaagctgctcgccctccagcacctactgctgtgcggcctggccaggtaccacgcggggcccctgctgcagaatgctacaagatggctcttgctcatcttgagcagaatcagcttaccgatgcactatcttgtttggacgaagcattcttagcccttgcaaaggaccagtcacgtgaagccgacatcaaagcgcaggccaccatttgtgctcagtacaagatcgcagttgctctgctgcaggaaattgctcgtctgcaaagggttcaaggagctggtgctctcagtgcgaaggaggaaatggccaggctatctcggcaccttgcttccctgcccatccaggccaagcacaggatcaactgcatcaggaccgccatcaagcggaacatggaggtccagaactacgcctacgccaagcagatgctggacctcctctactccaaggcgcccccgacgaagcaggacgagctcaagagcctgatcgacatgtgcgtccagaggggcctgacgaacaaatccatcgacccgttcgaggacccctcgcagttctgctccgtgaccctcagccggctgtcgaccatcggccacgacgtgtgcgacctctgcggcgccaagttctcggcgctctccgcacccggttgcgtcatctgtggcatggggagcatcaagagatccgacgccctcgctggtgggcctggacccgtgccgtcacctttcggctgaaggtcgagtctgctcctttcgtcctccatcggtcctgatattgtatctatagtgttcagtttgcgttcattacattcgattcgttgcagcttgtattgtatgtagcctttttgacgtgtagcacgcttggtgttgagagcaatgtacacctgtactgttgggttggttgtgattatacacgcggttttttttggagctagcaatgtaaggtgcatgtgcatatctgagacgcgaacgtcgacgtgaaacgttctagtctccatagttggtaaatacagttactgcagaaactcgcatctatacgat

SEQ ID NO: 4785 - DNA, 4093 bp, Zea Mays
ctcagtgctgcagaaaacaaataaattaggaatgcttgacaatgaggccttccaaagaatcttgtgcatactttagtgctgccatcctgccatgtcacccgtgttgccacattcaagcacaggctttcctaatgtgcatttcatggaagggcatgctcaaagcggtccaatccctcgcctacctcttgttacaatttcagattctagcaaccttttgcgagatgttcctgtttgtcagccattccatctagagctgaatttcttcaacaaggaaacccgtgttgttcagtatccagttagagctttctatttggatggatttaacctgatggcccataacttatcatctggggctgacaatctctataagaagctttactcaacgattccttcgaatgtggaatgccatcccacgaatatgtcatacagcccaaaacagcatttatttcttgtcgtgtttgaattaagtggtacaaatggagtggtacatgaagttgttctttactgggagcagactgatctacagacagtgaacagcaaaggaagttccataagaggtcgagatgctgcttttttgggcccagatgataatcaatatgctattctggaggaagatagaactggtctgaatctctttagtctcaaagctgtagctacaaaggaagctcttgaaaataatgctgctgtgcttgaagaaaacacttttgctgataatgctgctagtgctacctcaacggaacgtcaaggtcctctacagtttacttttgaatcagaggttgatcgcatattttcttctcctctagaatcaaccttgttgtatgttatttctggaaagcatattggacttgcgaagcttctgcagggatataggctgtctgcagacaacgggctatccattacaacaaaaactgatgggaagaagtttattaagttgaaaccaaatgagactgttcttcaggcccactggcaaacaaccctaagaggtcctgtggtaggaatattgacaaatcagagggtgctaattgcttctgctgatcttgatatactatcaagcagctcaacaaagtttgatcgtggtctcccatcatatcggtcaatgttgtgggttggaccagcacttatcttctcaagcgcaactgcaataagtatgcttgggtgggacaacaaagtccgatcaatcctctccactagcttccctcgctcagtattacttggtgcattgaatgaccgcctactgcttgtaaatccgacggatataaacccaagacagaaaaagggagtggaaataagggcctgtttagttgggcttcttgaacctcttctcattggatttgctaccatgcagcaacacttcgagcaaaaacttgatctttcagaagtcctgtaccaaataacctcgaggtttgatagtttacggatcactccaaggtcattggacatattaactaaaggacctcctgtttgtggagaccttgctgtatcattatctcaagcaggacctcagtttacccaaatcatgcgctgcaattatgcaatcaaagctctccggttctctactgcgctgtcaattttgaaagatgagttcctgcgctccagagattatcctcaatgccctcccacttctcatctgttccagcgtttccgagaattgggatatgcatgtataaagtatggtcagtttgacagtgcaaaagaaacttttgaggttattacagatcacgagagcatgctggatctatttatttgtcacctgaacccaagtgcattgcgacgccttgcacaaaagttagaggaatctgctacagattctgagctgaggcgataccttgagagaatattaagagttcgttcgactggatggacacagggtgtattcgccaattttgctgctgaaagtatggttcctaaaggccctgaatgggcaggaggaaactgggagatcaaaacacctaccaacattaagaatatacctcagtgggagcttgcaggagaagtcatgccttatatgaagacaactgatgctggtatcccatctgttgttgcagatcatattggtgtgtacctgggtgtgatgaaaggaaggggtaatgttgtggaagtaagtgaaaagagtttggttaaagctatagctgcagctagcagtgagaacacacagccggtgtcttctgcatcagcagagaaaagtaaggcaattcctcgtggtgattcggttggtgatactttggcaaggcaactgggagtccagattgcatcttctgatgaacaggcaaaagctgccgaggacttcaagaagactttatatggtgttgttgatgatggaagtagtgatgaagacgagtcaacctcaaagactaaaaagatacatataaggatacgtgataaaccggctgcacctactgtagatgtcaacaaattgaaagaagccactaaacagctaggcttgggtcctccgctgagtaggacaaggtcattatcagggacacctcaagacttcaatcaggctcctacacaaccaggaggtccagccgcagctgtttccccagcaatgccaaattctgcgattgatttatttggaacaaatactttagtgcagccgcaagcaccctctagttccacaggtcctgttattgcaggcatgggagtgacggctgggccgatccctgaggacttcttccagaacactattccatcgcatcaacttgcggctcaactacctcctcctggaatagtcctgtcacggatggctcaacccgctcctggcattgaacaaggccgaccagtacctaatcaaatgatggctaatgttggtcttccagatgatggggtgccaccacaagcaccaccgcagcagtcccagtttcctccgcagcagtcccagtttcctcagcaaccaggcattcctatggattctattggcctgcctgatggtggtgtccccccacagagtcagccacttccttcacaaggccagtttcttccttcacaggcacagggctttcaacttggtattcctgctccatcacaaccaattgatctcagcgctctcgagggtcctggagcggcgaagcaagctgctcgccctccagcacctactgctgtgcggcctggccaggtaccacgcggggcccctgctgcagaatgctacaagatggctcttgctcatcttgagcagaatcagcttaccgatgcactatcttgtttggacgaagcattcttagcccttgcaaaggaccagtcacgtgaagccgacatcaaagcgcaggccaccatttgtgctcagtacaagatcgcagttgctctgctgcaggaaattgctcgtctgcaaagggttcaaggagctggtgctctcagtgcgaaggaggaaatggccaggctatctcggcaccttgcttccctgcccatccaggccaagcacaggatcaactgcatcaggaccgccatcaagcggaacatggaggtccagaactacgcctacgccaagcagatgctggacctcctctactccaaggcgcccccgacgaagcaggacgagctcaagagcctgatcgacatgtgcgtccagaggggcctgacgaacaaatccatcgacccgttcgaggacccctcgcagttctgctccgtgaccctcagccggctgtcgaccatcggccacgacgtgtgcgacctctgcggcgccaagttctcggcgctctccgcacccggttgcgtcatctgtggcatggggagcatcaagagatccgacgccctcgctggtgggcctggacccgtgccgtcacctttcggctgaaggtcgagtctgctcctttcgtcctccatcggtcctgatattgtatctatagtgttcagtttgcgttcattacattcgattcgttgcagcttgtattgtatgtagcctttttgacgtgtagcacgcttggtgttgagagcaatgtacacctgtactgttgggttggttgtgattatacacgcggttttttttggagctagcaatgtaaggtgcatgtgcatatctgagacgcgaacgtcgacgtgaaacgttctagtctccatagttggtaaatacagttactgcagaaactcgcatctatacgat

SEQ ID NO: 4786 - DNA, 4174 bp, Zea Mays
ctgagtcgagtccttatccattgcatttcatggaagggcatgctcaaagcggtccaatccctcgcctacctcttgttacaatttcagattctagcaaccttttgcgagatgttcctgtttgtcaggtaaccgttagagtaatttatttttttatttacttgctctctttttgttctctaaacaattagttgattttgcaactccagccattccatctagagctgaatttcttcaacaaggaaacccgtgttgttcagtatccagttagagctttctatttggatggatttaacctgatggcccataacttatcatctggggctgacaatctctataagaagctttactcaacgattccttcgaatgtggaatgccatcccacgaatatgtcatacagcccaaaacagcatttatttcttgtcgtgtttgaattaagtggtacaaatggagtggtacatgaagttgttctttactgggagcagactgatctacagacagtgaacagcaaaggaagttccataagaggtcgagatgctgcttttttgggcccagatgataatcaatatgctattctggaggaagatagaactggtctgaatctctttagtctcaaagctgtagctacaaaggaagctcttgaaaataatgctgctgtgcttgaagaaaacacttttgctgataatgctgctagtgctacctcaacggaacgtcaaggtcctctacagtttacttttgaatcagaggttgatcgcatattttcttctcctctagaatcaaccttgttgtatgttatttctggaaagcatattggacttgcgaagcttctgcagggatataggctgtctgcagacaacgggctatccattacaacaaaaactgatgggaagaagtttattaagttgaaaccaaatgagactgttcttcaggcccactggcaaacaaccctaagaggtcctgtggtaggaatattgacaaatcagagggtgctaattgcttctgctgatcttgatatactatcaagcagctcaacaaagtttgatcgtggtctcccatcaatatccttttatcttagtcttgcatatacccccctccttatcgtgttatgcaatcacacttgttatctgttctaaataaccatttctttggtgagcacttaaccattttatactatcggtcaatgttgtgggttggaccagcacttatcttctcaagcgcaactgcaataagtatgcttgggtgggacaacaaagtccgatcaatcctctccactagcttccctcgctcagtattacttggtgcattgaatgaccgcctactgcttgtaaatccgacggatataaacccaagacagaaaaagggagtggaaataagggcctgtttagttgggcttcttgaacctcttctcattggatttgctaccatgcagcaacacttcgagcaaaaacttgatctttcagaagtcctgtaccaaataacctcgaggtttgatagtttacggatcactccaaggtcattggacatattaactaaaggacctcctgtttgtggagaccttgctgtatcattatctcaagcaggacctcagtttacccaaatcatgcgctgcaattatgcaatcaaagctctccggttctctactgcgctgtcaattttgaaagatgagttcctgcgctccagagattatcctcaatgccctcccacttctcatctgttccagcgtttccgagaattgggatatgcatgtataaagtatggtcagtttgacagtgcaaaagaaacttttgaggttattacagatcacgagagcatgctggatctatttatttgtcacctgaacccaagtgcattgcgacgccttgcacaaaagttagaggaatctgctacagattctgagctgaggcgataccttgagagaatattaagagttcgttcgactggatggacacagggtgtattcgccaattttgctgctgaaagtatggttcctaaaggccctgaatgggcaggaggaaactgggagatcaaaacacctaccaacattaagaatatacctcagtgggagcttgcaggagaagtcatgccttatatgaagacaactgatgctggtatcccatctgttgttgcagatcatattggtgtgtacctgggtgtgatgaaaggaaggggtaatgttgtggaagtaagtgaaaagagtttggttaaagctatagctgcagctagcagtgagaacacacagccggtgtcttctgcatcagcagagaaaagtaaggcaattcctcgtggtgattcggttggtgatactttggcaaggcaactgggagtccagattgcatcttctgatgaacaggcaaaagctgccgaggacttcaagaagactttatatggtgttgttgatgatggaagtagtgatgaagacgagtcaacctcaaagactaaaaagatacatataaggatacgtgataaaccggctgcacctactgtagatgtcaacaaattgaaagaagccactaaacagctaggcttgggtcctccgctgagtaggacaaggtcattatcagggacacctcaagacttcaatcaggctcctacacaaccaggaggtccagccgcagctgtttccccagcaatgccaaattctgcgattgatttatttggaacaaatactttagtgcagccgcaagcaccctctagttccacaggtcctgttattgcaggcatgggagtgacggctgggccgatccctgaggacttcttccagaacactattccatcgcatcaacttgcggctcaactacctcctcctggaatagtcctgtcacggatggctcaacccgctcctggcattgaacaaggccgaccagtacctaatcaaatgatggctaatgttggtcttccagatgatggggtgccaccacaagcaccaccgcagcagtcccagtttcctccgcagcagtcccagtttcctcagcaaccaggcattcctatggattctattggcctgcctgatggtggtgtccccccacagagtcagccacttccttcacaaggccagtttcttccttcacaggcacagggctttcaacttggtattcctgctccatcacaaccaattgatctcagcgctctcgagggtcctggagcggcgaagcaagctgctcgccctccagcacctactgctgtgcggcctggccaggtaccacgcggggcccctgctgcagaatgctacaagatggctcttgctcatcttgagcagaatcagcttaccgatgcactatcttgtttggacgaagcattcttagcccttgcaaaggaccagtcacgtgaagccgacatcaaagcgcaggccaccatttgtgctcagtacaagatcgcagttgctctgctgcaggaaattgctcgtctgcaaagggttcaaggagctggtgctctcagtgcgaaggaggaaatggccaggctatctcggcaccttgcttccctgcccatccaggccaagcacaggatcaactgcatcaggaccgccatcaagcggaacatggaggtccagaactacgcctacgccaagcagatgctggacctcctctactccaaggcgcccccgacgaagcaggacgagctcaagagcctgatcgacatgtgcgtccagaggggcctgacgaacaaatccatcgacccgttcgaggacccctcgcagttctgctccgtgaccctcagccggctgtcgaccatcggccacgacgtgtgcgacctctgcggcgccaagttctcggcgctctccgcacccggttgcgtcatctgtggcatggggagcatcaagagatccgacgccctcgctggtgggcctggacccgtgccgtcacctttcggctgaaggtcgagtctgctcctttcgtcctccatcggtcctgatattgtatctatagtgttcagtttgcgttcattacattcgattcgttgcagcttgtattgtatgtagcctttttgacgtgtagcacgcttggtgttgagagcaatgtacacctgtactgttgggttggttgtgattatacacgcggttttttttggagctagcaatgtaaggtgcatgtgcatatctgagacgcgaacgtcgacgtgaaacgttctagtctccatagttggtaaatacagttactgcagaaactcgcatctatacgat

SEQ ID NO: 4787 - DNA, 2242 bp, Zea Mays
cctccttctcaggcttccccttcttcctccacatcgatcccctcccccctccactcgtctccaaaatcgccagcgagagccatgccgcctcctcccctgccctcgccgagcctgaccgactgaccccacctcgccactgttctttcccttccacctgggccccacagcgcccccttaccgtcgccaccaaatccccaaatcccggaggcacgaggagggaattcgtcgcctgaccgatcggccgatccactgccgtcggcaccccaatccgccgctgccgccatgttcaacaagatcatcaagaggggaaaccgcaagggcgcgcgcggggacaacgcggaggccgccgcgcgccccgcagcgccctcctcgtcctccgggagcggcggcggcggcgcgggggcagccgcgcccgtcaccgtcaaccacgcctcccgggccacagcgccttcgccgtcctcgcccacttcgccgcacgtggcgccgtctgcgcttgcgaccaacccggcgggggcggcgtcgccgccactcctcgagccgctcccgctcctccgcgacgtcgccgccgcggatcgcccgggcctcttcctccgcaagctccgcatcgtcgccgcgctctttgacctttcggactcgctcaagcacccgcgggagaaggaggccaaacgccaggctctcctcgagctcgtcgattacgtgcaggctccagctcaggctgcgggcgccaacgcacccacgcgcctcccggaccacgtccaggaggcgctcgtcgccgccatctctgccaacatcttccgcccgctgccacccgcgctgcacgaatccgccgccgcgatcgaccccggcgccgcgcccgacgaggaggaggagccatacctcgacccctcctggccacacctccagctcgtctatgagctccttctccgatacgttgtttcgcccgacaccgacaccaaggtcgccaagcggtatgtggaccacgccttcgtcctccgtctcctcgacctctttgactccgaggatccgcgtgagcgcgagtacctcaagaccgtgctccaccgcatctatggcaagttcatggtacaccgaccattcattcgcaaggccatcaacaatgtgttctaccggttcatctttgaaacgcagcgccacaatggcataggggagctccttgagatccttggaagcatcattaatggctttgccttgccaatgaaggaggagcacaagctattccttgcccgtgctctcatccccctgcataagcccaaatctgttgcgatctaccatcagcagctgtcctattgtattgttcagttcgttgagaaggactacaaattagcagatactgtgattaggggtctgctcaaatactggccagtcacaaactgccagaaagaggtgttgtttctgggggagcttgaagaagtgctcgaggcaacacagcctgcagagttccagcggtgcatggtgccactgttcaagcagattggacgatgccttaacagttctcacttccaggttgctgaacgtgctttgttcttgtggaacaatgatcatattgtaagcttgatagcacaaaatcgtgttgttatatttccaattatatttgaagctcttgagaggaatatacagagccactggaatcaagcagttcatggtctcactgcaaatgtgcgcaagatgtttttggacatggacagtgaactatttgaagagtgccagcagcagtacatggagaaacaagcgaaagccaaagagatacaggaacaacgagaatcagcatggagacaattggaagctgttgttgctgccaaggctgctggagatgacatggttttggtcaactagatcataccatcttggctggattttgaagtttggcggttggcacagcagtttacaatctttgagacttgcactcagaggtcgtctgttaaaaacgtccctcatttagttgtcaacagttccgtcgtcgttcgtgtctttcaagcagcctcccgaggcacccatagttcttcccttccgatgacggttgggcttgtgtggccattggatccaaaggtgatggctggaggtccttatcggtagctgagcacgacctttagggtccgtttggttgcaatgacaggacgagatagaatgtaacgattactcaaataaggttgtttggtttagggtcaagggttgggatagaattatctcagtgtttttccaatttatccttcaaaattgaaagaac

SEQ ID NO: 4788 - DNA, 2425 bp, Zea Mays
ccttctcaggcttccccttcttcctccacatcgatcccctcccccctccactcgtctccaaaatcgccagcgagagccatgccgcctcctcccctgccctcgccgagcctgaccgactgaccccacctcgccactgttctttcccttccacctgggccccacagcgcccccttaccgtcgccaccaaatccccaaatcccggaggcacgaggagggaattcgtcgcctgaccgatcggccgatccactgccgtcggcaccccaatccgccgctgccgccatgttcaacaagatcatcaagaggggaaaccgcaagggcgcgcgcggggacaacgcggaggccgccgcgcgccccgcagcgccctcctcgtcctccgggagcggcggcggcggcgcgggggcagccgcgcccgtcaccgtcaaccacgcctcccgggccacagcgccttcgccgtcctcgcccacttcgccgcacgtggcgccgtctgcgcttgcgaccaacccggcgggggcggcgtcgccgccactcctcgagccgctcccgctcctccgcgacgtcgccgccgcggatcgcccgggcctcttcctccgcaagctccgcatcgtcgccgcgctctttgacctttcggactcgctcaagcacccgcgggagaaggaggccaaacgccaggctctcctcgagctcgtcgattacgtgcaggctccagctcaggctgcgggcgccaacgcacccacgcgcctcccggaccacgtccaggaggcgctcgtcgccgccatctctgccaacatcttccgcccgctgccacccgcgctgcacgaatccgccgccgcgatcgaccccggcgccgcgcccgacgaggaggaggagccatacctcgacccctcctggccacacctccagctcgtctatgagctccttctccgatacgttgtttcgcccgacaccgacaccaaggtcgccaagcggtatgtggaccacgccttcgtcctccgtctcctcgacctctttgactccgaggatccgcgtgagcgcgagtacctcaagaccgtgctccaccgcatctatggcaagttcatggtacaccgaccattcattcgcaaggccatcaacaatgtgttctaccggttcatctttgaaacgcagcgccacaatggcataggggagctccttgagatccttggaagcatcattaatggctttgccttgccaatgaaggaggagcacaagctattccttgcccgtgctctcatccccctgcataagcccaaatctgttgcgatctaccatcagcagctgtcctattgtattgttcagttcgttgagaaggactacaaattagcagatactgtgattaggggtctgctcaaatactggccagtcacaaactgccagaaagaggtgttgtttctgggggagcttgaagaagtgctcgaggcaacacagcctgcagagttccagcggtgcatggtgccactgttcaagcagattggacgatgccttaacagttctcacttccaggttgctgaacgtgctttgttcttgtggaacaatgatcatattgtaagcttgatagcacaaaatcgtgttgttatatttccaattatatttgaagctcttgagaggaatatacagagccactggaatcaagcagttcatggtctcactgcaaatgtgcgcaagatgtttttggacatggacagtgaactatttgaagagtgccagcagcagtacatggagaaacaagcgaaagccaaagagatacaggaacaacgagaatcagcatggagacaattggaagctgttgttgctgccaaggctgctggagatgacatggttttggtcaactagatgatagctgctcacttatttcatgagcgtcatgtgcgcttatcgaggcaacaaggtatcggtgctagttgcggtgctcttatatcaacattgttgacttgggactatcagatccatgttccttgcatcagtgcaaaaaaatgcggaccgagtttgaacacattggcggcagcgaaagccaattcatgcagaatttctttgcctagtgagatcctgctgtagttctgagcccttgctttattcagcccctccttttctgttgtgttaatttatgaataattggactcttgtgttaatccttcagtgtctgccctagttacggacccacaattgggaaaatccaagtagagaaaattactgagctagattgaaatcttttcaatttatttttccttttttacttcttttctccttgttgggagttaatttcagttcatgttgttgtatggaggtaacagcacaaatgcagataaaagctcatctgtagtaggaactgtttcgacgttgctgtggttgttttagcaatataatggctcactggagagagagcaccaactattacccctctttggttcat

SEQ ID NO: 4789 - DNA, 1940 bp, Zea Mays
ctcaggcttccccttcttcctccacatcgatcccctcccccctccactcgtctccaaaatcgccagcgagagccatgccgcctcctcccctgccctcgccgagcctgaccgactgaccccacctcgccactgttctttcccttccacctgggccccacagcgcccccttaccgtcgccaccaaatccccaaatcccggaggcacgaggagggaattcgtcgcctgaccgatcggccgatccactgccgtcggcaccccaatccgccgctgccgccatgttcaacaagatcatcaagaggggaaaccgcaagggcgcgcgcggggacaacgcggaggccgccgcgcgccccgcagcgccctcctcgtcctccgggagcggcggcggcggcgcgggggcagccgcgcccgtcaccgtcaaccacgcctcccgggccacagcgccttcgccgtcctcgcccacttcgccgcacgtggcgccgtctgcgcttgcgaccaacccggcgggggcggcgtcgccgccactcctcgagccgctcccgctcctccgcgacgtcgccgccgcggatcgcccgggcctcttcctccgcaagctccgcatcgtcgccgcgctctttgacctttcggactcgctcaagcacccgcgggagaaggaggccaaacgccaggctctcctcgagctcgtcgattacgtgcaggctccagctcaggctgcgggcgccaacgcacccacgcgcctcccggaccacgtccaggaggcgctcgtcgccgccatctctgccaacatcttccgcccgctgccacccgcgctgcacgaatccgccgccgcgatcgaccccggcgccgcgcccgacgaggaggaggagccatacctcgacccctcctggccacacctccagctcgtctatgagctccttctccgatacgttgtttcgcccgacaccgacaccaaggtcgccaagcggtatgtggaccacgccttcgtcctccgtctcctcgacctctttgactccgaggatccgcgtgagcgcgagtacctcaagaccgtgctccaccgcatctatggcaagttcatggtacaccgaccattcattcgcaaggccatcaacaatgtgttctaccggttcatctttgaaacgcagcgccacaatggcataggggagctccttgagatccttggaagcatcattaatggctttgccttgccaatgaaggaggagcacaagctattccttgcccgtgctctcatccccctgcataagcccaaatctgttgcgatctaccatcagcagctgtcctattgtattgttcagttcgttgagaaggactacaaattagcagatactgtgattaggggtctgctcaaatactggccagtcacaaactgccagaaagaggtgttgtttctgggggagcttgaagaagtgctcgaggcaacacagcctgcagagttccagcggtgcatggtgccactgttcaagcagattggacgatgccttaacagttctcacttccaggttgctgaacgtgctttgttcttgtggaacaatgatcatattgtaagcttgatagcacaaaatcgtgttgttatatttccaattatatttgaagctcttgagaggaatatacagagccactggaatcaagcagttcatggtctcactgcaaatgtgcgcaagatgtttttggacatggacagtgaactatttgaagagtgccagcagcagtacatggagaaacaagcgaaagccaaagagatacaggaacaacgagaatcagcatggagacaattggaagctgttgttgctgccaaggctgctggagatgacatggttttggtcaactagcacaaatgcagataaaagctcatctgtagtaggaactgtttcgacgttgctgtggttgttttagcaatataatggctcactggtacgcccgattaa

SEQ ID NO: 4790 - DNA, 1395 bp, Zea Mays
caaagcaaaaaggccgacaagttttgctttcttttccccgtttcccaagagaaatttgacattatgaaacacgacgagtgcggcttcgacgaaatggaggctcaggagaggatttctccattatggaaaagctggacatagccaacactctaaaatggacatgactactctattaataggtttagagcagtattagtctcgttgaaaccgggtttcgtccccaagcgccgtcgccgtcagttttctgtcgctagatctcctccatccccgtcgcgttctcctccatctccgtcgtgttctcctccgtacccgtcgcgtcgctggacctggagctggatctcggagctgtccctccctccctcgcttcgctctgctctttcggctagtctaggcttgctccctgttgcttgctaggctaggctacccgcgcgtgcgaatacaccgtgccacgagctccgcgggtagaatcagctgagatcgttccggcgagccactagtggcgactgtggaagtgtggatcggtggaaccctgccttgcgcttcgtttgtttggtcggcgaaacgacgggaagcggtgttggtgttgggctctcacttcatttgtgcctctgacatttaactctacctctagcgttactgcgttaccagtgcgcgtccgtggggactggggactatgtgaaaccgcgtgtttggttcggtggaaggactatgtaaaaacattgtatcttcctttttcgattgacttgcaaatattaggatattgcttttagtgtgttagagttatggatagattcagactagcagcatgttactctttggaatcccaggacatgattatattttcagtaacaatgtacacatccccatgaataatgtacaagttgagttttcgtttgctaaagttggaaggaaaatttcgtttgacttgcactcaggattttagaaacaaaactatagcagtaaacatagtaacatacaaatatagggagggaatgaattcaccgtgaactgctcatattaattcttattagatggtaatgacatattgatatacatgaagtggtagggatccattttgccagtcaacagaaacaggttcagaaaatcagcaataccgaaatggaatttaaattttatacgctcattttttcaaacttcttttgagagttctcagttctaatacattgttcaagtgacacagaaccaccctgtacttttcttgcattatcgaagatcagccttcatgaaaattgtaaacatgcgcttcacttgaagttgatggttctgccttctatttccagaatccagagaaatctgccgttatatagcagaaaaagtatgaaaatcaaggatattcgttcctccttggaaaggatgcccttgagagggcttaag

SEQ ID NO: 4791 - DNA, 1316 bp, Zea Mays
gttgccgccccaccaacaggacaagacagcagccgctgccgttgccgctgccgctgccggctgccgctacctatgctcaagtgctcagtgctcaccgctctgcccctgcctcatcacacgcgcgcacggcgcacagataccttttctctcctctcccgtcccactctcctgggcaatcccggcccggcatggcgagcccgtcctcgtccccctcgcggaaggctctgagcaagatcgcctgcagccgcctgcagaaggagctcgcggagtggcaggtcaacccgcccgcgggcttcaagcacagggtcaccgacgacctccagaggtgcccctccgccatcgtcgcccttcctatcccctttcctcagcaggcaatccctgctgtgcggggtctcttagattcctttctccgtggctccgtgcttggctaccgttttcttgttcgcgagtctagcacgtccagcgccctggacgcgacgcgacgcgacgtgatacgtcgcgtgcgttttgggcttgtatacattggtttctttattattctctcgtcttctcttccaagggggtttcagcttgtatacattagaatctttcaagtgtttttgtgatcctggaagaaagaaaattttaagaaatgcaaaaataatggtggatgaaacaacaaaaaaaggtgggtcatcgatgtagcgggggcagcaggcacgctctacactggcgaaacctacaagttgcaggtggatttccccgagcattatccgatggaggcacctcaggttatatttctgcatccagcaccgatgcatccacacatttacagcaatggacacatctgtttagatatactgtatgactcgtggtccccagcgatgactgtcagttctatctgtatcagcatattatctatgctgtccagctcgccagaaaagcaacgcccagctgataatgatcgctatgtcaagaactgtcgcaatgggaggtctccgaaagagaccaggtggtggttccatgatgacaccgtgtgatcggtgttccgattattgttgtcctgtatgcatttagttgccagactatgggagatggacttatttcgaacgacccatttgaccagaaattaacatgctcttgtggtttgtagatgaatgtgcatcagcgtcaggcctgtactttctgattcttacaccgtcgatgatatatagaataatgtttgtatcttgtcaatttacggaacagacatgaaattcaatgcaggtcactggtttctgaatccttctacttgtatgcttggtattggtagtctgccccagatcgacctgctgtag

SEQ ID NO: 4792 - DNA, 1001 bp, Zea Mays
ccgctacctatgctcaagtgctcagtgctcaccgctctgcccctgcctcatcacacgcgcgcacggcgcacagataccttttctctcctctcccgtcccactctcctgggcaatcccggcccggcatggcgagcccgtcctcgtccccctcgcggaaggctctgagcaagatcgcctgcagccgcctgcagaaggagctcgcggagtggcaggtcaacccgcccgcgggcttcaagcacagggtcaccgacgacctccagaggtgggtcatcgatgtagcgggggcagcaggcacgctctacactggcgaaacctacaagttgcaggtggatttccccgagcattatccgatggaggcacctcaggttatatttctgcatccagcaccgatgcatccacacatttacagcaatggacacatctgtttagattggtccactggctatgccaagaaattcctagaaatattactaactaaccatgattccatgagatggcaactatcactggccccttaagatatactgtatgactcgtggtccccagcgatgactgtcagttctatctgtatcagcatattatctatgctgtccagctcgccagaaaagcaacgcccagctgataatgatcgctatgtcaagaactgtcgcaatgggaggtctccgaaagagaccaggtggtggttccatgatgacaccgtgtgatcggtgttccgattattgttgtcctgtatgcatttagttgccagactatgggagatggacttatttcgaacgacccatttgaccagaaattaacatgctcttgtggtttgtagatgaatgtgcatcagcgtcaggcctgtactttctgattcttacaccgtcgatgatatatagaataatgtttgtatcttgtcaatttacggaacagacatgaaattcaatgcaggtcactggtttctgaatccttctacttgtatgcttggtattggtagtctgccccagatcgacctgctgtag

SEQ ID NO: 4793 - DNA, 1237 bp, Zea Mays
cctatgctcaagtgctcagtgctcaccgctctgcccctgcctcatcacacgcgcgcacggcgcacagataccttttctctcctctcccgtcccactctcctgggcaatcccggcccggcatggcgagcccgtcctcgtccccctcgcggaaggctctgagcaagatcgcctgcagccgcctgcagaaggagctcgcggagtggcaggtcaacccgcccgcgggcttcaagcacagggtcaccgacgacctccagaggtgcccctccgccatcgtcgcccttcctatcccctttcctcagcaggcaatccctgctgtgcggggtctcttagattcctttctccgtggctccgtgcttggctaccgttttcttgttcgcgagtctagcacgtccagcgccctggacgcgacgcgacgcgacgtgatacgtcgcgtgcgttttgggcttgtatacattggtttctttattattctctcgtcttctcttccaagggggtttcagcttgtatacattagaatctttcaagtgtttttgtgatcctggaagaaagaaaattttaagaaatgcaaaaataatggtggatgaaacaacaaaaaaaggtgggtcatcgatgtagcgggggcagcaggcacgctctacactggcgaaacctacaagttgcaggtggatttccccgagcattatccgatggaggcacctcaggttatatttctgcatccagcaccgatgcatccacacatttacagcaatggacacatctgtttagatatactgtatgactcgtggtccccagcgatgactgtcagttctatctgtatcagcatattatctatgctgtccagctcgccagaaaagctgataatgatcgctatgtcaagaactgtcgcaatgggaggtctccgaaagagaccaggtggtggttccatgatgacaccgtgtgatcggtgttccgattattgttgtcctgtatgcatttagttgccagactatgggagatggacttatttcgaacgacccatttgaccagaaattaacatgctcttgtggtttgtagatgaatgtgcatcagcgtcaggcctgtactttctgattcttacaccgtcgatgatatatagaataatgtttgtatcttgtcaatttacggaacagacatgaaattcaatgcaggtcactggtttctgaatccttctacttgtatgcttggtattggtagtctgccccagatcgacctgctgtag

SEQ ID NO: 4794 - DNA, 566 bp, Zea Mays
ctttccgatatatactgtatgactcgtggtccccagcgatgactgtcagttctatctgtatcagcatattatctatgctgtccagctcgccagaaaaggttacatattttctctacatcaccttgttgaattggtgggtcttgcttttgactgcaatacattaccgattgcagcaacgcccagctgataatgatcgctatgtcaagaactgtcgcaatgggaggtctccgaaagagaccaggtggtggttccatgatgacaccgtgtgatcggtgttccgattattgttgtcctgtatgcatttagttgccagactatgggagatggacttatttcgaacgacccatttgaccagaaattaacatgctcttgtggtttgtagatgaatgtgcatcagcgtcaggcctgtactttctgattcttacaccgtcgatgatatatagaataatgtttgtatcttgtcaatttacggaacagacatgaaattcaatgcaggtcactggtttctgaatccttctacttgtatgcttggtattggtagtctgccccagatcgacctgctgtag

SEQ ID NO: 4795 - DNA, 634 bp, Zea Mays
ctgccacgcatttctttttgacgtggagcaatgcatttctaacttccaactagtcagcaaaagaatcataatacacctaggcacctagtcacttgctccttccctattgtttctgccatagtttttacaaattcttcaacaaggatactttactgaataaatgttgcaacaccttcaccgttgaatttacaatccatactagtcctgaagtacaagggaatgagaatgccccatgccatagatcacgggttttgttttctaggagtacgagctggcctcttattaacttacaagcacataattacggagtattgcctaaccactatacatgatacattggattttgatggtacatcctactatatacatacaccctactataaccaatataaatggctgcatcttatcgaccaaatgtagaagctgaaagcagcatcaccagattgttttactgctcatggaagtcctcgtaagatgacctggaggagtcactttgatatggagttgtttcccgcggactagatgggagtgaatcttgcatcgacagacctaaagagcaagggaaaatatggccagtcctacagagtggaatttgcaattgtgctagagaagtgatacaaagtatcagcatggc

SEQ ID NO: 4796 - DNA, 477 bp, Zea Mays
cacagtatccatccgctgccaggaggggatagtgagggaagacgtgtcggtgaggacatggtcgtccagggcatagcgctggatgtgaggaagacgaggtcacgccagcgcacgtaggtggaacaaggaaccagagaacgaatgttctggacacccaacccctaggtgtggaggttggtgacgacagcggcctcgtgcttcgaaggaaggggcaagcagatggcgctcaaggtagggagagccaagcagatggcgctcagcctcagcgagctgaggagcgagggtatcggcagcagtgtattcatgctcccaagcaagggcagcgacacattcatgctcccaggcagcatccatagcggcattggccgccgtgagggccacagtgaggttggagtgggcagccacaacatcaatggtgggaaggcaatgggtaaaggcgcaaagtggaaacctagggcgaaggaggaggcaccatga

SEQ ID NO: 4797 - DNA, 218 bp, Zea Mays
agtaaagagacggcggcggcgacgagcgatctcggggtggggactggggagacgagacgagatgccgcttactaccttgtatcctcaggacttttcacaagtcagagcgagaggggcagcactgtagcagcaggagtagcaactagagcagagaggcgatcaggcgggcggaggccttcttgggcttttcgcctttcgtcacttccgaagacggcgac

SEQ ID NO: 4798 - DNA, 4297 bp, Zea Mays
ctcacctatgacgaatagaatagccgcataattgggggctgcggcaacgcggacggcgaatgagagcggcccatgtcagtacgcgttatcgtgaagaaagaagcaaccggaaggaagatgtggtggtggatggacgcacagccaagtccgagcagagctccatcccatccagacctgccaagttgagtacagtaggtttaaaccccgcaacgcaaacccccacccccaccgaataatccctccacgacaataatcaaccatcaccagcggtccactccgggcagcaaacaataatcaaagcagagacggaggaggaggaggaggaggagggcagaaacagcttttcttctagcaggccctccgactacttttatattgggtgctggtgtttgttgcagctagtgggtggtggtgcaggaattttttattccgggggcaggaagaaggaggacgaggaggaggaacaagcgagagatagagagagcgctctcctatcttcttttgcttttggtattgttatcttgggatctgattttgtccccatacataccgagcgggagggaagggggcttgggttttctttctcctctcttctcttcttctcccctctcaccctcttctcctcccaaggctgactggccgtcggctcgggtctggggacagcaatccctgccgtcttgccatgctccccacgaggagcacaccgtcaggtccgcctccattttcctattgcttaatcaatcgccttcgcatcattggctcctccctcccgcctgttggttgcagcaccagcagcggtgacagagaattcttttcggcgcatattccccggttacatgattcggctcgcttgcttgggctctcgctcttctctgcttttctagaattgtggctcgtccgacctcggtgggtgcaaccgatcctttttcgttcccatgggtgctgttatgaccccaatgattggctggtctcctctcgattatatgctgcttgtgctagagctcagggttttcctgatccttgagggctgtgcgggcatacctggtctctccgaattgtccagttttttggtgtctgtccgccgggttcttgagctggcttggggatctgtagctttgagagcttcatcggggaattcctgcggcttgggggggttcttgcggttgtgttgagtggcctttcttgtggaagtgcaggtattgagctcaggctgctgaattcatggtcctcatttacctcaaaattcttgaacctttttaattaaaattcttgattttttatgtgggtgctcggggaaaccatccccacttctcaacctgggctcataattcttgcttaatttcttgaattcagcgtttcttggtggtgcttgattattgccgtctgatattgcacagtcctgagtttctagttgcttcgtcagcaaccggtagaggtgtcttttttgcgggatgatagaattgagcttgattgcggtggagcccttttggatttgcagccgattcttgaatcttttcttttctctctctccttggatgcctgcatgaaagccatgctcttaaagcacggttccttttcttttcttcctatcagtttactcatttcttttctggaggtggctcttgtgttggattactcccttaattactctcttatatactttatatgacaaaaatcttagctccttttttttatccaatccgagttgagtcttattttcattgtctgtgaaaacaaagttttgcctaggacatttctcctgatctcacctctttcatatcattaaaaaactgaaagttacagctgcttcagtcatttgaacaagacatccccgtcttttctaggtgcaggagctctaataagcctagtgcgcacttcagtcatcagccaagtgattgaaaagggcaagtcagctgaaatattggttccgagggctctgtagttgcttatccacgctcgcctatgcctttgcgctgatcttgacaactcaaagcttggatatggctacttattactcgagccctggcagtgaaagagattcacaaacaatgtactcagcagagtcaggcaatgtatcatatcccgtgccatcagccctagggaactttctttatacgaacaatgcatcttctggaccttatacagaatttagtggaattgtccagcctcagcagaatttcatggaacttactggccatccttcagcaatgtcacatgattcgtcatccaatgaagctaccaacatgggcagttcactcactgaacagcgctcttttggtcctttgaaagatatgagaaatgagatgttgatgcatttgatggatggagcacacagcagtggcagtgatctcatccacaatgatgctcatagcactgtacagctcgaatttggcatgttaaacaaccacaactcaacaagtgttccattagcaccaggccaagggctgtctctgagcctcaatacacatatcttggcgccttcctatccacactggtctgcaaagcaagacttactaacaccaaattcttaccagggtgatgacaacagaatgaagaatatgcagtctgaggcctcacaggcaatccggaactctaagtatctgaaggcagcacaggagttacttgatgagattgtcagtgtttggaagtgtgttaaacagaaaacagataaaggccctgctgaagcaggaaaggctgatggaaaagagactgatggggggattaaaagtgagggggtatcttccaatccgcaagagtctggtgccaatgcagcagctgagctttcaactgctgagaaacaagagctccagaataagatggcaaaacttatgactatgttggacgaggtggataggaagtacaaacactattatcatcagatgcaacttgtaatgtcatcgtttaatatggttgctggtgctggagctgccaagccttatactgcagttgccctccagacaatctcacggcatttccgatgtctaaaggatgctatcaatgatcaaattagtgttatccggaagaaacttggagaggatgacaatacatccggcaaagagggcaaactaacccgccttcgttatattgatcagcaaataaggcaacagcgagctttccaacagtatggtatgctacagcaaaacgcttggaggccacagagaggactacctgaaaattcagtctcgattctccgggcttggctttttgaacatttccttcacccgtatccaaaagattctgaaaagctaatgttatcgagacaaactgggttgacaagaagtcagatttcaaactggttcatcaatgcccgtgtccggctgtggaagccaatgatcgaagacatgtacaaagaagagattggtgaagcggagctagactccaactcttcctccgacaacgggcagcgaaacaaggacaaagcaccatctcccgaagaaaatgaggacctgcagaccccaacaagccaggcttgccaaaccagccagctcggccagtccaaagccatcgttggtggagtgatgggctttagtggagtgctagccggcggcttccacaccgaggccaaccccgacgacagcttcatgagcctgatgctaaaggcccagagacctggtgaaaccgaaggcaccggtctcctccacgatgccgtcgctcaccactcggacgacggcgcccggttcatggcctaccacctggcagagttcgggaggtacgggaacagcagcaacgtctcactgacgctgggcttgcagcacgccgagaacagcctcgcagtcccaccaaacactcagccaggcttccccggcgtcagagaccaagacatgtacaacgccacggctcctcctctcaacgtcgcctccacatcttcagagtatgattcggcgagccaaattgatcagcaacagcaacggcagcggttcgagccgtcacctctgatgcatgatttcgtggcctgaatttcagctcgcccactggaaaacgtgggggaaaactactgccaatttgtagtgtgtgccaggacgaataacttgcctggactgaattttcaggcgtgggactgttagctgtagttaacgattggggatttggggggtacagtacaggaggtatatagcgtaaatgtgatgtaaatttagtgggggtgatagcggtaaagaaatcctgtaaagatggaatgcatttatacgtgtatttaagggccatgctgtaaaaatagatttacctgtaatgagtacttatgatccagtatatatactgtgcacgttgttgaaaccaaaaaaaaaaaaagaagaggggg

SEQ ID NO: 4799 - DNA, 4240 bp, Zea Mays
acgcggacggcgaatgagagcggcccatgtcagtacgcgttatcgtgaagaaagaagcaaccggaaggaagatgtggtggtggatggacgcacagccaagtccgagcagagctccatcccatccagacctgccaagttgagtacagtaggtttaaaccccgcaacgcaaacccccacccccaccgaataatccctccacgacaataatcaaccatcaccagcggtccactccgggcagcaaacaataatcaaagcagagacggaggaggaggaggaggaggagggcagaaacagcttttcttctagcaggccctccgactacttttatattgggtgctggtgtttgttgcagctagtgggtggtggtgcaggaattttttattccgggggcaggaagaaggaggacgaggaggaggaacaagcgagagatagagagagcgctctcctatcttcttttgcttttggtattgttatcttgggatctgattttgtccccatacataccgagcgggagggaagggggcttgggttttctttctcctctcttctcttcttctcccctctcaccctcttctcctcccaaggctgactggccgtcggctcgggtctggggacagcaatccctgccgtcttgccatgctccccacgaggagcacaccgtcaggtccgcctccattttcctattgcttaatcaatcgccttcgcatcattggctcctccctcccgcctgttggttgcagcaccagcagcggtgacagagaattcttttcggcgcatattccccggttacatgattcggctcgcttgcttgggctctcgctcttctctgcttttctagaattgtggctcgtccgacctcggtgggtgcaaccgatcctttttcgttcccatgggtgctgttatgaccccaatgattggctggtctcctctcgattatatgctgcttgtgctagagctcagggttttcctgatccttgagggctgtgcgggcatacctggtctctccgaattgtccagttttttggtgtctgtccgccgggttcttgagctggcttggggatctgtagctttgagagcttcatcggggaattcctgcggcttgggggggttcttgcggttgtgttgagtggcctttcttgtggaagtgcaggtattgagctcaggctgctgaattcatggtcctcatttacctcaaaattcttgaacctttttaattaaaattcttgattttttatgtgggtgctcggggaaaccatccccacttctcaacctgggctcataattcttgcttaatttcttgaattcagcgtttcttggtggtgcttgattattgccgtctgatattgcacagtcctgagtttctagttgcttcgtcagcaaccggtagaggtgtcttttttgcgggatgatagaattgagcttgattgcggtggagcccttttggatttgcagccgattcttgaatcttttcttttctctctctccttggatgcctgcatgaaagccatgctcttaaagcacggttccttttcttttcttcctatcagtttactcatttcttttctggaggtggctcttgtgttggattactcccttaattactctcttatatactttatatgacaaaaatcttagctccttttttttatccaatccgagttgagtcttattttcattgtctgtgaaaacaaagttttgcctaggacatttctcctgatctcacctctttcatatcattaaaaaactgaaagttacagctgcttcagtcatttgaacaagacatccccgtcttttctaggtgcaggagctctaataagcctagtgcgcacttcagtcatcagccaagtgattgaaaagggcaagtcagctgaaatattggttccgagggctctgtagttgcttatccacgctcgcctatgcctttgcgctgatcttgacaactcaaagcttggatatggctacttattactcgagccctggcagtgaaagagattcacaaacaatgtactcagcagagtcaggcaatgtatcatatcccgtgccatcagccctagggaactttctttatacgaacaatgcatcttctggaccttatacagaatttagtggaattgtccagcctcagcagaatttcatggaacttactggccatccttcagcaatgtcacatgattcgtcatccaatgaagctaccaacatgggcagttcactcactgaacagcgctcttttggtcctttgaaagatatgagaaatgagatgttgatgcatttgatggatggagcacacagcagtggcagtgatctcatccacaatgatgctcatagcactgtacagctcgaatttggcatgttaaacaaccacaactcaacaagtgttccattagcaccaggccaagggctgtctctgagcctcaatacacatatcttggcgccttcctatccacactggtctgcaaagcaagacttactaacaccaaattcttaccagggtgatgacaacagaatgaagaatatgcagtctgaggcctcacaggcaatccggaactctaagtatctgaaggcagcacaggagttacttgatgagattgtcagtgtttggaagtgtgttaaacagaaaacagataaaggccctgctgaagcaggaaaggctgatggaaaagagactgatggggggattaaaagtgagggggtatcttccaatccgcaagagtctggtgccaatgcagcagctgagctttcaactgctgagaaacaagagctccagaataagatggcaaaacttatgactatgttggacgaggtggataggaagtacaaacactattatcatcagatgcaacttgtaatgtcatcgtttaatatggttgctggtgctggagctgccaagccttatactgcagttgccctccagacaatctcacggcatttccgatgtctaaaggatgctatcaatgatcaaattagtgttatccggaagaaacttggagaggatgacaatacatccggcaaagagggcaaactaacccgccttcgttatattgatcagcaaataaggcaacagcgagctttccaacagtatggtatgctacagcaaaacgcttggaggccacagagaggactacctgaaaattcagtctcgattctccgggcttggctttttgaacatttccttcacccattctgaaaagctaatgttatcgagacaaactgggttgacaagaagtcagatttcaaactggttcatcaatgcccgtgtccggctgtggaagccaatgatcgaagacatgtacaaagaagagattggtgaagcggagctagactccaactcttcctccgacaacgggcagcgaaacaaggacaaagcaccatctcccgaagaaaatgaggacctgcagaccccaacaagccaggcttgccaaaccagccagctcggccagtccaaagccatcgttggtggagtgatgggctttagtggagtgctagccggcggcttccacaccgaggccaaccccgacgacagcttcatgagcctgatgctaaaggcccagagacctggtgaaaccgaaggcaccggtctcctccacgatgccgtcgctcaccactcggacgacggcgcccggttcatggcctaccacctggcagagttcgggaggtacgggaacagcagcaacgtctcactgacgctgggcttgcagcacgccgagaacagcctcgcagtcccaccaaacactcagccaggcttccccggcgtcagagaccaagacatgtacaacgccacggctcctcctctcaacgtcgcctccacatcttcagagtatgattcggcgagccaaattgatcagcaacagcaacggcagcggttcgagccgtcacctctgatgcatgatttcgtggcctgaatttcagctcgcccactggaaaacgtgggggaaaactactgccaatttgtagtgtgtgccaggacgaataacttgcctggactgaattttcaggcgtgggactgttagctgtagttaacgattggggatttggggggtacagtacaggaggtatatagcgtaaatgtgatgtaaatttagtgggggtgatagcggtaaagaaatcctgtaaagatggaatgcatttatacgtgtatttaagggccatgctgtaaaaatagatttacctgtaatgagtacttatgatccagtatatatactgtgcacgttgttgaaaccaaaaaaaaaaaaagaagaggggg

SEQ ID NO: 4800 - DNA, 2556 bp, Zea Mays
aaggaagatgtggtggtggatggacgcacagccaagtccgagcagagctccatcccatccagacctgccaaagtgattctgcagaagtattcattctactggcgtgctgagcaggtgcaggagctctaataagcctagtgcgcacttcagtcatcagccaagtgattgaaaagggcaagtcagctgaaatattggttccgagggctctgtagttgcttatccacgctcgcctatgcctttgcgctgatcttgacaactcaaagcttggatatggctacttattactcgagccctggcagtgaaagagattcacaaacaatgtactcagcagagtcaggcaatgtatcatatcccgtgccatcagccctagggaactttctttatacgaacaatgcatcttctggaccttatacagaatttagtggaattgtccagcctcagcagaatttcatggaacttactggccatccttcagcaatgtcacatgattcgtcatccaatgaagctaccaacatgggcagttcactcactgaacagcgctcttttggtcctttgaaagatatgagaaatgagatgttgatgcatttgatggatggagcacacagcagtggcagtgatctcatccacaatgatgctcatagcactgtacagctcgaatttggcatgttaaacaaccacaactcaacaagtgttccattagcaccaggccaagggctgtctctgagcctcaatacacatatcttggcgccttcctatccacactggtctgcaaagcaagacttactaacaccaaattcttaccagggtgatgacaacagaatgaagaatatgcagtctgaggcctcacaggcaatccggaactctaagtatctgaaggcagcacaggagttacttgatgagattgtcagtgtttggaagtgtgttaaacagaaaacagataaaggccctgctgaagcaggaaaggctgatggaaaagagactgatggggggattaaaagtgagggggtatcttccaatccgcaagagtctggtgccaatgcagcagctgagctttcaactgctgagaaacaagagctccagaataagatggcaaaacttatgactatgttggacgaggtggataggaagtacaaacactattatcatcagatgcaacttgtaatgtcatcgtttaatatggttgctggtgctggagctgccaagccttatactgcagttgccctccagacaatctcacggcatttccgatgtctaaaggatgctatcaatgatcaaattagtgttatccggaagaaacttggagaggatgacaatacatccggcaaagagggcaaactaacccgccttcgttatattgatcagcaaataaggcaacagcgagctttccaacagtatggtatgctacagcaaaacgcttggaggccacagagaggactacctgaaaattcagtctcgattctccgggcttggctttttgaacatttccttcacccattctgaaaagctaatgttatcgagacaaactgggttgacaagaagtcagatttcaaactggttcatcaatgcccgtgtccggctgtggaagccaatgatcgaagacatgtacaaagaagagattggtgaagcggagctagactccaactcttcctccgacaacgggcagcgaaacaaggacaaagcaccatctcccgaagaaaatgaggacctgcagaccccaacaagccaggcttgccaaaccagccagctcggccagtccaaagccatcgttggtggagtgatgggctttagtggagtgctagccggcggcttccacaccgaggccaaccccgacgacagcttcatgagcctgatgctaaaggcccagagacctggtgaaaccgaaggcaccggtctcctccacgatgccgtcgctcaccactcggacgacggcgcccggttcatggcctaccacctggcagagttcgggaggtacgggaacagcagcaacgtctcactgacgctgggcttgcagcacgccgagaacagcctcgcagtcccaccaaacactcagccaggcttccccggcgtcagagaccaagacatgtacaacgccacggctcctcctctcaacgtcgcctccacatcttcagagtatgattcggcgagccaaattgatcagcaacagcaacggcagcggttcgagccgtcacctctgatgcatgatttcgtggcctgaatttcagctcgcccactggaaaacgtgggggaaaactactgccaatttgtagtgtgtgccaggacgaataacttgcctggactgaattttcaggcgtgggactgttagctgtagttaacgattggggatttggggggtacagtacaggaggtatatagcgtaaatgtgatgtaaatttagtgggggtgatagcggtaaagaaatcctgtaaagatggaatgcatttatacgtgtatttaagggccatgctgtaaaaatagatttacctgtaatgagtacttatgatccagtatatatactgtgcacgttgttgaaaccaaaaaaaaaaaaagaagaggggg

SEQ ID NO: 4801 - DNA, 2538 bp, Zea Mays
gagcagagctccatcccatccagacctgccaagttgagtacaagtgattctgcagaagtattcattctactggcgtgctgagcaggtgcaggagctctaataagcctagtgcgcacttcagtcatcagccaagtgattgaaaagggcaagtcagctgaaatattggttccgagggctctgtagttgcttatccacgctcgcctatgcctttgcgctgatcttgacaactcaaagcttggatatggctacttattactcgagccctggcagtgaaagagattcacaaacaatgtactcagcagagtcaggcaatgtatcatatcccgtgccatcagccctagggaactttctttatacgaacaatgcatcttctggaccttatacagaatttagtggaattgtccagcctcagcagaatttcatggaacttactggccatccttcagcaatgtcacatgattcgtcatccaatgaagctaccaacatgggcagttcactcactgaacagcgctcttttggtcctttgaaagatatgagaaatgagatgttgatgcatttgatggatggagcacacagcagtggcagtgatctcatccacaatgatgctcatagcactgtacagctcgaatttggcatgttaaacaaccacaactcaacaagtgttccattagcaccaggccaagggctgtctctgagcctcaatacacatatcttggcgccttcctatccacactggtctgcaaagcaagacttactaacaccaaattcttaccagggtgatgacaacagaatgaagaatatgcagtctgaggcctcacaggcaatccggaactctaagtatctgaaggcagcacaggagttacttgatgagattgtcagtgtttggaagtgtgttaaacagaaaacagataaaggccctgctgaagcaggaaaggctgatggaaaagagactgatggggggattaaaagtgagggggtatcttccaatccgcaagagtctggtgccaatgcagcagctgagctttcaactgctgagaaacaagagctccagaataagatggcaaaacttatgactatgttggacgaggtggataggaagtacaaacactattatcatcagatgcaacttgtaatgtcatcgtttaatatggttgctggtgctggagctgccaagccttatactgcagttgccctccagacaatctcacggcatttccgatgtctaaaggatgctatcaatgatcaaattagtgttatccggaagaaacttggagaggatgacaatacatccggcaaagagggcaaactaacccgccttcgttatattgatcagcaaataaggcaacagcgagctttccaacagtatggtatgctacagcaaaacgcttggaggccacagagaggactacctgaaaattcagtctcgattctccgggcttggctttttgaacatttccttcacccgtatccaaaagattctgaaaagctaatgttatcgagacaaactgggttgacaagaagtcagatttcaaactggttcatcaatgcccgtgtccggctgtggaagccaatgatcgaagacatgtacaaagaagagattggtgaagcggagctagactccaactcttcctccgacaacgggcagcgaaacaaggacaaagcaccatctcccgaagaaaatgaggacctgcagaccccaacaagccaggcttgccaaaccagccagctcggccagtccaaagccatcgttggtggagtgatgggctttagtggagtgctagccggcggcttccacaccgaggccaaccccgacgacagcttcatgagcctgatgctaaaggcccagagacctggtgaaaccgaaggcaccggtctcctccacgatgccgtcgctcaccactcggacgacggcgcccggttcatggcctaccacctggcagagttcgggaggtacgggaacagcagcaacgtctcactgacgctgggcttgcagcacgccgagaacagcctcgcagtcccaccaaacactcagccaggcttccccggcgtcagagaccaagacatgtacaacgccacggctcctcctctcaacgtcgcctccacatcttcagagtatgattcggcgagccaaattgatcagcaacagcaacggcagcggttcgagccgtcacctctgatgcatgatttcgtggcctgaatttcagctcgcccactggaaaacgtgggggaaaactactgccaatttgtagtgtgtgccaggacgaataacttgcctggactgaattttcaggcgtgggactgttagctgtagttaacgattggggatttggggggtacagtacaggaggtatatagcgtaaatgtgatgtaaatttagtgggggtgatagcggtaaagaaatcctgtaaagatggaatgcatttatacgtgtatttaagggccatgctgtaaaaatagatttacctgtaatgagtacttatgatccagtatatatactgtgcacgttgttgaaaccaaaaaaaaaaaaagaagaggggg

SEQ ID NO: 4802 - DNA, 2769 bp, Zea Mays
gggttttcctgatccttgagggctgtgcgggcatacctggtctctccgaattgtccagttttttggtgtctgtccgccgggttcttgagctggcttggggatctgtagctttgagagcttcatcggggaattcctgcggcttgggggggttcttgcggttgtgttgagtggcctttcttgtggaagtgcagagtgattctgcagaagtattcattctactggcgtgctgagcaggtgcaggagctctaataagcctagtgcgcacttcagtcatcagccaagtgattgaaaagggcaagtcagctgaaatattggttccgagggctctgtagttgcttatccacgctcgcctatgcctttgcgctgatcttgacaactcaaagcttggatatggctacttattactcgagccctggcagtgaaagagattcacaaacaatgtactcagcagagtcaggcaatgtatcatatcccgtgccatcagccctagggaactttctttatacgaacaatgcatcttctggaccttatacagaatttagtggaattgtccagcctcagcagaatttcatggaacttactggccatccttcagcaatgtcacatgattcgtcatccaatgaagctaccaacatgggcagttcactcactgaacagcgctcttttggtcctttgaaagatatgagaaatgagatgttgatgcatttgatggatggagcacacagcagtggcagtgatctcatccacaatgatgctcatagcactgtacagctcgaatttggcatgttaaacaaccacaactcaacaagtgttccattagcaccaggccaagggctgtctctgagcctcaatacacatatcttggcgccttcctatccacactggtctgcaaagcaagacttactaacaccaaattcttaccagggtgatgacaacagaatgaagaatatgcagtctgaggcctcacaggcaatccggaactctaagtatctgaaggcagcacaggagttacttgatgagattgtcagtgtttggaagtgtgttaaacagaaaacagataaaggccctgctgaagcaggaaaggctgatggaaaagagactgatggggggattaaaagtgagggggtatcttccaatccgcaagagtctggtgccaatgcagcagctgagctttcaactgctgagaaacaagagctccagaataagatggcaaaacttatgactatgttggacgaggtggataggaagtacaaacactattatcatcagatgcaacttgtaatgtcatcgtttaatatggttgctggtgctggagctgccaagccttatactgcagttgccctccagacaatctcacggcatttccgatgtctaaaggatgctatcaatgatcaaattagtgttatccggaagaaacttggagaggatgacaatacatccggcaaagagggcaaactaacccgccttcgttatattgatcagcaaataaggcaacagcgagctttccaacagtatggtatgctacagcaaaacgcttggaggccacagagaggactacctgaaaattcagtctcgattctccgggcttggctttttgaacatttccttcacccgtaagtttttccgcttaacttagagatatgttcactcacccccccttttttatttgttctcatgccatgctgacaatcttaggtatccaaaagattctgaaaagctaatgttatcgagacaaactgggttgacaagaagtcagatttcaaactggttcatcaatgcccgtgtccggctgtggaagccaatgatcgaagacatgtacaaagaagagattggtgaagcggagctagactccaactcttcctccgacaacgggcagcgaaacaaggacaaagcaccatctcccgaagaaaatgaggacctgcagaccccaacaagccaggcttgccaaaccagccagctcggccagtccaaagccatcgttggtggagtgatgggctttagtggagtgctagccggcggcttccacaccgaggccaaccccgacgacagcttcatgagcctgatgctaaaggcccagagacctggtgaaaccgaaggcaccggtctcctccacgatgccgtcgctcaccactcggacgacggcgcccggttcatggcctaccacctggcagagttcgggaggtacgggaacagcagcaacgtctcactgacgctgggcttgcagcacgccgagaacagcctcgcagtcccaccaaacactcagccaggcttccccggcgtcagagaccaagacatgtacaacgccacggctcctcctctcaacgtcgcctccacatcttcagagtatgattcggcgagccaaattgatcagcaacagcaacggcagcggttcgagccgtcacctctgatgcatgatttcgtggcctgaatttcagctcgcccactggaaaacgtgggggaaaactactgccaatttgtagtgtgtgccaggacgaataacttgcctggactgaattttcaggcgtgggactgttagctgtagttaacgattggggatttggggggtacagtacaggaggtatatagcgtaaatgtgatgtaaatttagtgggggtgatagcggtaaagaaatcctgtaaagatggaatgcatttatacgtgtatttaagggccatgctgtaaaaatagatttacctgtaatgagtacttatgatccagtatatatactgtgcacgttgttgaaaccaaaaaaaaaaaaagaagaggggg

SEQ ID NO: 4803 - DNA, 1557 bp, Zea Mays
gcacccggatagatgtggttagttgctctactgtttatgataactttctgccgtttaggatgtctgtgggtaccagttcataaataggcgtgcgtgccgtggaccttggtgttgctacttgctaccaatggtcatggcgaagcagcaccatgacaaggggttgccgaagcaagctcgcaatgagcccgcgccgttccggctcgagcagtgttgccgctgcgacgatgcccaccgtcaggccgacgacgagtccatggatgctgctgggtctgctggcccgctgcacctgactctcggcccgctcggctcggccgccggcccccgttgctcgtggcggtgtcgcgccggcgccggcgccggcggcgcccgcaacggtggccgtcctccgcgggtcccggtacatgaggccggcgcaggagctgctgggcgaggctgtgcgcgtggccgacctggcggctgccgacgacgaagacgaggaccaggcggcggagcggctcgagggcggcggtcaccgggcggcgcgtcgggcggccgggaacgacggcgacggcgtccaggccaagctcctctacctgctcagcgagctggagagcaggcgggagcgctacttcggcgagctggagcgcgtggtgtcgtcgttcgagccggcgctgggcggcggcgcggcggcggcgtacacaaccctgatggcgcgggccatgggccgccacttcggcaacctgcgccgcgccatactgcgcaggctcaggctccaagccgccgctgcggcgaggaggtctctgcggcgcggcggcgaggaccaggacgacgacgacgacgacgacggcgacggcgacggcgaggtgaccgaggagctggtggacaggttggctcggcggacgaagctggccgcggcggcgcgggcggagcaagcgtggcggccgctgcgtggtctgccggatggctccgtggccgtgctccgggcgtggctcttcgaccatttcctccacccgtaccccaacgacggcgagaagctgaggctggcggtgaccaccggcttgagcaggcgccaggtccatatccaactggttcatcaacgcgcgcgtgcggctgtggaagcccatgatcgaggagatgtacaaggacgagttctccgacggttccgccgtctccagctacgacgacgccagcgccagcggcgcctcctcatcctcctgagtcttgaccacctcgccctcgagagcgtttatctagctaattcatcactcggttgattggtcctgttgctttgggattatattaatttatttatatccatgcttaatcatgtgcctctcttgtattttttttagaaaaggacatactccttcaaaatctagcgacttttcgaattcatgtgcaatgctataagcccataactaagcgttcgtttttgtgttctcaactgaggcattctatatcacgatgttcatgttcgccatgtgacgtcgcataaaaaaatgaataagaggaaacatagcataatctatgttggagcccttttatcgccatttttgaatagtagcctatttaacatcc

SEQ ID NO: 4804 - DNA, 1981 bp, Zea Mays
cccacgacccttccagggaagagagtgttcgtgacgcgggcggcccccaaatccgcataacaatctctgttgcccccccgccaaaatcctcagatccccttgctgcagtgcagatctctctataatccgcgctcgtggcgacctctcctccagcttccgttcctgaaatccatctctagtttcgccatttgggttttttctcgagggtttcgctcctcactcatctgatttaacgaagggagctgggtcacacccacaggccgcggcttctgaaattcgatggccgtggctgcagcgcgcctgacgctcccagatcgattcgacgaggtttacatagcctctgcccggtgaaaagatgggctcgtgggttatacgcgcctcgcacatgcacgagctgaatttcttctcgccttttcgatcatgacgtctttcgtttttttgacgtatatgattttccctggtgctagcgccgagcgcaactgtggttgagatccaatgctcctcgttactccgtccacctttacctatggaccagtttgcatgtagttgcagtctttttctaatgtcgataatctgatgttgtggctagttctcctcgagtggcaatataatattctccggatgcacatgatttggatcatccgctgtggagtttagggttttgttcaggttttacaggctctgctttctggtatctagcagtgtttgtttctttcgttctgaatctcgcttttcgttctgaatcatctctcgtttcgggacatcctgagtcatctaattttttccttttgaataacgtctcctactaagacgggtatacccttttcaagcattggatttatcagttattattacccatgtctctcctttttcttttcaagaatatatctcttacttattatttatatacatcatgataagcctcagcactaagagacaatgttcatatttgtgtgtataaatagggaagtcaatggatcaggatccaaatgttttttcacaatatggttaattaattttagtttaaaaataaataaaaatatacatttaaataattttagtttaaaaatcatatgaatagagtttaatcctaatctaatttgatctttaaattttatagtctaaaatctaaaccacattaccacctctatgtacggtgttagtatttttttaacaaaatccgagcctaaacgagtattttagctcgtgagcttattgggccgtatgtctgagcagtccaagtcccagatctagggttcctagttccttccacaatactggcactcgactcccagtcccagaggctacggcggctaccttctcacttctaggttcgctctgaatccagcggcgcgaagagcaccgcgctcctttccggctcgcaccgaagccctaataccgtcttcttccgtccggcgcggactgctgggttcccgttcccgcatcgcggactgctgggttcgccgtttctgcacggtgcggacgccatgtcgggtgtcggcccacccccgtgaagcggttttgccgcccatgatcccggaaaaaacccaatcgaggcgtcaagtcgatccctgtccccaggcgatcggcggcggcggatcgtttccgttgcagacagcaggtcctagagcgtcaacggctggcctctggatgcgatgtcccaagaatgacgtactcccctcacctacgttttacgggggccaccctgctgcgttgatttcctccgagaacggaaggttaggagcaaaatctgggagtttcccagaccaattttttctgacttccagtggctagcaggtttatgtaattttgagtttccatcctcagataatgggtggactactgtagtactgcctaatgtagtaatgttggcatgtactactacctagtaccataggtttacttgacattctgtaatgttctcgcatttaccatagcctacgtttccaatctgagtgtgtcatgtcttatttattttgtt

SEQ ID NO: 4805 - DNA, 1918 bp, Zea Mays
cccacgacccttccagggaagagagtgttcgtgacgcgggcggcccccaaatccgcataacaatctctgttgcccccccgccaaaatcctcagatccccttgctgcagtgcagatctctctataatccgcgctcgtggcgacctctcctccagcttccgttcctgaaatccatctctagtttcgccatttgggttttttctcgagggtttcgctcctcactcatctgatttaacgaagggagctgggtcacacccacaggccgcggcttctgaaattcgatggccgtggctgcagcgcgcctgacgctcccagatcgattcgacgaggtttacatagcctctgcccggtgaaaagatgggctcgtgggttatacgcgcctcgcacatgcacgagctgaatttcttctcgccttttcgatcatgacgtctttcgtttttttgacgtatatgattttccctggtgctagcgccgagcgcaactgtggttgagatccaatgctcctcgttactccgtccacctttacctatggaccagtttgcatgtagttgcagtctttttctaatgtcgataatctgatgttgtggctagttctcctcgagtggcaatataatattctccggatgcacatgatttggatcatccgctgtggagtttagggttttgttcaggttttacaggctctgctttctggtatctagcagtgtttgtttctttcgttctgaatctcgcttttcgttctgaatcatctctcgtttcgggacatcctgagtcatctaattttttccttttgaataacgtctcctactaagacgggtatacccttttcaagcattggatttatcagttattattacccatgtctctcctttttcttttcaagaatatatctcttacttattatttatatacatcatgataagcctcagcactaagagacaatgttcatatttgtgtgtataaatagggaagtcaatggatcaggatccaaatgttttttcacaatatggttaattaattttagtttaaaaataaataaaaatatacatttaaataattttagtttaaaaatcatatgaatagagtttaatcctaatctaatttgatctttaaattttatagtctaaaatctaaaccacattaccacctctatgtacggtgttagtatttttttaacaaaatccgagcctaaacgagtattttagctcgtgagcttattgggccgtatgtctgagcagtccaagtcccagatctagggttcctagttccttccacaatactggcactcgactcccagtcccagaggctacggcggctaccttctcacttctaggttcgctctgaatccagcggcgcgaagagcaccgcgctcctttccggctcgcaccgaagccctaataccgtcttcttccgtccggcgcggactgctgggttcccgttcccgcatcgcggactgctgggttcgccgtttctgcacggtgcggacgccatgtcgggtgtcggcccacccccgtgaagcggttttgccgcccatgatcccggaaaaaacccaatcgaggcgtcaagtcgatccctgtccccaggcgatcggcggcggcggatcgtttccgttgcagacagcaggtcctagagcgtcaacggctggcctctggatgcgatgtcccaagaatgacgtactcccctcacctacgttttacgggggccaccctgctgcgttgatttcctccgttgagtgagcagggacaaggtgggctgactgttcttcgtcgaactaagcagcaaagactcgtcgtccgtcgatatgatgctaaaacaaggagatgactctggtggtatttacctgtttaagctatctgtccaatagctgccagtgcctggcttggagtcattaacttttgccttcttcaagctaccttgtgg

SEQ ID NO: 4806 - DNA, 2142 bp, Zea Mays
cccacgacccttccagggaagagagtgttcgtgacgcgggcggcccccaaatccgcataacaatctctgttgcccccccgccaaaatcctcagatccccttgctgcagtgcagatctctctataatccgcgctcgtggcgacctctcctccagcttccgttcctgaaatccatctctagtttcgccatttgggttttttctcgagggtttcgctcctcactcatctgatttaacgaagggagctgggtcacacccacaggccgcggcttctgaaattcgatggccgtggctgcagcgcgcctgacgctcccagatcgattcgacgaggtttacatagcctctgcccggtgaaaagatgggctcgtgggttatacgcgcctcgcacatgcacgagctgaatttcttctcgccttttcgatcatgacgtctttcgtttttttgacgtatatgattttccctggtgctagcgccgagcgcaactgtggttgagatccaatgctcctcgttactccgtccacctttacctatggaccagtttgcatgtagttgcagtctttttctaatgtcgataatctgatgttgtggctagttctcctcgagtggcaatataatattctccggatgcacatgatttggatcatccgctgtggagtttagggttttgttcaggttttacaggctctgctttctggtatctagcagtgtttgtttctttcgttctgaatctcgcttttcgttctgaatcatctctcgtttcgggacatcctgagtcatctaattttttccttttgaataacgtctcctactaagacgggtatacccttttcaagcattggatttatcagttattattacccatgtctctcctttttcttttcaagaatatatctcttacttattatttatatacatcatgataagcctcagcactaagagacaatgttcatatttgtgtgtataaatagggaagtcaatggatcaggatccaaatgttttttcacaatatggttaattaattttagtttaaaaataaataaaaatatacatttaaataattttagtttaaaaatcatatgaatagagtttaatcctaatctaatttgatctttaaattttatagtctaaaatctaaaccacattaccacctctatgtacggtgttagtatttttttaacaaaatccgagcctaaacgagtattttagctcgtgagcttattgggccgtatgtctgagcagtccaagtcccagatctagggttcctagttccttccacaatactggcactcgactcccagtcccagaggctacggcggctaccttctcacttctaggttcgctctgaatccagcggcgcgaagagcaccgcgctcctttccggctcgcaccgaagccctaataccgtcttcttccgtccggcgcggactgctgggttcccgttcccgcatcgcggactgctgggttcgccgtttctgcacggtgcggacgccatgtcgggtgtcggcccacccccgtgaagcggttttgccgcccatgatcccggaaaaaacccaatcgaggcgtcaagtcgatccctgtccccaggcgatcggcggcggcggatcgtttccgttgcagacagcaggtcctagagcgtcaacggctggcctctggatgcgatgtcccaagaatgacgtactcccctcacctacgttttacgggggccaccctgctgcgttgatttcctccggtaaatacgaggaagtaaatggcggggcttcatccatgtgacggccacaggacgcaaatgtgacgcctcctcgcgcgccaatgttaaaccggagggcattgactcctcctggagagggagagagaaggggacttttactgcctgagtatctgtgaaggtaaatgtgccctacatgaactggccttactactacgaaaggctaacttgacatttacgacgatgttaattggacagacggcagcacctttaggcctccattgaagcaaacaacaaacacgaggagtatttggcacagtaatactgtaacaggaggagccactcctacggaccgttagtgcgttggggtgcttgcttgtggccaggagtcaaaaatcacatccgactccaagaacgccaccacagcttagcccgcgcgc

SEQ ID NO: 4807 - DNA, 450 bp, Zea Mays
ccgaagccttcgaggcgggcctgcccgcggaggaggtgatggctgtcgaggaggaggcggaggaggatgccctgttcgatttggcaaagaatcatccgccgccatcaacaccctcctcccactcctagatctcgtgctcatcattcgctgctcgccatcaacgccctcctccccacgctccgcttcgctccgtcgatggaaggtggccgatgcagtgatgggtcgcggacgcccccgccatcaacgcccctttccccgcaatccccttccatcgttgtcgctcaccttccatcgacgacgctgcacttcctcggcgccctctgcccacctacgactattaaagaaatccaaagggatgacagatgcgaggccgccacccgacacccatcctcctcgcatattccctgtttcagattcgcggatttggatcctcccgcagacgttagtggg

SEQ ID NO: 4808 - DNA, 2492 bp, Zea Mays
ctaggatttggtattttgtttaattatttttttaacattgatatcttgtcacaaataccaattatccatatgcattgtgcctctatccagatgacttatgacttgtttattcagtttaccagctcactgcccatgttttttatgcacatggaataaattgtaagaaaatcttcttgatgcttttttaggcctccactcatggcataaattgtagtatctgaacacacatcttaacacattccatacatcccacatgcacatcaattattgcccttaagacgtacactagattgaccctatgcacacatatacctgctggagaggttcacgaagccctggtttgaaatacgggcccgttgctgtcccatcatggcccaaaggcactggaggttgatctggaaattaatttagcggcatgccatgatgaggcactcatcaaacaatcctgagtatcgaagattcaacccgagttttggcgcaaaaatcctagaggctgatctagaaattgttatgggggcatgccacaatgaaacacctttcaaacaatcctgatggttgaactcaagtgagcagcttacctcacatgccatgttacccagctacgagcccattctcatttagtttgatacttgatatgaccttttaatatactaagggaatggtattctattattagttagctggttatagaaaacacaatttaggcgaaggggtaatctgttttcttgtgtccatgtgcaaactgctttgctctttagttcttacccatgagcttttatgcacatctttagtgcctaagatcttttcatacttcttataggttttgatgcgcatggcaacttgcttggttcctactcctaccttataaatatttggcaatgggcattgctcattatactttgataactgacaaatggctataaatatagtttgatcccataagctgcctttctgttttttctagctccaataaaatcttcagcatttctttcatagccttagtcaagttcaactgtttaagtagtctccatcaaatattgttctatccgaaagagatgagaagcactttaagacaaatgttatggtttcatagttgtttgaaaagagataaaaataagaggtatattttatacttatttcacccaaacaactttcagttttcttacagatgccacatcacaacagcctttttacaggccacaacaacatttccccacagcacagctcaaccaaacaggtcctgcttctgtggccaactccaacaacatgatctgtcgattccgatcaccctcattcacaaatcaccgctgcaatggtccgtaggcacaatccttcaaattagggctttggttgcctccaaggctcccacactttctaacctatgattctacagtcacttgtccttgtatgtggcaatgaacccacctttcctaagcactacatgctgttgatggttgttgacctctggcgtcctgagatctgcatgctcctctgccctcattaaaatcttacaataggcaaatgcttatttccctctttctcccattgagtaatttctgcctgagtctaagacccggtgttccctaccccacttcaattttgtgcaaggcgatgaaaatacatataccaatttaagaagagattccaaagccatgaagatcgcagaattcacttgcctaggcccattcgggttgatgcataatagtttagtagtggtatatgtatttgaataatacactatttcagatatctgatgtcattatttagtcagtaataattcttgtgtttttagttacaggttggtcttttattgtttactcttctttgagagttgggtccatcactggttgcccctgggcgtcgaatacacaatatagtttgaaattgcattatcagcatggcagccacaccaacccccaccctgctcggtgctaggtttctggaatactgccaatagacaatttcatttgctgcaccggagacaaacccatcacacccagatacaaatggatacaccatctggtgtgaagggttctattcctgcatgcatcaagttttctgtgaaggttccaggtgaaataccatactatggtatatattatgacccacctgaagagatgaagactatggaatcccctctgctgcattcaattaactgccccaaaaagacaggtaagcagcctgtgatgaagatggatatattttcgtatgactattcacctgattttggtagcgtcgcccggatagccatagaacttgaggatgaacagattgatcgggctctattgaagaatgtcttggatatttttattaaaattaggttgggtcaaatggagtgtttcgagaatgactttgaagatttcttgctcaaggatactacagagtactgctttgtcaaggctcaaagtttgtatgaactatgtcatattatgttgaatgaagctattgaattcccttattctatgatgtatgtaggatgcaaagattcttga

SEQ ID NO: 4809 - DNA, 4387 bp, Zea Mays
caactactcctactgctataaccatcctccccagcgccccgcccgccctccgtgcccctctccacttcgatcgccttcctcgacagttcattgccatcggcagcgcgttgccgccgctcgactcgacttgactccactctgctcgaggtactgacataatcatgaagcttttcatatttcgatgacaggattgttggatctcatatacgtgttttagaaagagatgaaagtcggcggtctcctgacctctgctggaatcaacatcggtctctgtgtactttttctgtcactgtactccattctaaggaagcagccacagaatgttaaggtctattttggaagaaggattgctgaggagcacaaccggctccgtgatgcttttatcttggagagatttgtcccttcccctagctggattgtgaaaagtctgcggtgcacagaggaagaaatcttggctactgctgggttggatgctgttgttttcaatagaattctagtattcagcatacgcatcttctccttagctgccattctttgtgtatttggtgtccttccgctgaattattttggacaagatatgcatcatgtccggattccttcagcatcattagagacatttacaataggaaatgtggaagaaagatcaagatggctctgggtccattgcgtcgtactgtacatcatctctgctgtagcttgcattcttctatacttggagtacaagcacattgccaggctgaggttatatcacatttctagagcaacaagcaatcctagccattttactatccttgtccgaggaattccaaaatcaagtacagagtcattcagcaggacagttgaaagtttctttaccaagtaccatgcatcaagttacctatctcatcaagtcgtttacaaagttgggaaagttcagaagatagtgagtggtgcaaagaaggtttacaggaagttcagacatttcaagggtgcgacagttgatcggagatgcagacccattagatttcaatgctgtttttgtggagcttcttctaattcattccagttgttgcctagtgattacgagcaagagagtgaaaagtctgatgtgaatgaatcaagctcgagcttacctgatgaggaatgtggtgctgcttttgtgtttttcaaaactcggtatgcagcgctagttgtagccaaaattctgcagacatcgaaccctatgagatgggtcactactttggctcctgagcctgatgacatatattggtctaatctttggttaccctacaagcaactctggattcggcacatagtcacacttatgtgttctatcgttttcatggttgtattccttataccagtgacatttatacaaggtttaactcagctggagcaactgcagcaaaggctcccttttctgagaggaatattgaaaaagaaatacatgacccagctgataactggatatctccccagtgtcatcttgcaaatatttttatatactgttcccccgaccatgatgtttttttctactttggaggggcctatctctcacagtgaaagaaagaaaagtgcctgctgtaaagtattatacttcaccatttggaatgtcttctttgtcaatgtcttatcgggttcagcaattagccaactgaatgctttatcaagcccaaaggacattcctatgcagcttgctaaagcagtacctgtgcaggctacattctttactacctatgttcttacttcaggatgggctagtctatcatcagaacttatgcaactctttggtcttacatggaactttttaagaagatatcttctgagaattaaggaggatagtgattttctttactcatttccctatcacactgaaatgccaaaagttctgctgtttggactgctgggtttcacatgctctgtactagcacctctaatcttgccctttttactgctgtacttttttcttggctacgtcgtctaccgcaaccagttcctcaatgtttactgcacaaaatacgacacaggcggtcaatattggccaattgcgcacaatactacaatattctctctaatcctcactcagatcatctgtcttggtgtgtttggccttaaagaatcccctgtagctgctggcttcactgtcccgcttatcatctttactcttctattcaatcagtattgcagaaagcgtcatctcccattgttcaagactttccctgcacagaatttgattgacatggacaaggaagatcagcaatcagacacaacggaggaccttcatgaacgacttcattctgcctactttcagttccctgataccgacgaggtacctttggaaagagttcgcgttagtgtcggcagagacgaagacgggagcggcagttcaggtgaatcaagccgcaaggaaagcgccgaagacgaacacaagagtggcctctcccacccgacgctggatgggctcccggttagtcggttacgcaacgcggtgagatcacttgggtccgttttgagaccgcagaggagacagttaccagtatagcacatttcctttaaccgcccatgtaaattcaaggtcgacagaccacacacacagatcattgatagcgcgtacagggagaggaaggtacacagacagaaatggaagagagtataccacccgtttgcaagggtagaaaattttgatgtgtcaattgatacttgatgaatggcttttcaggtcattccttttcaattgatcgattcttgaaatattcaggctggcccctctggtgatatgtaccccttcgccttttaaaagacttgctggaaacagcggcgatgcaccattattctttcccaccatcacacaacaaaatgataagtatttttttcgagctcgcaagagaagtattgtatttagagattaggaaaaaagagcaaaaaaaagagagacaaatataaccgtacacaatcgcacatcccctacaccagaggtaacatgcgcgggctcaaatcacaggatggtgcagacagacgtggacgaaggcccctccgcggcggccgccttgtcgccggccggggcaacgcccggccaatcgcggcaggcgcagtgctggccctggggaatctggcggtgcacggaggcgacgtggcggccgcagcccgcccacgtggacttgccgcacgacccgcacttcacctggtagcacatggctgatggctcccgctggcttcgcccctctagctgaagcttccccctcgactcgaagtcgaagcgaaggtatctgaagaaatctgggtcgatgtggacgatgtctccgaggccggcggagctggttaccttttgacctgcaaaaccgatgcttggagagggggcctagtcgcctagggaagataacgatccggctggcctatgctgtattgccgtcacatgagatgtgaggcacagctcatcgcttacctcacccaagcagtgagccaaattggcttatctttcattctattatattttagtttctaacttactaaataataaaattaaaatttttgtatttagtaattttaagattaaaatagaatgagatagagaaactaaaaattaaaccctaaaaatcaaacaccgtacccttaccgccgtaaaccttatcgacactcgtgtaagtgcgttgaccttcgaagacaaatggcccgtcctgcgattactgatccgatcaaagtctttcaagtccggcaacctctaccatcgatccatcgtccaaccaaaacgtgtcgacaactcaaaattggacccaacccgatcgatctatacgaaattttttgacccgactattaatttttgatccacgacaatctatagcgggtatgaaccatgattttgatccaaaacccgactcaaatccggaaaaaaaaagatcaaaagccaaaaatccactcagacccgaaaaacacgacccaacggggattgatatgctcaaacggggcaacgatggatgaccacacgttcgttcgacacggcgggttccgatcctcagggaacagaacaccacgcggtgggcggcgcgaacctcactgcgcagcgccgccctgcgcgggagtggaggcggcggtgccggagtccttcccagcgtcgtcagcggcgctggcggccttcttgacgccggccggggcggtggcggggtcgacgccgggccagtcgcggcaggcgcagtgctggccctccgagatctgcgcgtgcaccgacgcgacgtggcggccgcacccggcccacgtggtcttgccgcaggtgccgcacctcacctggtagcacatggcgtcggacggtggcttcgctgagagactctcgactctgcctctgctcctgatggggtccggtccggatgggaagctcgatgggttgtggtggtcaggtgctgtggctgcctgcctt

SEQ ID NO: 4810 - DNA, 3930 bp, Zea Mays
aacatttatgttcaaactgaaagggaaagcaatgtttagccttggagcatacgcatcttctccttagctgccattctttgtgtatttggtgtccttccgctgaattattttggacaagatatgcatcatgtccggattccttcagcatcattagagacatttacaataggaaatgtggaagaaagatcaagatggctctgggtccattgcgtcgtactgtacatcatctctgctgtagcttgcattcttctatacttggagtacaagcacattgccaggctgaggttatatcacatttctagagcaacaagcaatcctagccattttactatccttgtccgaggaattccaaaatcaagtacagagtcattcagcaggacagttgaaagtttctttaccaagtaccatgcatcaagttacctatctcatcaagtcgtttacaaagttgggaaagttcagaagatagtgagtggtgcaaagaaggtttacaggaagttcagacatttcaagggtgcgacagttgatcggagatgcagacccattagatttcaatgctgtttttgtggagcttcttctaattcattccagttgttgcctagtgattacgagcaagagagtgaaaagtctgatgtgaatgaatcaagctcgagcttacctgatgaggaatgtggtgctgcttttgtgtttttcaaaactcggtatgcagcgctagttgtagccaaaattctgcagacatcgaaccctatgagatgggtcactactttggctcctgagcctgatgacatatattggtctaatctttggttaccctacaagcaactctggattcggcacatagtcacacttatgtgttctatcgttttcatggttgtattccttataccagtgacatttatacaaggtttaactcagctggagcaactgcagcaaaggctcccttttctgagaggaatattgaaaaagaaatacatgacccagctgataactggatatctccccagtgtcatcttgcaaatatttttatatactgttcccccgaccatgatgtttttttctactttggaggggcctatctctcacagtgaaagaaagaaaagtgcctgctgtaaagtattatacttcaccatttggaatgtcttctttgtcaatgtcttatcgggttcagcaattagccaactgaatgctttatcaagcccaaaggacattcctatgcagcttgctaaagcagtacctgtgcaggctacattctttactacctatgttcttacttcaggatgggctagtctatcatcagaacttatgcaactctttggtcttacatggaactttttaagaagatatcttctgagaattaaggaggatagtgattttctttactcatttccctatcacactgaaatgccaaaagttctgctgtttggactgctgggtttcacatgctctgtactagcacctctaatcttgccctttttactgctgtacttttttcttggctacgtcgtctaccgcaaccagttcctcaatgtttactgcacaaaatacgacacaggcggtcaatattggccaattgcgcacaatactacaatattctctctaatcctcactcagatcatctgtcttggtgtgtttggccttaaagaatcccctgtagctgctggcttcactgtcccgcttatcatctttactcttctattcaatcagtattgcagaaagcgtcatctcccattgttcaagactttccctgcacagaatttgattgacatggacaaggaagatcagcaatcagacacaacggaggaccttcatgaacgacttcattctgcctactttcagttccctgataccgacgaggtacctttggaaagagttcgcgttagtgtcggcagagacgaagacgggagcggcagttcaggtgaatcaagccgcaaggaaagcgccgaagacgaacacaagagtggcctctcccacccgacgctggatgggctcccggttagtcggttacgcaacgcggtgagatcacttgggtccgttttgagaccgcagaggagacagttaccagtatagcacatttcctttaaccgcccatgtaaattcaaggtcgacagaccacacacacagatcattgatagcgcgtacagggagaggaaggtacacagacagaaatggaagagagtataccacccgtttgcaagggtagaaaattttgatgtgtcaattgatacttgatgaatggcttttcaggtcattccttttcaattgatcgattcttgaaatattcaggctggcccctctggtgatatgtaccccttcgccttttaaaagacttgctggaaacagcggcgatgcaccattattctttcccaccatcacacaacaaaatgataagtatttttttcgagctcgcaagagaagtattgtatttagagattaggaaaaaagagcaaaaaaaagagagacaaatataaccgtacacaatcgcacatcccctacaccagaggtaacatgcgcgggctcaaatcacaggatggtgcagacagacgtggacgaaggcccctccgcggcggccgccttgtcgccggccggggcaacgcccggccaatcgcggcaggcgcagtgctggccctggggaatctggcggtgcacggaggcgacgtggcggccgcagcccgcccacgtggacttgccgcacgacccgcacttcacctggtagcacatggctgatggctcccgctggcttcgcccctctagctgaagcttccccctcgactcgaagtcgaagcgaaggtatctgaagaaatctgggtcgatgtggacgatgtctccgaggccggcggagctggttaccttttgacctgcaaaaccgatgcttggagagggggcctagtcgcctagggaagataacgatccggctggcctatgctgtattgccgtcacatgagatgtgaggcacagctcatcgcttacctcacccaagcagtgagccaaattggcttatctttcattctattatattttagtttctaacttactaaataataaaattaaaatttttgtatttagtaattttaagattaaaatagaatgagatagagaaactaaaaattaaaccctaaaaatcaaacaccgtacccttaccgccgtaaaccttatcgacactcgtgtaagtgcgttgaccttcgaagacaaatggcccgtcctgcgattactgatccgatcaaagtctttcaagtccggcaacctctaccatcgatccatcgtccaaccaaaacgtgtcgacaactcaaaattggacccaacccgatcgatctatacgaaattttttgacccgactattaatttttgatccacgacaatctatagcgggtatgaaccatgattttgatccaaaacccgactcaaatccggaaaaaaaaagatcaaaagccaaaaatccactcagacccgaaaaacacgacccaacggggattgatatgctcaaacggggcaacgatggatgaccacacgttcgttcgacacggcgggttccgatcctcagggaacagaacaccacgcggtgggcggcgcgaacctcactgcgcagcgccgccctgcgcgggagtggaggcggcggtgccggagtccttcccagcgtcgtcagcggcgctggcggccttcttgacgccggccggggcggtggcggggtcgacgccgggccagtcgcggcaggcgcagtgctggccctccgagatctgcgcgtgcaccgacgcgacgtggcggccgcacccggcccacgtggtcttgccgcaggtgccgcacctcacctggtagcacatggcgtcggacggtggcttcgctgagagactctcgactctgcctctgctcctgatggggtccggtccggatgggaagctcgatgggttgtggtggtcaggtgctgtggctgcctgcctt

SEQ ID NO: 4811 - DNA, 995 bp, Zea Mays
ctgaaaggtacgctgtggtgcctggccagggaatccataagatcgaggggcaaggaatgaaccagcagatgacaatggctatgaagaaggaggcggttcctccgacgaagatgagcaagaaaccgtcgacttgggcggccttccggtccctgagaccggcagcccgtccggagagggcaaggagctgaagaaccacctcctgaacaagtacagcggctacctgagcagcctctggagggagctctcgaggaagaagaagaaaggcaagctgccgagggacgcccgccagaagctcctccactggtggcagctgcactacagatggccctatccctcggagctggagaaggcggcgctggcggagtcgacggggctcgacgcgaagcagatcaacaactggttcatcaaccagcggaagcgccactggaagccggcgccgccgacgatggcgctaggcacaccagattacaggatgggccagcacggcggcggtgcttctagcagctcggcctccgctggtctccgcgtgcaggggcagtacttcaccggcggaagctcgtatccccgtggcccgtgacgatgcatgcgtcgcctgcaggctgagcgcgtgaggtgtcgacatggattgttgccgtgcatgcatgcatatcagcatacgtatacatacatacgtgatcattatttgggtatagatggtgtggacgtgtcgtgtttcctatacagaaatttgattgtctccttacttgcattgctcatacgcatacatatctacatatatgcagctgatgacagagttataaagttgtaactatatattattattatttgtcttactaacatgagagcagttgtacacgtatatcagcatgaatgcatggatgttccttctgatgtatgtatgcatggtccatgtctagctagctattgttggaacttattaattggaacaatatggccacgattggatcaggttgctaatgacaattgtcaatttg

SEQ ID NO: 4812 - DNA, 2044 bp, Zea Mays
cacacatttcccacacgtcagcacccaagccgcccagtaggcatcaccgcatcagcttgccaggtcggaccacatgtcataccctgcgagctgccgtcctccagcttggggcagctcaactactcgcacaactgcacaaaagcacaagcctccctcccggctccccacctcgcagcgtccgccggcacaccacctctgactcctctccctccgcggcctccgtttcttccctcattctccgcaaaccctaatcccaatggctgcctccgccaggactaccagctcgttgccctacctagtcgccgtctcctcccccgcggctcaccgccacggggccagccacccgatccgcgcctcggtgggggaggcgacaatggacgtggtgtcggaggcggagctgcgggagaaagggttcttggggatgcggaaaacgaaactggtgtgcacggtggggcccgcctgcgtcgaggcgctgccggcgctggcgcgcggcgggatgggcgtggcgcggatcaacctctgccacggtggccgggagtggcatcgtgccgccatgcgctctgtgcggaggctcaacgaggagggaggattctgcgtgacgcttatggtcgacaccgagggttcccagctcctcgtcgcggaccacggaggcgccacctcagtcaaggccgaggatgggtcagagtggatatttacaaacaaaaaagctgatgaagcccatcagttcacaatgcatgtgaattttgataagttttctgaaggcattttggttggtgatgagcttgtaatagatggtggaatggcaacatttgaagttactgagaaaataggaaatgatttgcgctgtaagtgcacggacccaggtttgcttcttcctcgagccaaattgtcattctggaggaacggaaaaatagttcaaaggaactttggccttcctacattgtcaacaaaggcacatcaaagtatttgcaaagattgagagtctagaatctctcaagaacctgaaagacatcatagaggcatctgatggagttatggtagcacgaggggatcttggagttcagattcctcttgaacagatcccagccattcaagaatcaattgttaaactatgtagacacctgaacaagcctgtgatagttgcttctcagcttctcgaatcaatggttgaatacccaacaccaactcgagcagaggtggccgatgtttccgaagcagtgcggcaatatgcagacgctgtgatgctatcagcagagtcagctataggtgcatatccccaaaaagcgctatctgtacttcgtgcagccagtgaaaggatggaatcatggagccgtgaggaaaacatgcagaaacttcttccacggcatcagcttgcaattgcattgcctgaccggatctcagagcagatttgcagctgtgctgtagaaatggcaaacaaccttgctgtggatgccatatttgtctacacaaagcatggtcacatggcatcacttctatcgcgcaaccgacccaaccctcccatattcgcgttcactgataatgccaattcaagaaagagcatgaacctctactggggagtgattccacttcatctaccattgtcaaatagcatggaggataacttcaacaaaaccatcagcctgatgaggtcgaagggttcagtgaaacccggagacacggtcttggtggtatcagattctgatctaaaccaaccttgtgctgccacctcggtgttccaatccattcaggtccggctagtggagtaggttccatgagatgagatcctactagccgtttggttggctaaaatgtaacgtaaccaactactactatgcgttaccattgcaaaccattcccaccgtctataattagatcctatttccatctccaaataaagattgaaccactgcgattacagtggtgtctgatttcatttccttcgtgtcaccgttcattgaatcaaacaccgtctagtttcagtactgggttgctgcaaatgtctcgttgaaccaaacacgaattaaagccagctgtttctatattc

SEQ ID NO: 4813 - DNA, 969 bp, Zea Mays
gtaaataattgcaacgatctggagagtttctgaaaaaacccggcatggttcttttagcagatgtttggtcagatttggtgaatcccccctcccctctcacgctccaccactgatcatggggctactcagcattatccgcaagatcaagcgcaaggagaaggagatgcgcatcctcatggttggcctggacaactcggggaagacaaccatcgttctcaagatcaatggggaggacaccagcatcattagcccaacccttggattcaacatcaagaccatcaagtaccacaaatactctttgaacatatgggatgttggaggacagaagacaatcaggtcttactggagaaactactttgagcagactgatggattagtttgggttgttgatagttcagacataaggaggcttgatgattgccgtgctgaactccacaatctcttgaaagaagagagactagttggagcttcattgttggtttttgcaaataagcaagacatacagggagctctaaaaccagatgaaattgcgaaggttctgaatctggaagtgatggacagaagcaggcactggaagattgtgggctgcagcgcttacacgggagaggggcttctcgagggcttcgactggctggtccaggacgtcgcttctcggatctacgtcctagactgatgctatttgccgcgtcagtcatcctagactgatgctatttgtcgcgttggtgctacttgagcatcattagagtttggtgcgtgcattaaagcctgtactaaggccctgtttgtttagggtttatggttttagggtttagggatttgtgttcactcttactcgcttcggatttgcggtggtatttgtttgcttgtgttacattgaggtaaatctaaacgatcatgagttcatttctctttatttacatgtcagattaagtttttcccaacgtgagtagttatatacttatatttaca

SEQ ID NO: 4814 - DNA, 1344 bp, Zea Mays
taactgcaaaaatcgggggacagagaagcgttcgcctgactcgcccccactcccgagtggccgaagccccgaccggcgaccccgcagatctgtccaagcgttcgcctgactcgcccccactcccgagtggccgaagccccgaccggcgaccccgcagatctgtcccattgttctccgtcctccccgtcgtgtcctccttgatccttcttcgagtggcaagtgctgacctcgcctcctattcctccggtagccctactggggcgccgggcgcacagatctgctcacccctggacgctaggcgctgcccagctcttccctgccagccggtcgcggcggctgcaagccagcacggcagggctgctggtgcctgctcttgtcctccggcacagcgcagggtgtcggggtcgctcccagctggccatcctctcggcccccttgttgcacagcgaatttggtgaatcccccctcccctctcacgctccaccactgatcatggggctactcagcattatccgcaagatcaagcgcaaggagaaggagatgcgcatcctcatgtggcctggacaactcggggaagacaaccatcgttctcaagatcaatggggaggacaccagcatcattagcccaacccttggattcaacatcaagaccatcaagtaccacaaatactctttgaacatatgggatgttggaggacagaagacaatcaggtcttactggagaaactactttgagcagactgatggattagtttgggttgttgatagttcagacataaggaggcttgatgattgccgtgctgaactccacaatctcttgaaagaagagagactagttggagcttcattgttggtttttgcaaataagcaagacatacagggagctctaaaaccagatgaaattgcgaaggttctgaatctggaagtgatggacagaagcaggcactggaagattgtgggctgcagcgcttacacgggagaggggcttctcgagggcttcgactggctggtccaggacgtcgcttctcggatctacgtcctagactgatgctatttgccgcgtcagtcatcctagactgatgctatttgtcgcgttggtgctacttgagcatcattagagtttggtgcgtgcattaaagcctgtactaaggccctgtttgtttagggtttatggttttagggtttagggatttgtgttcactcttactcgcttcggatttgcggtggtatttgtttgcttgtgttacattgaggtaaatctaaacgatcatgagttcatttctctttatttacatgtcagattaagtttttcccaacgtgagtagttatatacttatatttaca

SEQ ID NO: 4815 - DNA, 2152 bp, Zea Mays
cccagtccctgcactcgtgttcctgtagccgccaccccagcccctggacgctcggctcgatcccccccccccccctcaccacccgttctcctctagtcatcctcctcgccagtcgccaggtgtcggccgccggttgtgctccccgtcaggcgtcagcgtgatcccatcggtcgtcgcagaaacacagtcgctgctcgccgtcaccactcgccaggcgccggttcttctccaatccacgactcatcggctctccagtcctccgtccgttaccgaatttaaagtgcaacgtgccgattctttatatgtacttctgaatgcttggacctggtgtgactacatagcctggtattcatttcataaatgatggaaagaagattgggacggcgtgtatatttgattcccagaacccttccctttatgcaactcaatgctatgtcctcattctcagctggccatggacgccgacccaagaagaaggtatatcaccgtgaacctggtcttgacagggccatggatcttcaaaagaagcctgcccttctccttcgtctgcgtgacctcattttggcacaaaagacaggatcactacttgtgcgtgaccttgaaaaggaggttggttttgtccaaaaatggaactttctttcacttatcgagcgtcaccccaatatcttccatgtctctggtggaagtgcttcccgagagcccatttctgtcacacttacggagaaggccagaaagatatccagtgaagaggctgaagcgcgagagctaatggagccaatcttggtgagaaaccttaggaagttactgatgatgtcgatggactgccagattcctctggataagattgaactaatccagtctgaactgggcttacctaacaacttcaagagcaacatgattccaaggtaccctgattttttttcaatccgtgatgtgaagggactggaccatttgtgtctggagaattgggactcttcactagcagtcacaatacgagaagaaaaaatgaactttgagggtttccagataggctgtagagggattcctaaagatggaaatgtcttgggtccttttgctttcaagttgaagtatccaacaggatttaggccaaaccggaagtaccttgaggaggttgtcaggtggcagaagatggcatttccttcgccttatttgaatgctagacgagtcgagtctgcaacaccacagtctcgaaagcgtgccattgctgttctgcatgagattttgagccttacaatggagagacgattgacatctgataagctagacatatttcacaacgagtacaggcttccatgcaagttacttctttgtttagtgaaaaatcatggcatcttttacatcactaacaagggagcaagaagcacagtcttcctcaaggaggcttatgaaaactgtaacctaattgataagtgtcctttactgaaattctatgatcagtttgcatcattgattggccgaccgtgctccaactcagacaacatgctggcagtataattggagtgtggatttactgatcaggagacaagctaaagtcggtgcatctattttgttgaaactcagatcagctcattgcacatgcaactacaatttaaattcagtggaaagttgctgtttgtttcagctcagtagctaaagagaactaaagaattgaaaaagtcagtgtctcatcttcaaatgtgaagccatctgagaagtgaagtagcagccctgcaaactagacaaaataatgcttataccagaagtcaaagatcaggactggtttagtggtgagagttgtctcactgagtcactaggtcacatgtttgaagcagcctctccgcattcgaggggggaaggcttgctttgctttatccctttcccaaaccttacttatatatgggagcctccgctattggtgtaggtcatgccctccaataatttctacccgatgtcgctccacattattctgatatggagcatgattaacagctttgtgattaagcattgccatgcttcggccatcacgttcatcaaatcaacttgcaagttacagattgtgctactacatcattccatgatcctattccatgcctcttcatcactgcttaaaggagcggagcggagctcgcgccggagcggaagacgagtgaac

SEQ ID NO: 4816 - DNA, 1211 bp, Zea Mays
cccagtccctgcactcgtgttcctgtagccgccaccccagcccctggacgctcggctcgatcccccccccccccctcaccacccgttctcctctagtcatcctcctcgccagtcgccaggtgtcggccgccggttgtgctccccgtcaggcgtcagcgtgatcccatcggtcgtcgcagaaacacagtcgctgctcgccgtcaccactcgccaggcgccggttcttctccaatccacgactcatcggctctccagtcctccgtccgttaccgaatttaaagtgcaacgtgccgattctttatatgtacttctgaatgcttggacctggtgtgactacatagcctggtattcatttcataaatgatggaaagaagattgggacggcgtgtatatttgattcccagaacccttccctttatgcaactcaatgctatgtcctcattctcagctggccatggacgccgacccaagaagaagtgtaggtcatgccctccaataatttctacccgatgtcgctccacattattctgatatggagcatgattaacagctttgtgattaagcattgccatgcttcgagccatcacgttcatcaaatcaacttgcaagttacagattgtgctactacatcattccatgatcctattccatgcctcttcatcactgcttaaagaatcaaacaagaaccactacgcatcatagactctacaagccaaaaaggccaccaagaatgatgcatgcgaccacaagaaaaccacattttcagcacttatctgcagtgtcccatcttttgctatcaatcttaaacatatgtacataacccctcaaccaagctagtcaactatacaggcaactgaagcactacaactttgtttattttggataaggccccgcttaaatatggcataaaacaacggatgtcatcattttgtaacttgatataatatcttctacctaaaaagtgaatgatggatgcaatattttgcatgataaacagttcgaaatagttttaggatttatacaagtgttttattaccgtaacaaagaattattaatattgcaccctacaaactcctttgtttaaatttatacaaacgtttagaaataagcgcgcaaggcgcgcgttagccactagtagcatctgactgcatttgtagcccttacttatcataatatgtggtttgcttcttttggcttgaacctttctgata

SEQ ID NO: 4817 - DNA, 2516 bp, Zea Mays
cccagtccctgcactcgtgttcctgtagccgccaccccagcccctggacgctcggctcgatcccccccccccccctcaccacccgttctcctctagtcatcctcctcgccagtcgccaggtgtcggccgccggttgtgctccccgtcaggcgtcagcgtgatcccatcggtcgtcgcagaaacacagtcgctgctcgccgtcaccactcgccaggcgccggttcttctccaatccacgactcatcggctctccagtcctccgtccgttaccgaatttaaagtgcaacgtgccgattctttatatgtacttctgaatgcttggacctggtgtgactacatagcctggtattcatttcataaatgatggaaagaagattgggacggcgtgtatatttgattcccagaacccttccctttatgcaactcaatgctatgtcctcattctcagctggccatggacgccgacccaagaagaaggtatatcaccgtgaacctggtcttgacagggccatggatcttcaaaagaagcctgcccttctccttcgtctgcgtgacctcattttggcacaaaagacaggatcactacttgtgcgtgaccttgaaaaggaggttggttttgtccaaaaatggaactttctttcacttatcgagcgtcaccccaatatcttccatgtctctggtggaagtgcttcccgagagcccatttctgtcacacttacggagaaggccagaaagatatccagtgaagaggctgaagcgcgagagctaatggagccaatcttggtgagaaaccttaggaagttactgatgatgtcgatggactgccagattcctctggataagattgaactaatccagtctgaactgggcttacctaacaacttcaagagcaacatgattccaaggtaccctgattttttttcaatccgtgatgtgaagggactggaccatttgtgtctggagaattgggactcttcactagcagtcacaatacgagaagaaaaaatgaactttgagggtttccagataggctgtagagggattcctaaagatggaaatgtcttgggtccttttgctttcaagttgaagtatccaacaggatttaggccaaaccggaagtaccttgaggaggttgtcaggtggcagaagatggcatttccttcgccttatttgaatgctagacgagtcgagtctgcaacaccacagtctcgaaagcgtgccattgctgttctgcatgagattttgagccttacaatggagagacgattgacatctgataagctagacatatttcacaacgagtacaggcttccatgcaagttacttctttgtttagtgaaaaatcatggcatcttttacatcactaacaagggagcaagaagcacagtcttcctcaaggaggcttatgaaaactgtaacctaattgataagtgtcctttactgaaattctatgatcagtttgcatcattgattggccgaccgtgctccaactcagacaacatgctggcagtataattggagtgtggatttactgatcaggagacaagctaaagtcggtgcatctattttgttgaaactcagatcagctcattgcacatgcaactacaatttaaattcagtggaaagttgctgtttgtttcagctcagtagctaaagagaactaaagaattgaaaaagtcagtgtctcatcttcaaatgtgaagccatctgagaagtgaagtagcagccctgcaaactagacaaaataatgcttataccagaagtcaaagatcaggactggtttagtggtcatgccctccaataatttctacccgatgtcgctccacattattctgatatggagcatgattaacagctttgtgattaagcattgccatgcttcgagccatcacgttcatcaaatcaacttgcaagttacagattgtgctactacatcattccatgatcctattccatgcctcttcatcactgcttaaagaatcaaacaagaaccactacgcatcatagactctacaagccaaaaaggccaccaagaatgatgcatgcgaccacaagaaaaccacattttcagcacttatctgcagtgtcccatcttttgctatcaatcttaaacatatgtacataacccctcaaccaagctagtcaactatacaggcaactgaagcactacaactttgtttattttggataaggccccgcttaaatatggcataaaacaacggatgtcatcattttgtaacttgatataatatcttctacctaaaaagtgaatgatggatgcaatattttgcatgataaacagttcgaaatagttttaggatttatacaagtgttttattaccgtaacaaagaattattaatattgcaccctacaaactcctttgtttaaatttatacaaacgtttagaaataagcgcgcaaggcgcgcgttagccactagtagcatctgactgcatttgtagcccttacttatcataatatgtggtttgcttcttttggcttgaacctttctgata

SEQ ID NO: 4818 - DNA, 2645 bp, Zea Mays
cccagtccctgcactcgtgttcctgtagccgccaccccagcccctggacgctcggctcgatcccccccccccccctcaccacccgttctcctctagtcatcctcctcgccagtcgccaggtgtcggccgccggttgtgctccccgtcaggcgtcagcgtgatcccatcggtcgtcgcagaaacacagtcgctgctcgccgtcaccactcgccaggcgccggttcttctccaatccacgactcatcggctctccagtcctccgtccgttaccgaatttaaagtgcaacgtgccgattctttatatgtacttctgaatgcttggacctggtgtgactacatagcctggtattcatttcataaatgatggaaagaagattgggacggcgtgtatatttgattcccagaacccttccctttatgcaactcaatgctatgtcctcattctcagctggccatggacgccgacccaagaagaaggtatatcaccgtgaacctggtcttgacagggccatggatcttcaaaagaagcctgcccttctccttcgtctgcgtgacctcattttggcacaaaagacaggatcactacttgtgcgtgaccttgaaaaggaggttggttttgtccaaaaatggaactttctttcacttatcgagcgtcaccccaatatcttccatgtctctggtggaagtgcttcccgagagcccatttctgtcacacttacggagaaggccagaaagatatccagtgaagaggctgaagcgcgagagctaatggagccaatcttggtgagaaaccttaggaagttactgatgatgtcgatggactgccagattcctctggataagattgaactaatccagtctgaactgggcttacctaacaacttcaagagcaacatgattccaaggtaccctgattttttttcaatccgtgatgtgaagggactggaccatttgtgtctggagaattgggactcttcactagcagtcacaatacgagaagaaaaaatgaactttgagggtttccagataggctgtagagggattcctaaagatggaaatgtcttgggtccttttgctttcaagttgaagtatccaacaggatttaggccaaaccggaagtaccttgaggaggttgtcaggtggcagaagatggcatttccttcgccttatttgaatgctagacgagtcgagtctgcaacaccacagtctcgaaagcgtgccattgctgttctgcatgagattttgagccttacaatggagagacgattgacatctgataagctagacatatttcacaacgagtacaggcttccatgcaagttacttctttgtttagtgaaaaatcatggcatcttttacatcactaacaagggagcaagaagcacagtcttcctcaaggaggcttatgaaaactgtaacctaattgataagtgtcctttactgaaattctatgatcagtttgcatcattgattggccgaccgtgctccaactcagacaacatgctggcagtataattggagtgtggatttactgatcaggagacaagctaaagtcggtgcatctattttgttgaaactcagatcagctcattgcacatgcaactacaatttaaattcagtggaaagttgctgtttgtttcagctcagtagctaaagagaactaaagaattgaaaaagtcagtgtctcatcttcaaatgtgaagccatctgagaagtgaagtagcagccctgcaaactagacaaaataatgcttataccagaagtcaaagatcaggactggtttagtggtgagagttgtctcactgagtcactaggtcacatgtttgaagcagcctctccgcattcgaggggggaaggcttgctttgctttatccctttcccaaaccttacttatatatgggagcctccgctattgggtcatgccctccaataatttctacccgatgtcgctccacattattctgatatggagcatgattaacagctttgtgattaagcattgccatgcttcgagccatcacgttcatcaaatcaacttgcaagttacagattgtgctactacatcattccatgatcctattccatgcctcttcatcactgcttaaagaatcaaacaagaaccactacgcatcatagactctacaagccaaaaaggccaccaagaatgatgcatgcgaccacaagaaaaccacattttcagcacttatctgcagtgtcccatcttttgctatcaatcttaaacatatgtacataacccctcaaccaagctagtcaactatacaggcaactgaagcactacaactttgtttattttggataaggccccgcttaaatatggcataaaacaacggatgtcatcattttgtaacttgatataatatcttctacctaaaaagtgaatgatggatgcaatattttgcatgataaacagttcgaaatagttttaggatttatacaagtgttttattaccgtaacaaagaattattaatattgcaccctacaaactcctttgtttaaatttatacaaacgtttagaaataagcgcgcaaggcgcgcgttagccactagtagcatctgactgcatttgtagcccttacttatcataatatgtggtttgcttcttttggcttgaacctttctgata

SEQ ID NO: 4819 - DNA, 1001 bp, Zea Mays
cccagtccctgcactcgtgttcctgtagccgccaccccagcccctggacgctcggctcgatcccccccccccccctcaccacccgttctcctctagtcatcctcctcgccagtcgccaggtgtcggccgccggttgtgctccccgtcaggcgtcagcgtgatcccatcggtcgtcgcagaaacacagtcgctgctcgccgtcaccactcgccaggcgccggttcttctccaatccacgactcatcggctctccagtcctccgtccgttaccggtcatgccctccaataatttctacccgatgtcgctccacattattctgatatggagcatgattaacagctttgtgattaagcattgccatgcttcgagccatcacgttcatcaaatcaacttgcaagttacagattgtgctactacatcattccatgatcctattccatgcctcttcatcactgcttaaagaatcaaacaagaaccactacgcatcatagactctacaagccaaaaaggccaccaagaatgatgcatgcgaccacaagaaaaccacattttcagcacttatctgcagtgtcccatcttttgctatcaatcttaaacatatgtacataacccctcaaccaagctagtcaactatacaggcaactgaagcactacaactttgtttattttggataaggccccgcttaaatatggcataaaacaacggatgtcatcattttgtaacttgatataatatcttctacctaaaaagtgaatgatggatgcaatattttgcatgataaacagttcgaaatagttttaggatttatacaagtgttttattaccgtaacaaagaattattaatattgcaccctacaaactcctttgtttaaatttatacaaacgtttagaaataagcgcgcaaggcgcgcgttagccactagtagcatctgactgcatttgtagcccttacttatcataatatgtggtttgcttcttttggcttgaacctttctgata

SEQ ID NO: 4820 - DNA, 1000 bp, Zea Mays
cccagtccctgcactcgtgttcctgtagccgccaccccagcccctggacgctcggctcgatcccccccccccccctcaccacccgttctcctctagtcatcctcctcgccagtcgccaggtgtcggccgccggttgtgctccccgtcaggcgtcagcgtgatcccatcggtcgtcgcagaaacacagtcgctgctcgccgtcaccactcgccaggcgccggttcttctccaatccacgactcatcggctctccagtcctccgtccgttaccggtcatgccctccaataatttctacccgatgtcgctccacattattctgatatggagcatgattaacagctttgtgattaagcattgccatgcttcggccatcacgttcatcaaatcaacttgcaagttacagattgtgctactacatcattccatgatcctattccatgcctcttcatcactgcttaaagaatcaaacaagaaccactacgcatcatagactctacaagccaaaaaggccaccaagaatgatgcatgcgaccacaagaaaaccacattttcagcacttatctgcagtgtcccatcttttgctatcaatcttaaacatatgtacataacccctcaaccaagctagtcaactatacaggcaactgaagcactacaactttgtttattttggataaggccccgcttaaatatggcataaaacaacggatgtcatcattttgtaacttgatataatatcttctacctaaaaagtgaatgatggatgcaatattttgcatgataaacagttcgaaatagttttaggatttatacaagtgttttattaccgtaacaaagaattattaatattgcaccctacaaactcctttgtttaaatttatacaaacgtttagaaataagcgcgcaaggcgcgcgttagccactagtagcatctgactgcatttgtagcccttacttatcataatatgtggtttgcttcttttggcttgaacctttctgata

SEQ ID NO: 4821 - DNA, 2650 bp, Zea Mays
cccagtccctgcactcgtgttcctgtagccgccaccccagcccctggacgctcggctcgatcccccccccccccctcaccacccgttctcctctagtcatcctcctcgccagtcgccaggtgtcggccgccggttgtgctccccgtcaggcgtcagcgtgatcccatcggtcgtcgcagaaacacagtcgctgctcgccgtcaccactcgccaggcgccggttcttctccaatccacgactcatcggctctccagtcctccgtccgttaccgaatttaaagtgcaacgtgccgattctttatatgtacttctgaatgcttggacctggtgtgactacatagcctggtattcatttcataaatgatggaaagaagattgggacggcgtgtatatttgattcccagaacccttccctttatgcaactcaatgctatgtcctcattctcagctggccatggacgccgacccaagaagaaggtatatcaccgtgaacctggtcttgacagggccatggatcttcaaaagaagcctgcccttctccttcgtctgcgtgacctcattttggcacaaaagacaggatcactacttgtgcgtgaccttgaaaaggaggttggttttgtccaaaaatggaactttctttcacttatcgagcgtcaccccaatatcttccatgtctctggtggaagtgcttcccgagagcccatttctgtcacacttacggagaaggccagaaagatatccagtgaagaggctgaagcgcgagagctaatggagccaatcttggtgagaaaccttaggaagttactgatgatgtcgatggactgccagattcctctggataagattgaactaatccagtctgaactgggcttacctaacaacttcaagagcaacatgattccaaggtaccctgattttttttcaatccgtgatgtgaagggactggaccatttgtgtctggagaattgggactcttcactagcagtcacaatacgagaagaaaaaatgaactttgagggtttccagataggctgtagagggattcctaaagatggaaatgtcttgggtccttttgctttcaagttgaagtatccaacaggatttaggccaaaccggaagtaccttgaggaggttgtcaggtggcagaagatggcatttccttcgccttatttgaatgctagacgagtcgagtctgcaacaccacagtctcgaaagcgtgccattgctgttctgcatgagattttgagccttacaatggagagacgattgacatctgataagctagacatatttcacaacgagtacaggcttccatgcaagttacttctttgtttagtgaaaaatcatggcatcttttacatcactaacaagggagcaagaagcacagtcttcctcaaggaggcttatgaaaactgtaacctaattgataagtgtcctttactgaaattctatgatcagtttgcatcattgattggccgaccgtgctccaactcagacaacatgctggcagtataattggagtgtggatttactgatcaggagacaagctaaagtcggtgcatctattttgttgaaactcagatcagctcattgcacatgcaactacaatttaaattcagtggaaagttgctgtttgtttcagctcagtagctaaagagaactaaagaattgaaaaagtcagtgtctcatcttcaaatgtgaagccatctgagaagtgaagtagcagccctgcaaactagacaaaataatgcttataccagaagtcaaagatcaggactggtttagtggtgagagttgtctcactgagtcactaggtcacatgtttgaagcagcctctccgcattcgaggggggaaggcttgctttgctttatccctttcccaaaccttacttatatatgggagcctccgctattggtgtaggtcatgccctccaataatttctacccgatgtcgctccacattattctgatatggagcatgattaacagctttgtgattaagcattgccatgcttcgagccatcacgttcatcaaatcaacttgcaagttacagattgtgctactacatcattccatgatcctattccatgcctcttcatcactgcttaaagaatcaaacaagaaccactacgcatcatagactctacaagccaaaaaggccaccaagaatgatgcatgcgaccacaagaaaaccacattttcagcacttatctgcagtgtcccatcttttgctatcaatcttaaacatatgtacataacccctcaaccaagctagtcaactatacaggcaactgaagcactacaactttgtttattttggataaggccccgcttaaatatggcataaaacaacggatgtcatcattttgtaacttgatataatatcttctacctaaaaagtgaatgatggatgcaatattttgcatgataaacagttcgaaatagttttaggatttatacaagtgttttattaccgtaacaaagaattattaatattgcaccctacaaactcctttgtttaaatttatacaaacgtttagaaataagcgcgcaaggcgcgcgttagccactagtagcatctgactgcatttgtagcccttacttatcataatatgtggtttgcttcttttggcttgaacctttctgata

SEQ ID NO: 4822 - DNA, 1006 bp, Zea Mays
cccagtccctgcactcgtgttcctgtagccgccaccccagcccctggacgctcggctcgatcccccccccccccctcaccacccgttctcctctagtcatcctcctcgccagtcgccaggtgtcggccgccggttgtgctccccgtcaggcgtcagcgtgatcccatcggtcgtcgcagaaacacagtcgctgctcgccgtcaccactcgccaggcgccggttcttctccaatccacgactcatcggctctccagtcctccgtccgttaccgtgtaggtcatgccctccaataatttctacccgatgtcgctccacattattctgatatggagcatgattaacagctttgtgattaagcattgccatgcttcgagccatcacgttcatcaaatcaacttgcaagttacagattgtgctactacatcattccatgatcctattccatgcctcttcatcactgcttaaagaatcaaacaagaaccactacgcatcatagactctacaagccaaaaaggccaccaagaatgatgcatgcgaccacaagaaaaccacattttcagcacttatctgcagtgtcccatcttttgctatcaatcttaaacatatgtacataacccctcaaccaagctagtcaactatacaggcaactgaagcactacaactttgtttattttggataaggccccgcttaaatatggcataaaacaacggatgtcatcattttgtaacttgatataatatcttctacctaaaaagtgaatgatggatgcaatattttgcatgataaacagttcgaaatagttttaggatttatacaagtgttttattaccgtaacaaagaattattaatattgcaccctacaaactcctttgtttaaatttatacaaacgtttagaaataagcgcgcaaggcgcgcgttagccactagtagcatctgactgcatttgtagcccttacttatcataatatgtggtttgcttcttttggcttgaacctttctgata

SEQ ID NO: 4823 - DNA, 3998 bp, Zea Mays
cccagtccctgcactcgtgttcctgtagccgccaccccagcccctggacgctcggctcgatcccccccccccccctcaccacccgttctcctctagtcatcctcctcgccagtcgccaggtgtcggccgccggttgtgctccccgtcaggcgtcagcgtgatcccatcggtcgtcgcagaaacacagtcgctgctcgccgtcaccactcgccaggcgccggttcttctccaatccacgactcatcggctctccagtcctccgtccgttaccgaatttaaagtgcaacgtgccgattctttatatgtacttctgaatgcttggacctggtgtgactacatagcctggtattcatttcataaatgatggaaagaagattgggacggcgtgtatatttgattcccagaacccttccctttatgcaactcaatgctatgtcctcattctcagctggccatggacgccgacccaagaagaaggtatatcaccgtgaacctggtcttgacagggccatggatcttcaaaagaagcctgcccttctccttcgtctgcgtgacctcattttggcacaaaagacaggatcactacttgtgcgtgaccttgaaaaggaggttggttttgtccaaaaatggaactttctttcacttatcgagcgtcaccccaatatcttccatgtctctggtggaagtgcttcccgagagcccatttctgtcacacttacggagaaggccagaaagatatccagtgaagaggctgaagcgcgagagctaatggagccaatcttggtgagaaaccttaggaagttactgatgatgtcgatggactgccagattcctctggataagattgaactaatccagtctgaactgggcttacctaacaacttcaagagcaacatgattccaaggtaccctgattttttttcaatccgtgatgtgaagggactggaccatttgtgtctggagaattgggactcttcactagcagtcacaatacgagaagaaaaaatgaactttgagggtttccagataggctgtagagggattcctaaagatggaaatgtcttgggtccttttgctttcaagttgaagtatccaacaggatttaggccaaaccggaagtaccttgaggaggttgtcaggtggcagaagatggcatttccttcgccttatttgaatgctagacgagtcgagtctgcaacaccacagtctcgaaagcgtgccattgctgttctgcatgagattttgagccttacaatggagagacgattgacatctgataagctagacatatttcacaacgagtacaggcttccatgcaagttacttctttgtttagtgaaaaatcatggcatcttttacatcactaacaagggagcaagaagcacagtcttcctcaaggaggcttatgaaaactgtaacctaattgataagtgtcctttactgaaattctatgatcagtttgcatcattgattggccgaccgtgctccaactcagacaacatgctggcagtataattggagtgtggatttactgatcaggagacaagctaaagtcggtgcatctattttgttgaaactcagatcagctcattgcacatgcaactacaatttaaattcagtggaaagttgctgtttgtttcagctcagtagctaaagagaactaaagaattgaaaaagtcagtgtctcatcttcaaatgtgaagccatctgagaagtgaagtagcagccctgcaaactagacaaaataatgcttataccagaagtcaaagatcaggactggtttagtggtgagagttgtctcactgagtcactaggtcacatgtttgaagcagcctctccgcattcgaggggggaaggcttgctttgctttatccctttcccaaaccttacttatatatgggagcctccgctattggtgtaggtcatgccctccaataatttctacccgatgtcgctccacattattctgatatggagcatgattaacagctttgtgattaagcattgccatgcttcgagccatcacgttcatcaaatcaacttgcaagttacagattgtgctactacatcattccatgatcctattccatgcctcttcatcactgcttaaagtaccaaagtggctgtccacaacgcgcaaggaatgcctcggtgggagatgcatcaccctgatgttctcgagactcaactgcaacgctaaacggagctttcagtgggatctgttggaataataaccagatgggcatattctgagtaaagatcaaccgacaagattatgaatggtgtggacacattgaggtgaaatcatgctagctggctgccgctcggtttatagcccatgaaagcgaggagcatatacggggtgtgcagcgatcgggaccaggttgtgcagacaccacaagagggcacctatagtagtggtcatgagcctggtcagatgcaataaaaagctagattttgatgggagttagtggctgatagtttaggcaagcctatcctgaagtcatccgaacgaagaaaaggatggagactaggcgcccttttagtatcctgcttttttccttctggtataggtctggccagcgcagaccactgccattgttcacctgatgtctatccattgggaggaaagagagcacaccttattcaggctgtgcaaccgtctctctttggcttgcttggatgatcagactgaaacagtccctgatttgaacatctgagcctgctcagccgtcgccgtcccgtctgcctcctcacccggacaagaatttggactatgagcgtcaccctggagtctggtttctttccgactcctccagcagccaagtcatttttctacacttgtctcatctggagaaagcaatgtgtgcatgcttactctacatatccatggagtcagtaggggtccatcatcgtggcgtagcattgtgtggtttgttttaggttcagatttcgcgatctgggcgtacaaccagggctgcctgcctgcttgcctgtccctctttacccaatgcaatccaaggttttgttaaagttaagcaggcctccagtgctgcaacaattagagagacgctgatggtgggtgggatggaagggccgccgcatagatccagggaaagagagacgcgtttgtggtccatccatatgactggagagcctgaccctgacgccaacggcaagcagcagtggcggcatccagatcctggcgcaccgactgcacccgcccgtccggcaccttctttcggcggcagcggcactccgcgcgacacggggccgtgtccgtgtgggatgggatgggatggaatggaacacttctgggcggcttctggccgccagaagctgaaaccaaacgcccaacttctggcgcggcttctgggcgaagcgattgggtacggatccctcctccctatgccgtccgcaccgtcttctcctcgcattgccgcgtttccttcacccttttcctctgtccgtatggttgccgcagtgacgccgacgcccttgctccgtcctcaaggttccgcgtcgtcccaaccatcgcgtctgcatcttcgtaagattgtcgtatcacttcgagttcaaggtgttcggttccaagatcatctgggattcgaggacttcggttgcaacctccagttaagcaaaggtaccgtgccactcaatttgttgatgaattatttgtcaccatacatgctgtgtatttgttccaataacgtggatccatggcttgttttagttcattctttgtcagtacacctgaacaatgagtcgacggttaggataagacaacacagacattgtttatggggggatgttatttttcaatagagaacagattaccaattattgttcctggttaactacaatccattgatatgttgtatccctcatattaagggttcagggataccctccatgattgccaacctcattatctttatgattgtatattgaacccaaatttggtagagtatctgaatggatgtaagttaattgtcgta

SEQ ID NO: 4824 - DNA, 4435 bp, Zea Mays
cccagtccctgcactcgtgttcctgtagccgccaccccagcccctggacgctcggctcgatcccccccccccccctcaccacccgttctcctctagtcatcctcctcgccagtcgccaggtgtcggccgccggttgtgctccccgtcaggcgtcagcgtgatcccatcggtcgtcgcagaaacacagtcgctgctcgccgtcaccactcgccaggcgccggttcttctccaatccacgactcatcggctctccagtcctccgtccgttaccgaatttaaagtgcaacgtgccgattctttatatgtacttctgaatgcttggacctggtgtgactacatagcctggtattcatttcataaatgatggaaagaagattgggacggcgtgtatatttgattcccagaacccttccctttatgcaactcaatgctatgtcctcattctcagctggccatggacgccgacccaagaagaaggtatatcaccgtgaacctggtcttgacagggccatggatcttcaaaagaagcctgcccttctccttcgtctgcgtgacctcattttggcacaaaagacaggatcactacttgtgcgtgaccttgaaaaggaggttggttttgtccaaaaatggaactttctttcacttatcgagcgtcaccccaatatcttccatgtctctggtggaagtgcttcccgagagcccatttctgtcacacttacggagaaggccagaaagatatccagtgaagaggctgaagcgcgagagctaatggagccaatcttggtgagaaaccttaggaagttactgatgatgtcgatggactgccagattcctctggataagattgaactaatccagtctgaactgggcttacctaacaacttcaagagcaacatgattccaaggtaccctgattttttttcaatccgtgatgtgaagggactggaccatttgtgtctggagaattgggactcttcactagcagtcacaatacgagaagaaaaaatgaactttgagggtttccagataggctgtagagggattcctaaagatggaaatgtcttgggtccttttgctttcaagttgaagtatccaacaggatttaggccaaaccggaagtaccttgaggaggttgtcaggtggcagaagatggcatttccttcgccttatttgaatgctagacgagtcgagtctgcaacaccacagtctcgaaagcgtgccattgctgttctgcatgagattttgagccttacaatggagagacgattgacatctgataagctagacatatttcacaacgagtacaggcttccatgcaagttacttctttgtttagtgaaaaatcatggcatcttttacatcactaacaagggagcaagaagcacagtcttcctcaaggaggcttatgaaaactgtaacctaattgataagtgtcctttactgaaattctatgatcagtttgcatcattgattggccgaccgtgctccaactcagacaacatgctggcagtataattggagtgtggatttactgatcaggagacaagctaaagtcggtgcatctattttgttgaaactcagatcagctcattgcacatgcaactacaatttaaattcagtggaaagttgctgtttgtttcagctcagtagctaaagagaactaaagaattgaaaaagtcagtgtctcatcttcaaatgtgaagccatctgagaagtgaagtagcagccctgcaaactagacaaaataatgcttataccagaagtcaaagatcaggactggtttagtggtgagagttgtctcactgagtcactaggtcacatgtttgaagcagcctctccgcattcgaggggggaaggcttgctttgctttatccctttcccaaaccttacttatatatgggagcctccgctattggtgtaggtcatgccctccaataatttctacccgatgtcgctccacattattctgatatggagcatgattaacagctttgtgattaagcattgccatgcttcgagccatcacgttcatcaaatcaacttgcaagttacagattgtgctactacatcattccatgatcctattccatgcctcttcatcactgcttaaagattgtcctgtttctgttaaccaagacttgtgcgcctgggattattagcgccacttctttgtgatgcgctagtaacatctgggcagagggaactcacagtagggtcaaatatgagaaatgctcgccaatgaattatttctttatctatatccatcaggaacaggtatgcgaccatgtaattgtcaggctatttcatggcaggtatgctgtactatcgtttcttttttttggtgaaggtgctgctttatgtcaaaattgatagttgtcaaataaagaaactttctgattgagtgctgacggactgatgccattctctctctgaaagcttgtgggttacattgttgctttgccgaataatggtcaacctaataggggggcactcagtgctgttgttgatctgggatcagattctaaatgcggggaaaagctctagcaatgtaccaaagtggctgtccacaacgcgcaaggaatgcctcggtgggagatgcatcaccctgatgttctcgagactcaactgcaacgctaaacggagctttcagtgggatctgttggaataataaccagatgggcatattctgagtaaagatcaaccgacaagattatgaatggtgtggacacattgaggtgaaatcatgctagctggctgccgctcggtttatagcccatgaaagcgaggagcatatacggggtgtgcagcgatcgggaccaggttgtgcagacaccacaagagggcacctatagtagtggtcatgagcctggtcagatgcaataaaaagctagattttgatgggagttagtggctgatagtttaggcaagcctatcctgaagtcatccgaacgaagaaaaggatggagactaggcgcccttttagtatcctgcttttttccttctggtataggtctggccagcgcagaccactgccattgttcacctgatgtctatccattgggaggaaagagagcacaccttattcaggctgtgcaaccgtctctctttggcttgcttggatgatcagactgaaacagtccctgatttgaacatctgagcctgctcagccgtcgccgtcccgtctgcctcctcacccggacaagaatttggactatgagcgtcaccctggagtctggtttctttccgactcctccagcagccaagtcatttttctacacttgtctcatctggagaaagcaatgtgtgcatgcttactctacatatccatggagtcagtaggggtccatcatcgtggcgtagcattgtgtggtttgttttaggttcagatttcgcgatctgggcgtacaaccagggctgcctgcctgcttgcctgtccctctttacccaatgcaatccaaggttttgttaaagttaagcaggcctccagtgctgcaacaattagagagacgctgatggtgggtgggatggaagggccgccgcatagatccagggaaagagagacgcgtttgtggtccatccatatgactggagagcctgaccctgacgccaacggcaagcagcagtggcggcatccagatcctggcgcaccgactgcacccgcccgtccggcaccttctttcggcggcagcggcactccgcgcgacacggggccgtgtccgtgtgggatgggatgggatggaatggaacacttctgggcggcttctggccgccagaagctgaaaccaaacgcccaacttctggcgcggcttctgggcgaagcgattgggtacggatccctcctccctatgccgtccgcaccgtcttctcctcgcattgccgcgtttccttcacccttttcctctgtccgtatggttgccgcagtgacgccgacgcccttgctccgtcctcaaggttccgcgtcgtcccaaccatcgcgtctgcatcttcgtaagattgtcgtatcacttcgagttcaaggtgttcggttccaagatcatctgggattcgaggacttcggttgcaacctccagttaagcaaaggtaccgtgccactcaatttgttgatgaattatttgtcaccatacatgctgtgtatttgttccaataacgtggatccatggcttgttttagttcattctttgtcagtacacctgaacaatgagtcgacggttaggataagacaacacagacattgtttatggggggatgttatttttcaatagagaacagattaccaattattgttcctggttaactacaatccattgatatgttgtatccctcatattaagggttcagggataccctccatgattgccaacctcattatctttatgattgtatattgaacccaaatttggtagagtatctgaatggatgtaagttaattgtcgta

SEQ ID NO: 4825 - DNA, 2788 bp, Zea Mays
cccagtccctgcactcgtgttcctgtagccgccaccccagcccctggacgctcggctcgatcccccccccccccctcaccacccgttctcctctagtcatcctcctcgccagtcgccaggtgtcggccgccggttgtgctccccgtcaggcgtcagcgtgatcccatcggtcgtcgcagaaacacagtcgctgctcgccgtcaccactcgccaggcgccggttcttctccaatccacgactcatcggctctccagtcctccgtccgttaccgtgtaggtcatgccctccaataatttctacccgatgtcgctccacattattctgatatggagcatgattaacagctttgtgattaagcattgccatgcttcgagccatcacgttcatcaaatcaacttgcaagttacagattgtgctactacatcattccatgatcctattccatgcctcttcatcactgcttaaagtaccaaagtggctgtccacaacgcgcaaggaatgcctcggtgggagatgcatcaccctgatgttctcgagactcaactgcaacgctaaacggagctttcagtgggatctgttggaataataaccagatgggcatattctgagtaaagatcaaccgacaagattatgaatggtgtggacacattgaggtgaaatcatgctagctggctgccgctcggtttatagcccatgaaagcgaggagcatatacggggtgtgcagcgatcgggaccaggttgtgcagacaccacaagagggcacctatagtagtggtcatgagcctggtcagatgcaataaaaagctagattttgatgggagttagtggctgatagtttaggcaagcctatcctgaagtcatccgaacgaagaaaaggatggagactaggcgcccttttagtatcctgcttttttccttctggcctccagtgctgcaagtgggttgcttctagcatgagcttccgtgccgtactcctagttgcgagtttgcttctggagctttcttggggtgtttctttctctgtcctgtatgtttgcagcaattagagagacgctgatggtgggtgggatggaagggccgccgcatagatccagggaaagagagacgcgtttgtggtccatccatatgactggagagcctgaccctgacgccaacggcaagcagcagtggcggcatccagatcctggcgcaccgactgcacccgcccgtccggcaccttctttcggcggcagcggcactccgcgcgacacggggccgtgtccgtgtgggatgggatgggatggaatggaacagtaggctttttggcatttgcgaggacgcccaggcctgactcctctgaggccatctccatctccagcaggccgtataaacggctgtcgtttaggcatgcattaaccagagtatgagatttatgggagcaccttgagtggctcatggatcccctggactagcgtgcgcggtccatcacgcggtgtctgtttctgaattgagggtacgagggagcaataatggagcagccatggagatttcacccaacaacaacaacaaagaaaaaagaaataaaaagaggagatgaataagaatggtttacctatcacattccaacttccctttcattatcaacattccaacttccttttcattatcaacattccaactccttgccctgtgacagaggctgaaagcaggagcgatgattccgatccatcgccacccagtggagtggatgtaacatcacattttatctgcacctctcatcctccgctttgcgtggtcctactacataaacatagacacgcatgtccatgttctctgccgccatggccgccatagcagctgggcctgcttctgctgctgctgctgccaccacctaatgtgaaaggttgctagtgtgccttaaagcacaaggctttattagcttcttttttcccaggtggttacttcagagtcacagagcatttggtaataaagccgtaccgtgtatatgcatatgcatggtcatctcatgacatctatagtagtgtgtgggcggcaataatgctagctggttatagtagccaccatcaaggtggatctatctatgcggctgtttggttcagcttctgggcggcttctggccgccagaagctgaaaccaaacgcccaacttctggcgcggcttctgggcgaagcgattgggtacggatccctcctccctatgccgtccgcaccgtcttctcctcgcattgccgcgtttccttcacccttttcctctgtccgtatggttgccgcagtgacgccgacgcccttgctccgtcctcaaggttccgcgtcgtcccaaccatcgcgtctgcatcttcgtaagattgtcgtatcacttcgagttcaaggtgttcggttccaagatcatctgggattcgaggacttcggttgcaacctccagttaagcaaaggtaccgtgccactcaatttgttgatgaattatttgtcaccatacatgctgtgtatttgttccaataacgtggatccatggcttgttttagttcattctttgtcagtacacctgaacaatgagtcgacggttaggataagacaacacagacattgtttatggggggatgttatttttcaatagagaacagattaccaattattgttcctggttaactacaatccattgatatgttgtatccctcatattaagggttcagggataccctccatgattgccaacctcattatctttatgattgtatattgaacccaaatttggtagagtatctgaatggatgtaagttaattgtcgta

SEQ ID NO: 4826 - DNA, 3902 bp, Zea Mays
atggagggggtgcagctacgattcaagcagagggccgctgaaacacaacatggcggcaggagaggagggtggcggcaatggagaaggggcgatgacactagagaagggggtggggcgctagagaatggtgcacgtgcgactgtgcgctacgtaatgcgtgtaccgtattggtacagagaccggattagaggcccaaaacaggtataactagtctaccataacccctagccggacgactaatcatgagtagtcgacgactaggatgactaatcgtttgctagtcgctctagtcgagtcaaagaccctaattgagcttgcactagcgattagtcggacgacttaaaaaccttgctctagagtctagccattgttctttgcaaggatgccagccccaaagagtgttgtttcaacctccagcacaaccattcctcctgagatgttaaagctcaagtctctggccatttctagtctatgaaggatcccttttgccattgacaattgtcttgagatgtgcccaacttttttctggctccaggattgcaactgctgtgatagtctactcaacttatctgcaaaacgttggagagggcatgtagcttcatccgactgagaccatgaacttgccacctcatctatgaagccatcgagcaccaaaggacagtgatccgagatcaaagaagcagtgctttgcaataaacagtccagaaagatgtcctcccattcactggtatacaagaccctgtccagccgaaccaaggtcggggaagaccgtttattcgaccatgtaaagcgcctccctaacatcagtaattccataagctgaagctcattaataagcctccgaaaccgacacttcatagctctatccagattaccattatttttatcttctgcccggcttataagattgaagtcaccccctatcacccaaggtccctggcacatagaacgcaccaaacggagttcttgtaaaaacaaaagcttcttatcatccagatgtggaccatacactcccagtaagccaccagggtgaggcattgtgttgatcaaactgtcataaacctcattatggtttgcagtgtgctcactcagaattttgccctgtggcttttgcatcctatacaatcagcaaattcatgttgcagattgtcctgtttctgttaaccaagacttgtgcgcctgggattattagcgccacttctttgtgatgcgctagtaacatctgggcagagggaactcacagtagggtcaaatatgagaaatgctcgccaatgaattatttctttatctatatccatcaggaacaggtatgcgaccatgtaattgtcaggctatttcatggcaggtatgctgtactatcgtttcttttttttggtgaaggtgctgctttatgtcaaaattgatagttgtcaaataaagaaactttctgattgagtgctgacggactgatgccattctctctctgaaagcttgtgggttacattgttgctttgccgaataatggtcaacctaataggggggcactcagtgctgttgttgatctgggatcagattctaaatgcggggaaaagctctagcaatgtaccaaagtggctgtccacaacgcgcaaggaatgcctcggtgggagatgcatcaccctgatgttctcgagactcaactgcaacgctaaacggagctttcagtgggatctgttggaataataaccagatgggcatattctgagtaaagatcaaccgacaagattatgaatggtgtggacacattgaggtgaaatcatgctagctggctgccgctcggtttatagcccatgaaagcgaggagcatatacggggtgtgcagcgatcgggaccaggttgtgcagacaccacaagagggcacctatagtagtggtcatgagcctggtcagatgcaataaaaagctagattttgatgggagttagtggctgatagtttaggcaagcctatcctgaagtcatccgaacgaagaaaaggatggagactaggcgcccttttagtatcctgcttttttccttctggcctccagtgctgcaagtgggttgcttctagcatgagcttccgtgccgtactcctagttgcgagtttgcttctggagctttcttggggtgtttctttctctgtcctgtatgtttgcagcaattagagagacgctgatggtgggtgggatggaagggccgccgcatagatccagggaaagagagacgcgtttgtggtccatccatatgactggagagcctgaccctgacgccaacggcaagcagcagtggcggcatccagatcctggcgcaccgactgcacccgcccgtccggcaccttctttcggcggcagcggcactccgcgcgacacggggccgtgtccgtgtgggatgggatgggatggaatggaacagtaggctttttggcatttgcgaggacgcccaggcctgactcctctgaggccatctccatctccagcaggccgtataaacggctgtcgtttaggcatgcattaaccagagtatgagatttatgggagcaccttgagtggctcatggatcccctggactagcgtgcgcggtccatcacgcggtgtctgtttctgaattgagggtacgagggagcaataatggagcagccatggagatttcacccaacaacaacaacaaagaaaaaagaaataaaaagaggagatgaataagaatggtttacctatcacattccaacttccctttcattatcaacattccaacttccttttcattatcaacattccaactccttgccctgtgacagaggctgaaagcaggagcgatgattccgatccatcgccacccagtggagtggatgtaacatcacattttatctgcacctctcatcctccgctttgcgtggtcctactacataaacatagacacgcatgtccatgttctctgccgccatggccgccatagcagctgggcctgcttctgctgctgctgctgccaccacctaatgtgaaaggttgctagtgtgccttaaagcacaaggctttattagcttcttttttcccaggtggttacttcagagtcacagagcatttggtaataaagccgtaccgtgtatatgcatatgcatggtcatctcatgacatctatagtagtgtgtgggcggcaataatgctagctggttatagtagccaccatcaaggtggatctatctatgcggctgtttggttcagcttctgggcggcttctggccgccagaagctgaaaccaaacgcccaacttctggcgcggcttctgggcgaagcgattgggtacggatccctcctccctatgccgtccgcaccgtcttctcctcgcattgccgcgtttccttcacccttttcctctgtccgtatggttgccgcagtgacgccgacgcccttgctccgtcctcaaggttccgcgtcgtcccaaccatcgcgtctgcatcttcgtaagattgtcgtatcacttcgagttcaaggtgttcggttccaagatcatctgggattcgaggacttcggttgcaacctccagttaagcaaaggtaccgtgccactcaatttgttgatgaattatttgtcaccatacatgctgtgtatttgttccaataacgtggatccatggcttgttttagttcattctttgtcagtacacctgaacaatgagtcgacggttaggataagacaacacagacattgtttatggggggatgttatttttcaatagagaacagattaccaattattgttcctggttaactacaatccattgatatgttgtatccctcatattaagggttcagggataccctccatgattgccaacctcattatctttatgattgtatattgaacccaaatttggtagagtatctgaatggatgtaagttaattgtcgta

SEQ ID NO: 4827 - DNA, 2473 bp, Zea Mays
atggagggggtgcagctacgattcaagcagagggccgctgaaacacaacatggcggcaggagaggagggtggcggcaatggagaaggggcgatgacactagagaagggggtggggcgctagagaatggtgcacgtgcgactgtgcgctacgtaatgcgtgtaccgtattggtacagagaccggattagaggcccaaaacaggtataactagtctaccataacccctagccggacgactaatcatgagtagtcgacgactaggatgactaatcgtttgctagtcgctctagtcgagtcaaagaccctaattgagcttgcactagcgattagtcggacgacttaaaaaccttgctctagagtctagccattgttctttgcaaggatgccagccccaaagagtgttgtttcaacctccagcacaaccattcctcctgagatgttaaagctcaagtctctggccatttctagtctatgaaggatcccttttgccattgacaattgtcttgagatgtgcccaacttttttctggctccaggattgcaactgctgtgatagtctactcaacttatctgcaaaacgttggagagggcatgtagcttcatccgactgagaccatgaacttgccacctcatctatgaagccatcgagcaccaaaggacagtgatccgagatcaaagaagcagtgctttgcaataaacagtccagaaagatgtcctcccattcactggtatacaagaccctgtccagccgaaccaaggtcggggaagaccgtttattcgaccatgtaaagcgcctccctaacatcagtaattccataagctgaagctcattaataagcctccgaaaccgacacttcatagctctatccagattaccattatttttatcttctgcccggcttataagattgaagtcaccccctatcacccaaggtccctggcacatagaacgcaccaaacggagttcttgtaaaaacaaaagcttcttatcatccagatgtggaccatacactcccagtaagccaccagggtgaggcattgtgttgatcaaactgtcataaacctcattatggtttgcagtgtgctcactcagaattttgccctgtggcttttgcatcctatacaatcagcaaattcatgttgcagattgtcctgtttctgttaaccaagacttgtgcgcctgggattattagcgccacttctttgtgatgcgctagtaacatctgggcagagggaactcacagtagggtcaaatatgagaaatgctcgccaatgaattatttctttatctatatccatcaggaacaggtatgcgaccatgtaattgtcaggctatttcatggcagtctaaaacgaattgctaaaccgtctctcgcaagctttagaggaagtcagttgctaaacgtctcttcatcacaggttcagatttcgcgatctgggcgtacaaccagggctgcctgcctgcttgcctgtccctctttacccaatgcaatccaaggttttgttaaagttaagcaggcctccagtgctgcaacaattagagagacgctgatggtgggtgggatggaagggccgccgcatagatccagggaaagagagacgcgtttgtggtccatccatatgactggagagcctgaccctgacgccaacggcaagcagcagtggcggcatccagatcctggcgcaccgactgcacccgcccgtccggcaccttctttcggcggcagcggcactccgcgcgacacggggccgtgtccgtgtgggatgggatgggatggaatggaacacttctgggcggcttctggccgccagaagctgaaaccaaacgcccaacttctggcgcggcttctgggcgaagcgattgggtacggatccctcctccctatgccgtccgcaccgtcttctcctcgcattgccgcgtttccttcacccttttcctctgtccgtatggttgccgcagtgacgccgacgcccttgctccgtcctcaaggttccgcgtcgtcccaaccatcgcgtctgcatcttcgtaagattgtcgtatcacttcgagttcaaggtgttcggttccaagatcatctgggattcgaggacttcggttgcaacctccagttaagcaaaggtaccgtgccactcaatttgttgatgaattatttgtcaccatacatgctgtgtatttgttccaataacgtggatccatggcttgttttagttcattctttgtcagtacacctgaacaatgagtcgacggttaggataagacaacacagacattgtttatggggggatgttatttttcaatagagaacagattaccaattattgttcctggttaactacaatccattgatatgttgtatccctcatattaagggttcagggataccctccatgattgccaacctcattatctttatgattgtatattgaacccaaatttggtagagtatctgaatggatgtaagttaattgtcgta

SEQ ID NO: 4828 - DNA, 573 bp, Zea Mays
tgcgcgagtgccattgttagttaaatgctgctgtactgcatacgattcatttacttgtggacagcttttctttggctgaggacgaagacggcgaagctgaggatgacgagcttgacgcagacgcagaagacaaggagaacatcgaaagcaaggcaggatcttccctgccaaataagaggaaaaggaataacgaggatgatgccaatggatacaagtaaaacggtgagggaaagtagtattttcctgaacttcggaaacgttcctgtgcactgattattatttgtatgcttttcgagtcttttttttcccgcacttgtaatagactagagcatagttttttttaggcggttccacttctgaagtatcgtttggattctggaagttgtctgactctgaaaccatgagtaggatgtgtccccagcacgtatatacgctttgtttggtgtgctttgtttggtgtgacttcctgatgctactaatcgagatcccagtttatattatgctgatgtaaacatggaatttgtgaaacaaattcaagggtaggaaaatttcaatgaagatcggacaccatac

SEQ ID NO: 4829 - DNA, 765 bp, Zea Mays
aaccctcacagttctggggctgtgagtatcagagtatgtctatcaccttgattttgtttttacatcttggcagctgtcagtaaaatcattctttgtttgttgttatctaaacttggtagtgttgaacacttgatgatgctatgtttgcactttgcagtacaagtttggccctgttttataccttcaaaattaactgtcatggcctcgcagccttgcgtacatgcccccaaaccattctatctagctcattcttggactttcctgcggctgaggacgaagacggcgaagctgaggatgacgagcttgacgcagacgcagaagacaaggagaacatcgaaagcaaggcaggatcttccctgccaaataagaggaaaaggaataacgaggatgatgccaatggatacaagtaaaacggtgagggaaagtagtattttcctgaacttcggaaacgttcctgtgcactgattattatttgtatgcttttcgagtcttttttttcccgcacttgtaatagactagagcatagttttttttaggcggttccacttctgaagtatcgtttggattctggaagttgtctgactctgaaaccatgagtaggatgtgtccccagcacgtatatacgctttgtttggtgtgctttgtttggtgtgacttcctgatgctactaatcgagatcccagtttatattatgctgatgtaaacatggaatttgtgaaacaaattcaagggtaggaaaatttcaatgaagatcggacaccatac

SEQ ID NO: 4830 - DNA, 2735 bp, Zea Mays
gcatacagtcaacctaacacacccgagcatatcacagtgacagacacgatggtgagcgccagaattgttgtcctcctcgccaccctcctatgcgctgccgccgcagtcgcgtcgtcctgggaggacgacaaccaccaccaccacgggggccacaagtccgggcaatgcgtgcggcggtgcgaggaccggccctggcaccagcgcccccggtgcctggagcagtgcagggaggaggagcgggagaagcggcaagagcggagcaggcacgaggccgacgaccgcagcggcgagggctcgtcggaggatgagcgagagcaggagaaggagaaacagaaggaccggcggccgtacgtgttcgaccggcgcagctttcgtcgcgtggtccggagcgagcaggggtccctgagggtgctccggcccttcgacgaggtgtccaggctcctccgcggcatccgggactaccgcgtggcggtcctggaggcgaacccgcgctcgttcgtggtgcccagccacaccgacgcgcactgcatctgctacgtggcggaaggcgagggagtggtgacgacgatcgagaacggcgagaggcggtcatacaccatcaagcaaggccacgtcttcgtggcgccggccggggcggtcacctacctgggccaacaccgacggccggaagaaactggtcatcgccaagatcctccataccatctccgtgcctggcgagttccagttcttcttcggccccggcgggaggaacccggaatcgttcctgtcgagcttcagcaagagcatccagagagctgcatacaagacctcgagcgaccgtctggagaggctgttcgggaggcatgggcaggacaaggggatcatcgtgcgcgccacggaggagcagacccgcgagctgcggcgccacgcctcggagggcggccacggcccgcactggcccctgccgccgttcggcgagtcgcgcggcccctacagcctcctggaccagcggcccagcatcgccaaccagcacgggcagctctacgaggccgacgcgcgcagcttccacgacctcgccgagcacgacgtcagcgtctccttcgccaacatcaccgcggggtccatgagcgcgccattgttcaacacccgttcgttcaagatcgcctacgtgccgaacggcaagggctacgccgagatcgtgtgcccgcaccgccagtcgcagggcggcgagagcgagcgcgagcgcgacaagggcaggaggagcgaagaagaagaagaagaatcgtctgaggagcaggaggaggccgggcaggggtaccacaccatccgggcgcggctgtcaccgggcacggcgttcgtggtgcccgcgggccacccgttcgtcgcggtggcgtcccgggacagcaacctccagatcgtgtgcttcgaggtccacgccgacaggaacgagaaggtgttcctggccggcgccgacaacgtgctgcagaagctcgaccgggtcgccaaggcgctgtcattcgcctccaaggcggaggaggtggacgaggtgctcggctcgcggcgcgagaaggggttccttcctggccccaaggagagtggcggagacgctcatgaggatggttaccgccaggatgtgaggccgccgcgctcgccaaaacgagcaagaagcaacaagagggtggcgcgcgaccgacgtgcgtacgtagcatgagcctgagtggagacgttggacgtgtatgtatatacctctctgcgtgttaactatgtacgtaagcggcaggcagtgcaataagtgtggctctgtagtatgtacgtgcggatacgatgctgtatgctactgaggcaagtcccataaataaataatgacacgtgcgtgttctataatctcttcgcttcttcagtgtccccttgcggagtttggcatccattgatgccgttacactgagaacataacggacacagtagacgaaccacttgagttcttgtatgaaattctgacccttttttttgaaggatcaggagggggaaacccctactggcctggtccttttacaatcaataaaaagaaaagaaaaagaaagaaaaaggaagagctatttctatatttgccacaaatttagccagttcgggattgaggtgtcgaattctccccgtgctctgtgaatgattagtcgcaattctctactaaattcctgagtacagcggagcacggagggatctctgtttgaaaacaaccactcgtttcggcttttccagatgctccaagtcataagaatagtgatctccatagagaagggaacgttgagctggtgtttgaggttcacagatgcctcttcagggttggaaattctgggtggggtaatgccaattgagttccagcaggctttcgcgaagttgcatctgaggaaaagatgataaagggtctcctctctttgccaaaggcagttttcgcaagagtaggaatctagctccatgtttctccttctcaacatatttctggtgtttagcctgttcttaagccacagccaatagaagactctatgcttaggctgacacttacttttccaaactagtttgtagataggatgagtttgcatctggcccatgaaagatctgtaagctttttgggacgagaatttgtccgatccccaaatgtacttcaagcggtcatgaacatcattaagaataatttgctcccaagaccccttgagcaccagaaattgatcaaacgcttgatcagagacaggtaaatgaaa

SEQ ID NO: 4831 - DNA, 2501 bp, Zea Mays
gcatacagtcaacctaacacacccgagcatatcacagtgacagacacgatggtgagcgccagaattgttgtcctcctcgccaccctcctatgcgctgccgccgcagtcgcgtcgtcctgggaggacgacaaccaccaccaccacgggggccacaagtccgggcaatgcgtgcggcggtgcgaggaccggccctggcaccagcgcccccggtgcctggagcagtgcagggaggaggagcgggagaagcggcaagagcggagcaggcacgaggccgacgaccgcagcggcgagggctcgtcggaggatgagcgagagcaggagaaggagaaacagaaggaccggcggccgtacgtgttcgaccggcgcagctttcgtcgcgtggtccggagcgagcaggggtccctgagggtgctccggcccttcgacgaggtgtccaggctcctccgcggcatccgggactaccgcgtggcggtcctggaggcgaacccgcgctcgttcgtggtgcccagccacaccgacgcgcactgcatctgctacgtggcggaaggcgagggagtggtgacgacgatcgagaacggcgagaggcggtcatacaccatcaagcaaggccacgtcttcgtggcgccggccggggcggtcacctacctgggccaacaccgacggccggaagaaactggtcatcgccaagatcctccataccatctccgtgcctggcgagttccagttcttcttcggccccggcgggaggaacccggaatcgttcctgtcgagcttcagcaagagcatccagagagctgcatacaagacctcgagcgaccgtctggagaggctgttcgggaggcaagggcaggaggagcgaagaagaagaagaagaatcgtctgaggagcaggaggaggccgggcaggggtaccacaccatccgggcgcggctgtcaccgggcacggcgttcgtggtgcccgcgggccacccgttcgtcgcggtggcgtcccgggacagcaacctccagatcgtgtgcttcgaggtccacgccgacaggaacgagaaggtgttcctggccggcgccgacaacgtgctgcagaagctcgaccgggtcgccaaggcgctgtcattcgcctccaaggcggaggaggtggacgaggtgctcggctcgcggcgcgagaaggggttccttcctggccccaaggagagcggcggccacgaggagcgggagcaagaggaggaggaggaacgcgaagaacgccacggcggccgtggggagagggaacgccacggacgtgaggagcgggagaaagaggaggaggaacgcgaaggacgccacggccgcgggcgccgcgaggaggtggcggagacgctcatgaggatggttaccgccaggatgtgaggccgccgcgctcgccaaaacgagcaagaagcaacaagagggtggcgcgcgaccgacgtgcgtacgtagcatgagcctgagtggagacgttggacgtgtatgtatatacctctctgcgtgttaactatgtacgtaagcggcaggcagtgcaataagtgtggctctgtagtatgtacgtgcggatacgatgctgtatgctactgaggcaagtcccataaataaataatgacacgtgcgtgttctataatctcttcgcttcttcagtgtccccttgcggagtttggcatccattgatgccgttacactgagaacataacggacacagtagacgaaccacttgagttcttgtatgaaattctgacccttttttttgaaggatcaggagggggaaacccctactggcctggtccttttacaatcaataaaaagaaaagaaaaagaaagaaaaaggaagagctatttctatatttgccacaaatttagccagttcgggattgaggtgtcgaattctccccgtgctctgtgaatgattagtcgcaattctctactaaattcctgagtacagcggagcacggagggatctctgtttgaaaacaaccactcgtttcggcttttccagatgctccaagtcataagaatagtgatctccatagagaagggaacgttgagctggtgtttgaggttcacagatgcctcttcagggttggaaattctgggtggggtaatgccaattgagttccagcaggctttcgcgaagttgcatctgaggaaaagatgataaagggtctcctctctttgccaaaggcagttttcgcaagagtaggaatctagctccatgtttctccttctcaacatatttctggtgtttagcctgttcttaagccacagccaatagaagactctatgcttaggctgacacttacttttccaaactagtttgtagataggatgagtttgcatctggcccatgaaagatctgtaagctttttgggacgagaatttgtccgatccccaaatgtacttcaagcggtcatgaacatcattaagaataatttgctcccaagaccccttgagcaccagaaattgatcaaacgcttgatcagagacaggtaaatgaaa

SEQ ID NO: 4832 - DNA, 2726 bp, Zea Mays
gcatacagtcaacctaacacacccgagcatatcacagtgacagacacgatggtgagcgccagaattgttgtcctcctcgccaccctcctatgcgctgccgccgcagtcgcgtcgtcctgggaggacgacaaccaccaccaccacgggggccacaagtccgggcaatgcgtgcggcggtgcgaggaccggccctggcaccagcgcccccggtgcctggagcagtgcagggaggaggagcgggagaagcggcaagagcggagcaggcacgaggccgacgaccgcagcggcgagggctcgtcggaggatgagcgagagcaggagaaggagaaacagaaggaccggcggccgtacgtgttcgaccggcgcagctttcgtcgcgtggtccggagcgagcaggggtccctgagggtgctccggcccttcgacgaggtgtccaggctcctccgcggcatccgggactaccgcgtggcggtcctggaggcgaacccgcgctcgttcgtggtgcccagccacaccgacgcgcactgcatctgctacgtggcggaaggcgagggagtggtgacgacgatcgagaacggcgagaggcggtcatacaccatcaagcaaggccacgtcttcgtggcgccggccggggcggtcacctacctgggccaacaccgacggccggaagaaactggtcatcgccaagatcctccataccatctccgtgcctggcgagttccagttcttcttcggccccggcgggaggaacccggaatcgttcctgtcgagcttcagcaagagcatccagagagctgcatacaagacctcgagcgaccgtctggagaggctgttcgggaggcatgggcaggacaaggggatcatcgtgcgcgccacggaggagcagacccgcgagctgcggcgccacgcctcggagggcggccacggcccgcactggcccctgccgccgttcggcgagtcgcgcggcccctacagcctcctggaccagcggcccagcatcgccaaccagcacgggcagctctacgaggccgacgcgcgcagcttccacgacctcgccgagcacgacgtcagcgtctccttcgccaacatcaccgcggggtccatgagcgcgccattgttcaacacccgttcgttcaagatcgcctacgtgccgaacggcaagggctacgccgagatcgtgtgcccgcaccgccagtcgcagggcggcgagagcgagcgcgagcgcgacaagggcaggaggagcgaagaagaagaagaagaatcgtctgaggagcaggaggaggccgggcaggggtaccacaccatccgggcgcggctgtcaccgggcacggcgttcgtggtgcccgcgggccacccgttcgtcgcggtggcgtcccgggacagcaacctccagatcgtgtgcttcgaggtccacgccgacaggaacgagaaggtgttcctggccggcgccgacaacgtgctgcagaagctcgaccgggtcgccaaggcgctgtcattcgcctccaaggcggaggaggtggacgaggtgctcggctcgcggcgcgagaaggggttccttcctggccccaaggagaacgctcatgaggatggttaccgccaggatgtgaggccgccgcgctcgccaaaacgagcaagaagcaacaagagggtggcgcgcgaccgacgtgcgtacgtagcatgagcctgagtggagacgttggacgtgtatgtatatacctctctgcgtgttaactatgtacgtaagcggcaggcagtgcaataagtgtggctctgtagtatgtacgtgcggatacgatgctgtatgctactgaggcaagtcccataaataaataatgacacgtgcgtgttctataatctcttcgcttcttcagtgtccccttgcggagtttggcatccattgatgccgttacactgagaacataacggacacagtagacgaaccacttgagttcttgtatgaaattctgacccttttttttgaaggatcaggagggggaaacccctactggcctggtccttttacaatcaataaaaagaaaagaaaaagaaagaaaaaggaagagctatttctatatttgccacaaatttagccagttcgggattgaggtgtcgaattctccccgtgctctgtgaatgattagtcgcaattctctactaaattcctgagtacagcggagcacggagggatctctgtttgaaaacaaccactcgtttcggcttttccagatgctccaagtcataagaatagtgatctccatagagaagggaacgttgagctggtgtttgaggttcacagatgcctcttcagggttggaaattctgggtggggtaatgccaattgagttccagcaggctttcgcgaagttgcatctgaggaaaagatgataaagggtctcctctctttgccaaaggcagttttcgcaagagtaggaatctagctccatgtttctccttctcaacatatttctggtgtttagcctgttcttaagccacagccaatagaagactctatgcttaggctgacacttacttttccaaactagtttgtagataggatgagtttgcatctggcccatgaaagatctgtaagctttttgggacgagaatttgtccgatccccaaatgtacttcaagcggtcatgaacatcattaagaataatttgctcccaagaccccttgagcaccagaaattgatcaaacgcttgatcagagacaggtaaatgaaa

SEQ ID NO: 4833 - DNA, 1616 bp, Zea Mays
tgcatgggagtatggatcaccatcagtctgtggttgctgattttttttaaagcttaatccttttgtcaaacatcctcatttatacctcttgtggtaaaaaactcagctttgaatcttagagtcatcgttgtaagccatgacactgaggtaaaatggctcgacgttatgacctatgacgccaagattgcatgactggtgatcatataatgctagtgtggtagtcatcttgttgccgtaacctttgtgccacaatcttggcgccgaggtggctccactatggcgtgactgcgtgagcatagctccactatagagttaaagtactatttagaagtataagataacttataaatatcattatagagaagatgattttgagaatacggtaagagaagtctgttaaaaagagtgttataataggggaaaaaaactcccctcgctccttcaccggcgcttcctcccgagctgcctccgctccgccgccagctgtcccctccccagcgcgtcatccgtctgcacgccaccgcctatccactcgcctgcacatcgccgccctagcagagacgtctgcacatcggcgcctggaggacgagaagcgaggaagaagacccacactctcctggaaaacgcatcacaagacttcagcctccctttccggccggagatccgactcgcgtctccgcgacagatccgggcaaacggcggctgatgcagttcttcggcggttcgtcgctgacgtcgatcgcgccggaggcgaccccagccccggcggcgccccccggcacgggcacgggcgccagcgcgcaggtcctctacgtcttcaaccgtaacggcgtctgcctgctctaccgcgagtggcatcgcccgctccgcacgctcgatcccacccaggaccacaagctcatgttcggactcctcttctcccttcgctccttcaccgccaagatcgacccaaccacggctgaaaagggaaatcttggagtgccactgctgccaggccaaggttgctcgttttatagcttcaagacaaacacatacaaactgaacttcatggagagcccttctggtataaagcttatattaattacacatccaaggactggtgatcagcgagactcgctaaagcatatatacaatctatatgtggaatatgttgtaaaaaatcctctgtatgctcctggaacaccaatcaagtgtgaacttttcaataaacatctcgatcaatacgtgaaaacattaatttgatgccattgagcttttgaaaggtgcaggcttttgacttctgggagcttaaacctttttggacctcctaaaagctagcagtccaaaagtggctagaagctgaaacatgtcggcggtgtattctattttttagtactctgtcagagagccatgaagagtgaaacataagtatttgctatgttaagagtcttggttacctgttaggtaacaaatcagttttctttgctcgattccttgaatttataatgcggtcttcatctctactatataaaacaccagtttttcaggttttcacgtatacatggccgctcaacgtaaccttcccattttataaaaaataaaataaaattatgcacaagtggtcatttgaacctttg

SEQ ID NO: 4834 - DNA, 1309 bp, Zea Mays
caatcttggcgccgaggtggctccactatggcgtgactgcgtgagcatagctccactatagagttaaagtactatttagaagtataagataacttataaatatcattatagagaagatgattttgagaatacggtaagagaagtctgttaaaaagagtgttataataggggaaaaaaactcccctcgctccttcaccggcgcttcctcccgagctgcctccgctccgccgccagctgtcccctccccagcgcgtcatccgtctgcacgccaccgcctatccactcgcctgcacatcgccgccctagcagagacgtctgcacatcggcgcctggaggacgagaagcgaggaagaagacccacactctcctggaaaacgcatcacaagacttcagcctccctttccggccggagatccgactcgcgtctccgcgacagatccgggcaaacggcggctgatgcagttcttcggcggttcgtcgctgacgtcgatcgcgccggaggcgaccccagccccggcggcgccccccggcacgggcacgggcgccagcgcgcaggtcctctacgtcttcaaccgtaacggcgtctgcctgctctaccgcgagtggcatcgcccgctccgcacgctcgatcccacccaggaccacaagctcatgttcggactcctcttctcccttcgctccttcaccgccaagatcgacccaaccacggctgaaaagggaaatcttggagtgccactgctgccaggccaaggttgctcgttttatagcttcaagacaaacacatacaaactgaacttcatggagagcccttctggtataaagcttatattaattacacatccaaggactggtgatcagcgagactcgctaaagcatatatacaatctatatgtggaatatgttgtaaaaaatcctctgtatgctcctggaacaccaatcaactagcttttgaaaggtgcaggcttttgacttctgggagcttaaacctttttggacctcctaaaagctagcagtccaaaagtggctagaagctgaaacatgtcggcggtgtattctattttttagtactctgtcagagagccatgaagagtgaaacataagtatttgctatgttaagagtcttggttacctgttaggtaacaaatcagttttctttgctcgattccttgaatttataatgcggtcttcatctctactatataaaacaccagtttttcaggttttcacgtatacatggccgctcaacgtaaccttcccattttataaaaaataaaataaaattatgcacaagtggtcatttgaacctttg

SEQ ID NO: 4835 - DNA, 2887 bp, Zea Mays
gaggcagaggccgcgtcggactcgttcacgcattcgcggttcgcctctttctctcctataaaaatccaccgccccccgccgcctccgcagaattccccaatcccaccgccaggctccgcacgcgcctcggaacctagcccagtcgactccttcagatccggcgggatcgccggctcctaccctcgtcgccacgttccggcatctcggctccccggcgtcctctacccgacttctacacctgccatcttccccaggcggcgtcccgacgaatcgcttggtcgacaggctacatcaccaccaagtcagcatcgacgactcgaaggattcgtgtcgtcgtcgatcgccgatagccggtcgccggtcgccggtcgcctcttcgtagatcgaattggttctgtgattattctggttgcagttcgctgtatttcatctgagatctgaaaaaagttcgggcctatctcgtgatagagaggcctttatatatacgtgaaaaaggagacatactcgccatccgtcatgggtgttgtgtattaccaatataagagtgaaaaggaaatctgttctatgcctgtgctccatgcttttatctctgtgtctgaactcaagcagcttatactgacaagtggtaagcacggccatgggcgaacccacggccgtgccagggaggatattatcatcttcaatgcccacagcggcgaaggagttcagccaagctgtatactggatgaaggatgatccacatgtatctggacatcctaatacaccttgccatactgatcggaaacttatatttataaattgtgaaaatatgcagatgaaagagcatccatacctcagaacacaactgtgctggcggaaagtcacagaagaattttctgtgccttgcaagtcagtggttactgactcaagctcaaagtcatgttcttccacggtagtgcaagatgaagatgctgcaattgctgcagtgattgatgccgctgaactcaaatcggaacaactcccgtctaaaaaaggacaaggcagtggaaggtttacgtcaggacgtaactatgggtcattggaaggggaggcacctccaccaggctatgtctgtcgctcttgcggtgttccaggccatttcattcaacactgctcacaggaaaacaagatacctccacctggatacatttgctacagatgccgaattccagggcattttatccatcgttgcccaagcattggtgatcccaagtgcgacaacaataaaatgctttgttctcttgtcccagtagttacacctgtcaatggcattttggattcacttgtcccggcttcccccgttagtgctgttgatgacttgccagcagagctccactgcaggctatgtaaaaaagtgatgagagatgcagtattgacaagcaaatgctgttttgatagtttttgtgatagatgcattcgggattatattattacagagtcgaagtgcatttgtggagtcaagacactagcagatgacctcattcccaatcaaacacttcggagcacaatcagcaatatgttgggaacacagactatcagtggtggaagtggtacaacaagacacagaagttcgtcaggcagcaaccctgaccccaaaatacagagccacactgcctcgacaagggaggtgaagcaatctagagaccaccagctaccagcagcatctgcacttgatgatgtgctccaggttgccacagaaggtgctctagtgaaccagcctcgggagaaattggtacccagtgctaaaatccttggtaaagatggaggcaattttgcacaagtgtcagcagagaagactgtagcaaatgctgaagccctcaaagtaaaggatggaactgaatcgacttcaaaggccaccactgtttcaggggcccgagaacacaatgtcacaaggacagatcaaccgaagaagtggaagaaggcagtcttaaccaagaactttcaacctaacaatgttggatatggttacaatgttccatttgaccctgcatattgcaatcccttcatcaatggatatccttgggcaactgaaccttacatgtatagctcaatgggggtgccgtaccctggttatccgatggatccatattgtgtaaattcctttacctgcataccgtcgcaggctcttgcaatgcaaggctatgcaacaagctaccaaaggcctgaaactgagcccatgcatcgtgggggcactgcagctgcaccttcaaagcgccctgagaggagtgacaggcccaaggacactcgtcatcagccccaatcacgagagcacgagcgacaattgggctcttctcatgtctcagaatcgagaacgaggaacagaacaaggtcaagctccgagggaagggaccgtgggcattccgacagggcctctgttgaccaccatgaggaccactctactaggaagcggacgcgcgattcctctccgaagtacggtgatagacagagcgaccggaggtcgagtcacggttccaggagtatgatgactcctgaggaggatgcaagcgacgatgaatgtaatttcaagaggagatggggtcgcagatcatcaggaggcgtggacacaaggcactgaacggaagaatgtggactacggcggaccgaccaagtgcagcaatacattgctggtcaccagtgctcacctatccattttcttttactcgtaattgtatgtattcccctgcaaacaaaggggaacttccggttccctggcgaaatgtaatggtattaccatgcgatctctccaaatataaatggaagtttgctaagctcacgagttcttttttacttcttttaccctaacgccccgttttggaatcgaattccactctaataatatataatagtaatttatgaagctaatatggtt

SEQ ID NO: 4836 - DNA, 2825 bp, Zea Mays
cgtcggactcgttcacgcattcgcggttcgcctctttctctcctataaaaatccaccgccccccgccgcctccgcagaattccccaatcccaccgccaggctccgcacgcgcctcggaacctagcccagtcgactccttcagatccggcgggatcgccggctcctaccctcgtcgccacgttccggcatctcggctccccggcgtcctctacccgacttctacacctgccatcttccccaggcggcgtcccgacgaatcgcttggtcgacaggctacatcaccaccaagtcagcatcgacgactcgaaggattcgtgtcgtcgtcgatcgccgatagccggtcgccggtcgccggtcgcctcttcgtagatcgaattggttctgtgattattctggttgcagttcgctgtatttcatctgagatctgaaaaaagttcgggcctatctcgtgatagagaggcctttatatatacgtgaaaaaggagacatactcgccatccgtcatgggtgttgtgtattaccaatataagagtgaaaaggaaatctgttctatgcctgtgctccatgcttttatctctgtgtctgaactcaagcagcttatactgacaagtggtaagcacggccatgggcgaacccacggccgtgccagggaggatattatcatcttcaatgcccacagcggcgaagaatatgcagatgaaagagcatccatacctcagaacacaactgtgctggtccgcagaatttccattgccgggcaactgtcagagaagatcgttttgtcccccacgcggaaagtcacagaagaattttctgtgccttgcaagtcagtggttactgactcaagctcaaagtcatgttcttccacggtagtgcaagatgaagatgctgcaattgctgcagtgattgatgccgctgaactcaaatcggaacaactcccgtctaaaaaaggacaaggcagtggaaggtttacgtcaggacgtaactatgggtcattggaaggggaggcacctccaccaggctatgtctgtcgctcttgcggtgttccaggccatttcattcaacactgctcacaggaaaacaagatacctccacctggatacatttgctacagatgccgaattccagggcattttatccatcgttgcccaagcattggtgatcccaagtgcgacaacaataaaatgctttgttctcttgtcccagtagttacacctgtcaatggcattttggattcacttgtcccggcttcccccgttagtgctgttgatgacttgccagcagagctccactgcaggctatgtaaaaaagtgatgagagatgcagtattgacaagcaaatgctgttttgatagtttttgtgatagatgcattcgggattatattattacagagtcgaagtgcatttgtggagtcaagacactagcagatgacctcattcccaatcaaacacttcggagcacaatcagcaatatgttgggaacacagactatcagtggtggaagtggtacaacaagacacagaagttcgtcaggcagcaaccctgaccccaaaatacagagccacactgcctcgacaagggaggtgaagcaatctagagaccaccagctaccagcagcatctgcacttgatgatgtgctccaggttgccacagaaggtgctctagtgaaccagcctcgggagaaattggtacccagtgctaaaatccttggtaaagatggaggcaattttgcacaagtgtcagcagagaagactgtagcaaatgctgaagccctcaaagtaaaggatggaactgaatcgacttcaaaggccaccactgtttcaggggcccgagaacacaatgtcacaaggacagatcaaccgaagaagtggaagaaggcagtcttaaccaagaactttcaacctaacaatgttggatatggttacaatgttccatttgaccctgcatattgcaatcccttcatcaatggatatccttgggcaactgaaccttacatgtatagctcaatgggggtgccgtaccctggttatccgatggatccatattgtgtaaattcctttacctgcataccgtcgcaggctcttgcaatgcaaggctatgcaacaagctaccaaaggcctgaaactgagcccatgcatcgtgggggcactgcagctgcaccttcaaagcgccctgagaggagtgacaggcccaaggacactcgtcatcagccccaatcacgagagcacgagcgacaattgggctcttctcatgtctcagaatcgagaacgaggaacagaacaaggtcaagctccgagggaagggaccgtgggcattccgacagggcctctgttgaccaccatgaggaccactctactaggaagcggacgcgcgattcctctccgaagtacggtgatagacagagcgaccggaggtcgagtcacggttccaggagtatgatgactcctgaggaggatgcaagcgacgatgaatgtaatttcaagaggagatggggtcgcagatcatcaggaggcgtggacacaaggcactgaacggaagaatgtggactacggcggaccgaccaagtgcagcaatacattgctggtcaccagtgctcacctatccattttcttttactcgtaattgtatgtattcccctgcaaacaaaggggaacttccggttccctggcgaaatgtaatggtattaccatgcgatctctccaaatataaatggaagtttgctaagctcacgagttcttttttacttcttttaccctaacgccccgttttggaatcgaattccactctaataatatataatagtaatttatgaagctaatatggtt

SEQ ID NO: 4837 - DNA, 2704 bp, Zea Mays
gtcggactcgttcacgcattcgcggttcgcctctttctctcctataaaaatccaccgccccccgccgcctccgcagaattccccaatcccaccgccaggctccgcacgcgcctcggaacctagcccagtcgactccttcagatccggcgggatcgccggctcctaccctcgtcgccacgttccggcatctcggctccccggcgtcctctacccgacttctacacctgccatcttccccaggcggcgtcccgacgaatcgcttggtcgacaggctacatcaccaccaagtcagcatcgacgactcgaaggattcgtgtcgtcgtcgatcgccgatagccggtcgccggtcgccggtcgcctcttcgtagatcgaattggttctgtgattattctggttgcagttcgctgtatttcatctgagatctgaaaaaagttcgggcctatctcgtgatagagaggcctttatatatacgtgaaaaaggagacatactcgccatccgtcatgggtgttgtgtattaccaatataagagtgaaaaggaaatctgttctatgcctgtgctccatgcttttatctctgtgtctgaactcaagcagcttatactgacaagtggtaagcacggccatgggcgaacccacggccgtgccagggaggatattatcatcttcaatgcccacagcggcgaagaatatgcagatgaaagagcatccatacctcagaacacaactgtgctggtccgcagaatttccattgccgggcaactgtcagagaagatcgttttgtcccccacgcggaaagtcacagaagaattttctgtgccttgcaagtcagtggttactgactcaagctcaaagtcatgttcttccacggtagtgcaagatgaagatgctgcaattgctgcagtgattgatgccgctgaactcaaatcggaacaactcccgtctaaaaaaggacaaggcagtggaaggtttacgtcaggacgtaactatgggtcattggaaggggaggcacctccaccaggctatgtctgtcgctcttgcggtgttccaggccatttcattcaacactgctcacaggaaaacaagatacctccacctggatacatttgctacagatgccgaattccagggcattttatccatcgttgcccaagcattggtgatcccaagtgcgacaacaataaaatgctttgttctcttgtcccagtagttacacctgtcaatggcattttggattcacttgtcccggcttcccccgttagtgctgttgatgacttgccagcagagctccactgcaggctatgtaaaaaagtgatgagagatgcagtattgacaagcaaatgctgttttgatagtttttgtgatagatgcattcgggattatattattacagagtcgaagtgcatttgtggagtcaagacactagcagatgacctcattcccaatcaaacacttcggagcacaatcagcaatatgttgggaacacagactatcagtggtggaagtggtacaacaagacacagaagttcgtcaggcagcaaccctgaccccaaaatacagagccacactgcctcgacaagggaggtgaagcaatctagagaccaccagctaccagcagcatctgcacttgatgatgtgctccaggttgccacagaaggtgctctagtgaaccagcctcgggagaaattggtacccagtgctaaaatccttggtaaagatggaggcaattttgcacaagtgtcagcagagaagactgtagcaaatgctgaagccctcaaagtaaaggatggaactgaatcgacttcaaaggccaccactgtttcaggggcccgagaacacaatgtcacaaggacagatcaaccgaagaagtggaagaaggcagtcttaaccaagaactttcaacctaacaatgttggatatggttacaatgttccatttgaccctgcatattgcaatcccttcatcaatggatatccttgggcaactgaaccttacatgcctgaaactgagcccatgcatcgtgggggcactgcagctgcaccttcaaagcgccctgagaggagtgacaggcccaaggacactcgtcatcagccccaatcacgagagcacgagcgacaattgggctcttctcatgtctcagaatcgagaacgaggaacagaacaaggtcaagctccgagggaagggaccgtgggcattccgacagggcctctgttgaccaccatgaggaccactctactaggaagcggacgcgcgattcctctccgaagtacggtgatagacagagcgaccggaggtcgagtcacggttccaggagtatgatgactcctgaggaggatgcaagcgacgatgaatgtaatttcaagaggagatggggtcgcagatcatcaggaggcgtggacacaaggcactgaacggaagaatgtggactacggcggaccgaccaagtgcagcaatacattgctggtcaccagtgctcacctatccattttcttttactcgtaattgtatgtattcccctgcaaacaaaggggaacttccggttccctggcgaaatgtaatggtattaccatgcgatctctccaaatataaatggaagtttgctaagctcacgagttcttttttacttcttttaccctaacgccccgttttggaatcgaattccactctaataatatataatagtaatttatgaagctaatatggtt

SEQ ID NO: 4838 - DNA, 2905 bp, Zea Mays
gttcgcctctttctctcctataaaaatccaccgccccccgccgcctccgcagaattccccaatcccaccgccaggctccgcacgcgcctcggaacctagcccagtcgactccttcagatccggcgggatcgccggctcctaccctcgtcgccacgttccggcatctcggctccccggcgtcctctacccgacttctacacctgccatcttccccaggcggcgtcccgacgaatcgcttggtcgacaggctacatcaccaccaagtcagcatcgacgactcgaaggattcgtgtcgtcgtcgatcgccgatagccggtcgccggtcgccggtcgcctcttcgtagatcgaattggttctgtgattattctggttgcagttcgctgtatttcatctgagatctgaaaaaagttcgggcctatctcgtgatagagaggcctttatatatacgtgaaaaaggagacatactcgccatccgtcatgggtgttgtgtattaccaatataagagtgaaaaggaaatctgttctatgcctgtgctccatgcttttatctctgtgtctgaactcaagcagcttatactgacaagtggtaagcacggccatgggcgaacccacggccgtgccagggaggatattatcatcttcaatgcccacagcggcgaaggagttcagccaagctgtatactggatgaaggatgatccacatgtatctggacatcctaatacaccttgccatactgatcggaaacttatatttataaattgtgaaaatatgcagatgaaagagcatccatacctcagaacacaactgtgctggtccgcagaatttccattgccgggcaactgtcagagaagatcgttttgtcccccacgcggaaagtcacagaagaattttctgtgccttgcaagtcagtggttactgactcaagctcaaagtcatgttcttccacggtagtgcaagatgaagatgctgcaattgctgcagtgattgatgccgctgaactcaaatcggaacaactcccgtctaaaaaaggacaaggcagtggaaggtttacgtcaggacgtaactatgggtcattggaaggggaggcacctccaccaggctatgtctgtcgctcttgcggtgttccaggccatttcattcaacactgctcacaggaaaacaagatacctccacctggatacatttgctacagatgccgaattccagggcattttatccatcgttgcccaagcattggtgatcccaagtgcgacaacaataaaatgctttgttctcttgtcccagtagttacacctgtcaatggcattttggattcacttgtcccggcttcccccgttagtgctgttgatgacttgccagcagagctccactgcaggctatgtaaaaaagtgatgagagatgcagtattgacaagcaaatgctgttttgatagtttttgtgatagatgcattcgggattatattattacagagtcgaagtgcatttgtggagtcaagacactagcagatgacctcattcccaatcaaacacttcggagcacaatcagcaatatgttgggaacacagactatcagtggtggaagtggtacaacaagacacagaagttcgtcaggcagcaaccctgaccccaaaatacagagccacactgcctcgacaagggaggtgaagcaatctagagaccaccagctaccagcagcatctgcacttgatgatgtgctccaggttgccacagaaggtgctctagtgaaccagcctcgggagaaattggtacccagtgctaaaatccttggtaaagatggaggcaattttgcacaagtgtcagcagagaagactgtagcaaatgctgaagccctcaaagtaaaggatggaactgaatcgacttcaaaggccaccactgtttcaggggcccgagaacacaatgtcacaaggacagatcaaccgaagaagtggaagaaggcagtcttaaccaagaactttcaacctaacaatgttggatatggttacaatgttccatttgaccctgcatattgcaatcccttcatcaatggatatccttgggcaactgaaccttacatgtatagctcaatgggggtgccgtaccctggttatccgatggatccatattgtgtaaattcctttacctgcataccgtcgcaggctcttgcaatgcaaggctatgcaacaagctaccaaaggcctgaaactgagcccatgcatcgtgggggcactgcagctgcaccttcaaagcgccctgagaggagtgacaggcccaaggacactcgtcatcagccccaatcacgagagcacgagcgacaattgggctcttctcatgtctcagaatcgagaacgaggaacagaacaaggtcaagctccgagggaagggaccgtgggcattccgacagggcctctgttgaccaccatgaggaccactctactaggaagcggacgcgcgattcctctccgaagtacggtgatagacagagcgaccggaggtcgagtcacggttccaggagtatgatgactcctgaggaggatgcaagcgacgatgaatgtaatttcaagaggagatggggtcgcagatcatcaggaggcgtggacacaaggcactgaacggaagaatgtggactacggcggaccgaccaagtgcagcaatacattgctggtcaccagtgctcacctatccattttcttttactcgtaattgtatgtattcccctgcaaacaaaggggaacttccggttccctggcgaaatgtaatggtattaccatgcgatctctccaaatataaatggaagtttgctaagctcacgagttcttttttacttcttttaccctaacgccccgttttggaatcgaattccactctaataatatataatagtaatttatgaagctaatatggtt

SEQ ID NO: 4839 - DNA, 4117 bp, Zea Mays
gttcgcctctttctctcctataaaaatccaccgccccccgccgcctccgcagaattccccaatcccaccgccaggctccgcacgcgcctcggaacctagcccagtcgactccttcagatccggcgggatcgccggctcctaccctcgtcgccacgttccggcatctcggctccccggcgtcctctacccgacttctacacctgccatcttccccaggcggcgtcccgacgaatcgcttggtcgacaggctacatcaccaccaagtcagcatcgacgactcgaaggattcgtgtcgtcgtcgatcgccgatagccggtcgccggtcgccggtcgcctcttcgtagatcgaattggttctgtgattattctggttgcagttcgctgtatttcatctgagatctgaaaaaagttcgggcctatctcgtgatagagaggcctttatatatacgtgaaaaaggagacatactcgccatccgtcatgggtgttgtgtattaccaatataagagtgaaaaggaaatctgttctatgcctgtgctccatgcttttatctctgtgtctgaactcaagcagcttatactgacaagtggtaagcacggccatgggcgaacccacggccgtgccagggaggatattatcatcttcaatgcccacagcggcgaaggttcgtttaacgccaaatagcttaactgtacgaatactttagttctgtataaacagccgaccatgtgattttgtaaaacttcatcatagttgtctttactgcatcacaacagattttgcagcatgataacattatgcgcatttacctttgatcatcacaattttggggaaaatatcatttaagctttgtttttgagatgtcacctgtaccacatagcagagtctagataacattaatctgattggggatcaggacacctgaactttgtttgtgctcagttgtccatgcgaattgcttaattgtagggtagacctagtgaagggggcttccacatgaggccttgttcggtttgagggcttgttcgtttcacccttaacccatgtggattggatggtattgagttggtttaaattcatagtaagtcaaaatccattccaatccatgccaatacacttcaatccacatggagttgaaataaacgaacaaggcctaagggggattagatcccctcttgttcaaatttgaactggaggggatttaatccattccaattccaatccccctcaatccacccctaaacaaacaagccctgcccccccccccccccccaacccaagagagagagaagaggcttaaactgagacaaggcagagtctgtttgaaatccgtgacctcgttactgacagtgagatagctacgaacaagaagtgacttgcatagattttatcaattgtcctttgttttggtgccaatgatttttcatgcatcgtttcaatctggatttctcactcagtctggcttgacatatagttttattaattgtcatagttttggtgccaatgattttgcatgcgtcatttcaatctggattcattgcccagtttggctatttgtgttgatgcaagttggtgtaacaattgcagctcagatttcgtgatacttttgctttgtgcgtatttattctgtaggccacgaataggtattccgttaagtacaatggtcacagtttactcgtgtttccactgctgtcgagtcaaataagagaaatggaatatgtgtaaattgcatttctgtatggtctcctctctcctgtcatcttttatacccatggtatgtgtttctgcctcctgaaggagttcagccaagctgtatactggatgaaggatgatccacatgtatctggacatcctaatacaccttgccatactgatcggaaacttatatttataaattgtgaagtgtgtaaattctattgttcccagtatgttcatgaatccaggacatctcaatagcgctgtgagaaatcccaattgttaacctaaaggataaagtcaatctgtcatagtataaacaatctaaacttctcaactttgatgttcaattaattgcaccatttggtgtatatgagaagagttatcttatagcttgccagaatatgtttgttttagtggattattagttgatatctctgttttctatttttgtgttttcagaatatgcagatgaaagagcatccatacctcagaacacaactgtgctggcggaaagtcacagaagaattttctgtgccttgcaagtcagtggttactgactcaagctcaaagtcatgttcttccacggtagtgcaagatgaagatgctgcaattgctgcagtgattgatgccgctgaactcaaatcggaacaactcccgtctaaaaaaggacaaggcagtggaaggtttacgtcaggacgtaactatgggtcattggaaggggaggcacctccaccaggctatgtctgtcgctcttgcggtgttccaggccatttcattcaacactgctcacaggaaaacaagatacctccacctggatacatttgctacagatgccgaattccagggcattttatccatcgttgcccaagcattggtgatcccaagtgcgacaacaataaaatgctttgttctcttgtcccagtagttacacctgtcaatggcattttggattcacttgtcccggcttcccccgttagtgctgttgatgacttgccagcagagctccactgcaggctatgtaaaaaagtgatgagagatgcagtattgacaagcaaatgctgttttgatagtttttgtgatagatgcattcgggattatattattacagagtcgaagtgcatttgtggagtcaagacactagcagatgacctcattcccaatcaaacacttcggagcacaatcagcaatatgttgggaacacagactatcagtggtggaagtggtacaacaagacacagaagttcgtcaggcagcaaccctgaccccaaaatacagagccacactgcctcgacaagggaggtgaagcaatctagagaccaccagctaccagcagcatctgcacttgatgatgtgctccaggttgccacagaaggtgctctagtgaaccagcctcgggagaaattggtacccagtgctaaaatccttggtaaagatggaggcaattttgcacaagtgtcagcagagaagactgtagcaaatgctgaagccctcaaagtaaaggatggaactgaatcgacttcaaaggccaccactgtttcaggggcccgagaacacaatgtcacaaggacagatcaaccgaagaagtggaagaaggcagtcttaaccaagaactttcaacctaacaatgttggatatggttacaatgttccatttgaccctgcatattgcaatcccttcatcaatggatatccttgggcaactgaaccttacatgcctgaaactgagcccatgcatcgtgggggcactgcagctgcaccttcaaagcgccctgagaggagtgacaggcccaaggacactcgtcatcagccccaatcacgagagcacgagcgacaattgggctcttctcatgtctcagaatcgagaacgaggaacagaacaaggtcaagctccgagggaagggaccgtgggcattccgacagggcctctgttgaccaccatgaggaccactctactaggaagcggacgcgcgattcctctccgaagtacggtgatagacagagcgaccggaggtcgagtcacggttccaggagtatgatgactcctgaggaggatgcaagcgacgatgaatgtaatttcaagaggagatggggtcgcagatcatcaggaggcgtggacacaaggcactgaacggaagaatgtggactacggcggaccgaccaagtgcagcaatacattgctggtcaccagtgctcacctatccattttcttttactcgtaattgtatgtattcccctgcaaacaaaggggaacttccggttccctggcgaaatgtaatggtattaccatgcgatctctccaaatataaatggaagtttgctaagctcacgagttcttttttacttcttttaccctaacgccccgttttggaatcgaattccactctaataatatataatagtaatttatgaagctaatatggtt

SEQ ID NO: 4840 - DNA, 2586 bp, Zea Mays
cgccgcctccgcagaattccccaatcccaccgccaggctccgcacgcgcctcggaacctagcccagtcgactccttcagatccggcgggatcgccggctcctaccctcgtcgccacgttccggcatctcggctccccggcgtcctctacccgacttctacacctgccatcttccccaggcggcgtcccgacgaatcgcttggtcgacaggctacatcaccaccaagtcagcatcgacgactcgaaggattcgtgtcgtcgtcgatcgccgatagccggtcgccggtcgccggtcgcctcttcgtagatcgaattggttctgtgattattctggttgcagttcgctgtatttcatctgagatctgaaaaaagttcgggcctatctcgtgatagagaggcctttatatatacgtgaaaaaggagacatactcgccatccgtcatgggtgttgtgtattaccaatataagagtgaaaaggaaatctgttctatgcctgtgctccatgcttttatctctgtgtctgaactcaagcagcttatactgacaagtggtaagcacggccatgggcgaacccacggccgtgccagggaggatattatcatcttcaatgcccacagcggcgaagaatatgcagatgaaagagcatccatacctcagaacacaactgtgctggcggaaagtcacagaagaattttctgtgccttgcaagtcagtggttactgactcaagctcaaagtcatgttcttccacggtagtgcaagatgaagatgctgcaattgctgcagtgattgatgccgctgaactcaaatcggaacaactcccgtctaaaaaaggacaaggcagtggaaggtttacgtcaggacgtaactatgggtcattggaaggggaggcacctccaccaggctatgtctgtcgctcttgcggtgttccaggccatttcattcaacactgctcacaggaaaacaagatacctccacctggatacatttgctacagatgccgaattccagggcattttatccatcgttgcccaagcattggtgatcccaagtgcgacaacaataaaatgctttgttctcttgtcccagtagttacacctgtcaatggcattttggattcacttgtcccggcttcccccgttagtgctgttgatgacttgccagcagagctccactgcaggctatgtaaaaaagtgatgagagatgcagtattgacaagcaaatgctgttttgatagtttttgtgatagatgcattcgggattatattattacagagtcgaagtgcatttgtggagtcaagacactagcagatgacctcattcccaatcaaacacttcggagcacaatcagcaatatgttgggaacacagactatcagtggtggaagtggtacaacaagacacagaagttcgtcaggcagcaaccctgaccccaaaatacagagccacactgcctcgacaagggaggtgaagcaatctagagaccaccagctaccagcagcatctgcacttgatgatgtgctccaggttgccacagaaggtgctctagtgaaccagcctcgggagaaattggtacccagtgctaaaatccttggtaaagatggaggcaattttgcacaagtgtcagcagagaagactgtagcaaatgctgaagccctcaaagtaaaggatggaactgaatcgacttcaaaggccaccactgtttcaggggcccgagaacacaatgtcacaaggacagatcaaccgaagaagtggaagaaggcagtcttaaccaagaactttcaacctaacaatgttggatatggttacaatgttccatttgaccctgcatattgcaatcccttcatcaatggatatccttgggcaactgaaccttacatgcctgaaactgagcccatgcatcgtgggggcactgcagctgcaccttcaaagcgccctgagaggagtgacaggcccaaggacactcgtcatcagccccaatcacgagagcacgagcgacaattgggctcttctcatgtctcagaatcgagaacgaggaacagaacaaggtcaagctccgagggaagggaccgtgggcattccgacagggcctctgttgaccaccatgaggaccactctactaggaagcggacgcgcgattcctctccgaagtacggtgatagacagagcgaccggaggtcgagtcacggttccaggagtatgatgactcctgaggaggatgcaagcgacgatgaatgtaatttcaagaggagatggggtcgcagatcatcaggaggcgtggacacaaggcactgaacggaagaatgtggactacggcggaccgaccaagtgcagcaatacattgctggtcaccagtgctcacctatccattttcttttactcgtaattgtatgtattcccctgcaaacaaaggggaacttccggttccctggcgaaatgtaatggtattaccatgcgatctctccaaatataaatggaagtttgctaagctcacgagttcttttttacttcttttaccctaacgccccgttttggaatcgaattccactctaataatatataatagtaatttatgaagctaatatggtt

SEQ ID NO: 4841 - DNA, 2706 bp, Zea Mays
cgccgcctccgcagaattccccaatcccaccgccaggctccgcacgcgcctcggaacctagcccagtcgactccttcagatccggcgggatcgccggctcctaccctcgtcgccacgttccggcatctcggctccccggcgtcctctacccgacttctacacctgccatcttccccaggcggcgtcccgacgaatcgcttggtcgacaggctacatcaccaccaagtcagcatcgacgactcgaaggattcgtgtcgtcgtcgatcgccgatagccggtcgccggtcgccggtcgcctcttcgtagatcgaattggttctgtgattattctggttgcagttcgctgtatttcatctgagatctgaaaaaagttcgggcctatctcgtgatagagaggcctttatatatacgtgaaaaaggagacatactcgccatccgtcatgggtgttgtgtattaccaatataagagtgaaaaggaaatctgttctatgcctgtgctccatgcttttatctctgtgtctgaactcaagcagcttatactgacaagtggtaagcacggccatgggcgaacccacggccgtgccagggaggatattatcatcttcaatgcccacagcggcgaagaatatgcagatgaaagagcatccatacctcagaacacaactgtgctggcggaaagtcacagaagaattttctgtgccttgcaagtcagtggttactgactcaagctcaaagtcatgttcttccacggtagtgcaagatgaagatgctgcaattgctgcagtgattgatgccgctgaactcaaatcggaacaactcccgtctaaaaaaggacaaggcagtggaaggtttacgtcaggacgtaactatgggtcattggaaggggaggcacctccaccaggctatgtctgtcgctcttgcggtgttccaggccatttcattcaacactgctcacaggaaaacaagatacctccacctggatacatttgctacagatgccgaattccagggcattttatccatcgttgcccaagcattggtgatcccaagtgcgacaacaataaaatgctttgttctcttgtcccagtagttacacctgtcaatggcattttggattcacttgtcccggcttcccccgttagtgctgttgatgacttgccagcagagctccactgcaggctatgtaaaaaagtgatgagagatgcagtattgacaagcaaatgctgttttgatagtttttgtgatagatgcattcgggattatattattacagagtcgaagtgcatttgtggagtcaagacactagcagatgacctcattcccaatcaaacacttcggagcacaatcagcaatatgttgggaacacagactatcagtggtggaagtggtacaacaagacacagaagttcgtcaggcagcaaccctgaccccaaaatacagagccacactgcctcgacaagggaggtgaagcaatctagagaccaccagctaccagcagcatctgcacttgatgatgtgctccaggttgccacagaaggtgctctagtgaaccagcctcgggagaaattggtacccagtgctaaaatccttggtaaagatggaggcaattttgcacaagtgtcagcagagaagactgtagcaaatgctgaagccctcaaagtaaaggatggaactgaatcgacttcaaaggccaccactgtttcaggggcccgagaacacaatgtcacaaggacagatcaaccgaagaagtggaagaaggcagtcttaaccaagaactttcaacctaacaatgttggatatggttacaatgttccatttgaccctgcatattgcaatcccttcatcaatggatatccttgggcaactgaaccttacatgtatagctcaatgggggtgccgtaccctggttatccgatggatccatattgtgtaaattcctttacctgcataccgtcgcaggctcttgcaatgcaaggctatgcaacaagctaccaaaggcctgaaactgagcccatgcatcgtgggggcactgcagctgcaccttcaaagcgccctgagaggagtgacaggcccaaggacactcgtcatcagccccaatcacgagagcacgagcgacaattgggctcttctcatgtctcagaatcgagaacgaggaacagaacaaggtcaagctccgagggaagggaccgtgggcattccgacagggcctctgttgaccaccatgaggaccactctactaggaagcggacgcgcgattcctctccgaagtacggtgatagacagagcgaccggaggtcgagtcacggttccaggagtatgatgactcctgaggaggatgcaagcgacgatgaatgtaatttcaagaggagatggggtcgcagatcatcaggaggcgtggacacaaggcactgaacggaagaatgtggactacggcggaccgaccaagtgcagcaatacattgctggtcaccagtgctcacctatccattttcttttactcgtaattgtatgtattcccctgcaaacaaaggggaacttccggttccctggcgaaatgtaatggtattaccatgcgatctctccaaatataaatggaagtttgctaagctcacgagttcttttttacttcttttaccctaacgccccgttttggaatcgaattccactctaataatatataatagtaatttatgaagctaatatggtt

SEQ ID NO: 4842 - DNA, 2763 bp, Zea Mays
cgccgcctccgcagaattccccaatcccaccgccaggctccgcacgcgcctcggaacctagcccagtcgactccttcagatccggcgggatcgccggctcctaccctcgtcgccacgttccggcatctcggctccccggcgtcctctacccgacttctacacctgccatcttccccaggcggcgtcccgacgaatcgcttggtcgacaggctacatcaccaccaagtcagcatcgacgactcgaaggattcgtgtcgtcgtcgatcgccgatagccggtcgccggtcgccggtcgcctcttcgtagatcgaattggttctgtgattattctggttgcagttcgctgtatttcatctgagatctgaaaaaagttcgggcctatctcgtgatagagaggcctttatatatacgtgaaaaaggagacatactcgccatccgtcatgggtgttgtgtattaccaatataagagtgaaaaggaaatctgttctatgcctgtgctccatgcttttatctctgtgtctgaactcaagcagcttatactgacaagtggtaagcacggccatgggcgaacccacggccgtgccagggaggatattatcatcttcaatgcccacagcggcgaagaatatgcagatgaaagagcatccatacctcagaacacaactgtgctggtccgcagaatttccattgccgggcaactgtcagagaagatcgttttgtcccccacgcggaaagtcacagaagaattttctgtgccttgcaagtcagtggttactgactcaagctcaaagtcatgttcttccacggtagtgcaagatgaagatgctgcaattgctgcagtgattgatgccgctgaactcaaatcggaacaactcccgtctaaaaaaggacaaggcagtggaaggtttacgtcaggacgtaactatgggtcattggaaggggaggcacctccaccaggctatgtctgtcgctcttgcggtgttccaggccatttcattcaacactgctcacaggaaaacaagatacctccacctggatacatttgctacagatgccgaattccagggcattttatccatcgttgcccaagcattggtgatcccaagtgcgacaacaataaaatgctttgttctcttgtcccagtagttacacctgtcaatggcattttggattcacttgtcccggcttcccccgttagtgctgttgatgacttgccagcagagctccactgcaggctatgtaaaaaagtgatgagagatgcagtattgacaagcaaatgctgttttgatagtttttgtgatagatgcattcgggattatattattacagagtcgaagtgcatttgtggagtcaagacactagcagatgacctcattcccaatcaaacacttcggagcacaatcagcaatatgttgggaacacagactatcagtggtggaagtggtacaacaagacacagaagttcgtcaggcagcaaccctgaccccaaaatacagagccacactgcctcgacaagggaggtgaagcaatctagagaccaccagctaccagcagcatctgcacttgatgatgtgctccaggttgccacagaaggtgctctagtgaaccagcctcgggagaaattggtacccagtgctaaaatccttggtaaagatggaggcaattttgcacaagtgtcagcagagaagactgtagcaaatgctgaagccctcaaagtaaaggatggaactgaatcgacttcaaaggccaccactgtttcaggggcccgagaacacaatgtcacaaggacagatcaaccgaagaagtggaagaaggcagtcttaaccaagaactttcaacctaacaatgttggatatggttacaatgttccatttgaccctgcatattgcaatcccttcatcaatggatatccttgggcaactgaaccttacatgtatagctcaatgggggtgccgtaccctggttatccgatggatccatattgtgtaaattcctttacctgcataccgtcgcaggctcttgcaatgcaaggctatgcaacaagctaccaaagggcctgaaactgagcccatgcatcgtgggggcactgcagctgcaccttcaaagcgccctgagaggagtgacaggcccaaggacactcgtcatcagccccaatcacgagagcacgagcgacaattgggctcttctcatgtctcagaatcgagaacgaggaacagaacaaggtcaagctccgagggaagggaccgtgggcattccgacagggcctctgttgaccaccatgaggaccactctactaggaagcggacgcgcgattcctctccgaagtacggtgatagacagagcgaccggaggtcgagtcacggttccaggagtatgatgactcctgaggaggatgcaagcgacgatgaatgtaatttcaagaggagatggggtcgcagatcatcaggaggcgtggacacaaggcactgaacggaagaatgtggactacggcggaccgaccaagtgcagcaatacattgctggtcaccagtgctcacctatccattttcttttactcgtaattgtatgtattcccctgcaaacaaaggggaacttccggttccctggcgaaatgtaatggtattaccatgcgatctctccaaatataaatggaagtttgctaagctcacgagttcttttttacttcttttaccctaacgccccgttttggaatcgaattccactctaataatatataatagtaatttatgaagctaatatggtt

SEQ ID NO: 4843 - DNA, 3112 bp, Zea Mays
gcagaattccccaatcccaccgccaggctccgcacgcgcctcggaacctagcccagtcgactccttcagatccggcgggatcgccggctcctaccctcgtcgccacgttccggcatctcggctccccggcgtcctctacccgacttctacacctgccatcttccccaggcggcgtcccgacgaatcgcttggtcgacaggctacatcaccaccaagtcagcatcgacgactcgaaggattcgtgtcgtcgtcgatcgccgatagccggtcgccggtcgccggtcgcctcttcgtagatcgaattggttctgtgattattctggttgcagttcgctgtatttcatctgagatctgaaaaaagttcgggcctatctcgtgatagagaggcctttatatatacgtgaaaaaggagacatactcgccatccgtcatgggtgttgtgtattaccaatataagagtgaaaaggaaatctgttctatgcctgtgctccatgcttttatctctgtgtctgaactcaagcagcttatactgacaagtggtaagcacggccatgggcgaacccacggccgtgccagggaggatattatcatcttcaatgcccacagcggcgaaggagttcagccaagctgtatactggatgaaggatgatccacatgtatctggacatcctaatacaccttgccatactgatcggaaacttatatttataaattgtgaagtgtgtaaattctattgttcccagtatgttcatgaatccaggacatctcaatagcgctgtgagaaatcccaattgttaacctaaaggataaagtcaatctgtcatagtataaacaatctaaacttctcaactttgatgttcaattaattgcaccatttggtgtatatgagaagagttatcttatagcttgccagaatatgtttgttttagtggattattagttgatatctctgttttctatttttgtgttttcagaatatgcagatgaaagagcatccatacctcagaacacaactgtgctggtccgcagaatttccattgccgggcaactgtcagagaagatcgttttgtcccccacgcggaaagtcacagaagaattttctgtgccttgcaagtcagtggttactgactcaagctcaaagtcatgttcttccacggtagtgcaagatgaagatgctgcaattgctgcagtgattgatgccgctgaactcaaatcggaacaactcccgtctaaaaaaggacaaggcagtggaaggtttacgtcaggacgtaactatgggtcattggaaggggaggcacctccaccaggctatgtctgtcgctcttgcggtgttccaggccatttcattcaacactgctcacaggaaaacaagatacctccacctggatacatttgctacagatgccgaattccagggcattttatccatcgttgcccaagcattggtgatcccaagtgcgacaacaataaaatgctttgttctcttgtcccagtagttacacctgtcaatggcattttggattcacttgtcccggcttcccccgttagtgctgttgatgacttgccagcagagctccactgcaggctatgtaaaaaagtgatgagagatgcagtattgacaagcaaatgctgttttgatagtttttgtgatagatgcattcgggattatattattacagagtcgaagtgcatttgtggagtcaagacactagcagatgacctcattcccaatcaaacacttcggagcacaatcagcaatatgttgggaacacagactatcagtggtggaagtggtacaacaagacacagaagttcgtcaggcagcaaccctgaccccaaaatacagagccacactgcctcgacaagggaggtgaagcaatctagagaccaccagctaccagcagcatctgcacttgatgatgtgctccaggttgccacagaaggtgctctagtgaaccagcctcgggagaaattggtacccagtgctaaaatccttggtaaagatggaggcaattttgcacaagtgtcagcagagaagactgtagcaaatgctgaagccctcaaagtaaaggatggaactgaatcgacttcaaaggccaccactgtttcaggggcccgagaacacaatgtcacaaggacagatcaaccgaagaagtggaagaaggcagtcttaaccaagaactttcaacctaacaatgttggatatggttacaatgttccatttgaccctgcatattgcaatcccttcatcaatggatatccttgggcaactgaaccttacatgtatagctcaatgggggtgccgtaccctggttatccgatggatccatattgtgtaaattcctttacctgcataccgtcgcaggctcttgcaatgcaaggctatgcaacaagctaccaaaggcctgaaactgagcccatgcatcgtgggggcactgcagctgcaccttcaaagcgccctgagaggagtgacaggcccaaggacactcgtcatcagccccaatcacgagagcacgagcgacaattgggctcttctcatgtctcagaatcgagaacgaggaacagaacaaggtcaagctccgagggaagggaccgtgggcattccgacagggcctctgttgaccaccatgaggaccactctactaggaagcggacgcgcgattcctctccgaagtacggtgatagacagagcgaccggaggtcgagtcacggttccaggagtatgatgactcctgaggaggatgcaagcgacgatgaatgtaatttcaagaggagatggggtcgcagatcatcaggaggcgtggacacaaggcactgaacggaagaatgtggactacggcggaccgaccaagtgcagcaatacattgctggtcaccagtgctcacctatccattttcttttactcgtaattgtatgtattcccctgcaaacaaaggggaacttccggttccctggcgaaatgtaatggtattaccatgcgatctctccaaatataaatggaagtttgctaagctcacgagttcttttttacttcttttaccctaacgccccgttttggaatcgaattccactctaataatatataatagtaatttatgaagctaatatggtt

SEQ ID NO: 4844 - DNA, 2510 bp, Zea Mays
atagctacgaacaagaagtgacttgcatagattttatcaattgtcctttgttttggtgccaatgatttttcatgcatcgtttcaatctggatttctcactcagtctggcttgacatatagttttattaattgtcatagttttggtgccaatgattttgcatgcgtcatttcaatctggattcattgcccagtttggctatttgtgttgatgcaagttggtgtaacaattgcagctcagatttcgtgatacttttgctttgtgcgtatttattctgtaggccacgaataggtattccgttaagtacaatggtcacagtttactcgtgtttccactgctgtcgagtcaaataagagaaatggaatatgtgtaaattgcatttctgtatggtctcctctctcctgtcatcttttatacccatggtatgtgtttctgcctcctgaaggagttcagccaagctgtatactggatgaaggatgatccacatgtatctggacatcctaatacaccttgccatactgatcggaaacttatatttataaattgtgaaaatatgcagatgaaagagcatccatacctcagaacacaactgtgctggcggaaagtcacagaagaattttctgtgccttgcaagtcagtggttactgactcaagctcaaagtcatgttcttccacggtagtgcaagatgaagatgctgcaattgctgcagtgattgatgccgctgaactcaaatcggaacaactcccgtctaaaaaaggacaaggcagtggaaggtttacgtcaggacgtaactatgggtcattggaaggggaggcacctccaccaggctatgtctgtcgctcttgcggtgttccaggccatttcattcaacactgctcacaggaaaacaagatacctccacctggatacatttgctacagatgccgaattccagggcattttatccatcgttgcccaagcattggtgatcccaagtgcgacaacaataaaatgctttgttctcttgtcccagtagttacacctgtcaatggcattttggattcacttgtcccggcttcccccgttagtgctgttgatgacttgccagcagagctccactgcaggctatgtaaaaaagtgatgagagatgcagtattgacaagcaaatgctgttttgatagtttttgtgatagatgcattcgggattatattattacagagtcgaagtgcatttgtggagtcaagacactagcagatgacctcattcccaatcaaacacttcggagcacaatcagcaatatgttgggaacacagactatcagtggtggaagtggtacaacaagacacagaagttcgtcaggcagcaaccctgaccccaaaatacagagccacactgcctcgacaagggaggtgaagcaatctagagaccaccagctaccagcagcatctgcacttgatgatgtgctccaggttgccacagaaggtgctctagtgaaccagcctcgggagaaattggtacccagtgctaaaatccttggtaaagatggaggcaattttgcacaagtgtcagcagagaagactgtagcaaatgctgaagccctcaaagtaaaggatggaactgaatcgacttcaaaggccaccactgtttcaggggcccgagaacacaatgtcacaaggacagatcaaccgaagaagtggaagaaggcagtcttaaccaagaactttcaacctaacaatgttggatatggttacaatgttccatttgaccctgcatattgcaatcccttcatcaatggatatccttgggcaactgaaccttacatgcctgaaactgagcccatgcatcgtgggggcactgcagctgcaccttcaaagcgccctgagaggagtgacaggcccaaggacactcgtcatcagccccaatcacgagagcacgagcgacaattgggctcttctcatgtctcagaatcgagaacgaggaacagaacaaggtcaagctccgagggaagggaccgtgggcattccgacagggcctctgttgaccaccatgaggaccactctactaggaagcggacgcgcgattcctctccgaagtacggtgatagacagagcgaccggaggtcgagtcacggttccaggagtatgatgactcctgaggaggatgcaagcgacgatgaatgtaatttcaagaggagatggggtcgcagatcatcaggaggcgtggacacaaggcactgaacggaagaatgtggactacggcggaccgaccaagtgcagcaatacattgctggtcaccagtgctcacctatccattttcttttactcgtaattgtatgtattcccctgcaaacaaaggggaacttccggttccctggcgaaatgtaatggtattaccatgcgatctctccaaatataaatggaagtttgctaagctcacgagttcttttttacttcttttaccctaacgccccgttttggaatcgaattccactctaataatatataatagtaatttatgaagctaatatggtt

SEQ ID NO: 4845 - DNA, 2941 bp, Zea Mays
atagctacgaacaagaagtgacttgcatagattttatcaattgtcctttgttttggtgccaatgatttttcatgcatcgtttcaatctggatttctcactcagtctggcttgacatatagttttattaattgtcatagttttggtgccaatgattttgcatgcgtcatttcaatctggattcattgcccagtttggctatttgtgttgatgcaagttggtgtaacaattgcagctcagatttcgtgatacttttgctttgtgcgtatttattctgtaggccacgaataggtattccgttaagtacaatggtcacagtttactcgtgtttccactgctgtcgagtcaaataagagaaatggaatatgtgtaaattgcatttctgtatggtctcctctctcctgtcatcttttatacccatggtatgtgtttctgcctcctgaaggagttcagccaagctgtatactggatgaaggatgatccacatgtatctggacatcctaatacaccttgccatactgatcggaaacttatatttataaattgtgaagtgtgtaaattctattgttcccagtatgttcatgaatccaggacatctcaatagcgctgtgagaaatcccaattgttaacctaaaggataaagtcaatctgtcatagtataaacaatctaaacttctcaactttgatgttcaattaattgcaccatttggtgtatatgagaagagttatcttatagcttgccagaatatgtttgttttagtggattattagttgatatctctgttttctatttttgtgttttcagaatatgcagatgaaagagcatccatacctcagaacacaactgtgctggtccgcagaatttccattgccgggcaactgtcagagaagatcgttttgtcccccacgcggaaagtcacagaagaattttctgtgccttgcaagtcagtggttactgactcaagctcaaagtcatgttcttccacggtagtgcaagatgaagatgctgcaattgctgcagtgattgatgccgctgaactcaaatcggaacaactcccgtctaaaaaaggacaaggcagtggaaggtttacgtcaggacgtaactatgggtcattggaaggggaggcacctccaccaggctatgtctgtcgctcttgcggtgttccaggccatttcattcaacactgctcacaggaaaacaagatacctccacctggatacatttgctacagatgccgaattccagggcattttatccatcgttgcccaagcattggtgatcccaagtgcgacaacaataaaatgctttgttctcttgtcccagtagttacacctgtcaatggcattttggattcacttgtcccggcttcccccgttagtgctgttgatgacttgccagcagagctccactgcaggctatgtaaaaaagtgatgagagatgcagtattgacaagcaaatgctgttttgatagtttttgtgatagatgcattcgggattatattattacagagtcgaagtgcatttgtggagtcaagacactagcagatgacctcattcccaatcaaacacttcggagcacaatcagcaatatgttgggaacacagactatcagtggtggaagtggtacaacaagacacagaagttcgtcaggcagcaaccctgaccccaaaatacagagccacactgcctcgacaagggaggtgaagcaatctagagaccaccagctaccagcagcatctgcacttgatgatgtgctccaggttgccacagaaggtgctctagtgaaccagcctcgggagaaattggtacccagtgctaaaatccttggtaaagatggaggcaattttgcacaagtgtcagcagagaagactgtagcaaatgctgaagccctcaaagtaaaggatggaactgaatcgacttcaaaggccaccactgtttcaggggcccgagaacacaatgtcacaaggacagatcaaccgaagaagtggaagaaggcagtcttaaccaagaactttcaacctaacaatgttggatatggttacaatgttccatttgaccctgcatattgcaatcccttcatcaatggatatccttgggcaactgaaccttacatgtatagctcaatgggggtgccgtaccctggttatccgatggatccatattgtgtaaattcctttacctgcataccgtcgcaggctcttgcaatgcaaggctatgcaacaagctaccaaaggcctgaaactgagcccatgcatcgtgggggcactgcagctgcaccttcaaagcgccctgagaggagtgacaggcccaaggacactcgtcatcagccccaatcacgagagcacgagcgacaattgggctcttctcatgtctcagaatcgagaacgaggaacagaacaaggtcaagctccgagggaagggaccgtgggcattccgacagggcctctgttgaccaccatgaggaccactctactaggaagcggacgcgcgattcctctccgaagtacggtgatagacagagcgaccggaggtcgagtcacggttccaggagtatgatgactcctgaggaggatgcaagcgacgatgaatgtaatttcaagaggagatggggtcgcagatcatcaggaggcgtggacacaaggcactgaacggaagaatgtggactacggcggaccgaccaagtgcagcaatacattgctggtcaccagtgctcacctatccattttcttttactcgtaattgtatgtattcccctgcaaacaaaggggaacttccggttccctggcgaaatgtaatggtattaccatgcgatctctccaaatataaatggaagtttgctaagctcacgagttcttttttacttcttttaccctaacgccccgttttggaatcgaattccactctaataatatataatagtaatttatgaagctaatatggtt

SEQ ID NO: 4846 - DNA, 2630 bp, Zea Mays
atagctacgaacaagaagtgacttgcatagattttatcaattgtcctttgttttggtgccaatgatttttcatgcatcgtttcaatctggatttctcactcagtctggcttgacatatagttttattaattgtcatagttttggtgccaatgattttgcatgcgtcatttcaatctggattcattgcccagtttggctatttgtgttgatgcaagttggtgtaacaattgcagctcagatttcgtgatacttttgctttgtgcgtatttattctgtaggccacgaataggtattccgttaagtacaatggtcacagtttactcgtgtttccactgctgtcgagtcaaataagagaaatggaatatgtgtaaattgcatttctgtatggtctcctctctcctgtcatcttttatacccatggtatgtgtttctgcctcctgaaggagttcagccaagctgtatactggatgaaggatgatccacatgtatctggacatcctaatacaccttgccatactgatcggaaacttatatttataaattgtgaaaatatgcagatgaaagagcatccatacctcagaacacaactgtgctggcggaaagtcacagaagaattttctgtgccttgcaagtcagtggttactgactcaagctcaaagtcatgttcttccacggtagtgcaagatgaagatgctgcaattgctgcagtgattgatgccgctgaactcaaatcggaacaactcccgtctaaaaaaggacaaggcagtggaaggtttacgtcaggacgtaactatgggtcattggaaggggaggcacctccaccaggctatgtctgtcgctcttgcggtgttccaggccatttcattcaacactgctcacaggaaaacaagatacctccacctggatacatttgctacagatgccgaattccagggcattttatccatcgttgcccaagcattggtgatcccaagtgcgacaacaataaaatgctttgttctcttgtcccagtagttacacctgtcaatggcattttggattcacttgtcccggcttcccccgttagtgctgttgatgacttgccagcagagctccactgcaggctatgtaaaaaagtgatgagagatgcagtattgacaagcaaatgctgttttgatagtttttgtgatagatgcattcgggattatattattacagagtcgaagtgcatttgtggagtcaagacactagcagatgacctcattcccaatcaaacacttcggagcacaatcagcaatatgttgggaacacagactatcagtggtggaagtggtacaacaagacacagaagttcgtcaggcagcaaccctgaccccaaaatacagagccacactgcctcgacaagggaggtgaagcaatctagagaccaccagctaccagcagcatctgcacttgatgatgtgctccaggttgccacagaaggtgctctagtgaaccagcctcgggagaaattggtacccagtgctaaaatccttggtaaagatggaggcaattttgcacaagtgtcagcagagaagactgtagcaaatgctgaagccctcaaagtaaaggatggaactgaatcgacttcaaaggccaccactgtttcaggggcccgagaacacaatgtcacaaggacagatcaaccgaagaagtggaagaaggcagtcttaaccaagaactttcaacctaacaatgttggatatggttacaatgttccatttgaccctgcatattgcaatcccttcatcaatggatatccttgggcaactgaaccttacatgtatagctcaatgggggtgccgtaccctggttatccgatggatccatattgtgtaaattcctttacctgcataccgtcgcaggctcttgcaatgcaaggctatgcaacaagctaccaaaggcctgaaactgagcccatgcatcgtgggggcactgcagctgcaccttcaaagcgccctgagaggagtgacaggcccaaggacactcgtcatcagccccaatcacgagagcacgagcgacaattgggctcttctcatgtctcagaatcgagaacgaggaacagaacaaggtcaagctccgagggaagggaccgtgggcattccgacagggcctctgttgaccaccatgaggaccactctactaggaagcggacgcgcgattcctctccgaagtacggtgatagacagagcgaccggaggtcgagtcacggttccaggagtatgatgactcctgaggaggatgcaagcgacgatgaatgtaatttcaagaggagatggggtcgcagatcatcaggaggcgtggacacaaggcactgaacggaagaatgtggactacggcggaccgaccaagtgcagcaatacattgctggtcaccagtgctcacctatccattttcttttactcgtaattgtatgtattcccctgcaaacaaaggggaacttccggttccctggcgaaatgtaatggtattaccatgcgatctctccaaatataaatggaagtttgctaagctcacgagttcttttttacttcttttaccctaacgccccgttttggaatcgaattccactctaataatatataatagtaatttatgaagctaatatggtt

SEQ ID NO: 4847 - DNA, 1171 bp, Zea Mays
atttctagtccggggaggagcgaactgatcacacacgtgtgcagcacgctgtcgctggcctagcggccctagcaagagtcaaagacgggcatcggcagcaacagcaccacactctcaagtcccaactcccaacattacgagacgcctcgccggccgcgccgcgcccaactcctctgatcctcttccttgtccccaccctcttctccgatggcgacgctgcagctcaaccacatcgcgcgggagacctccgacgtggcccgactcgccgccttctacgaggccgtgctggggttcgagcgcatcccttcgcccacctactcgggcttccaggtcgcatggctccgcctcccgagctcccccgacgtcgcgctccacctcatcgagcgggaccccgccgcggcacccgtcgcggtggggcctggcgccgagggcgcgccgccgtcgcagctgccccggcgccaccacctcgccttctccgtcgctgactacgacgggttcgtgaccgggctgaaggcgcgcggcaccgatgtgttcgaaaagtcgcagccggatgggcgcacgcgccaggtcttcttcttcgaccctgacggcaatggcctagaggttactagcgctggtgcagggaatgagaagtgaacagagaccatgatttgcagtctacttctattttatcgtgcaatacctcagcaaaccctgcctacatgatgcgatcgaaaccggagacgttcctgggtcaagcttcgttccgtaaaataaataaatccgaagcacttcaaagctctacatactcgcccttgcttgtttgagacaagggcttgcgttcttgctgcatctcatccgagatgattgtaatccgaacaatgtgtagttaataaaaatgtcgctttgccctgaaaatgttttacgctgtaacatcgctctgtacgtgattggatttcctacatgacaactggctaatggagtctaaataatttccttgtcattcactcactcattcacgtttcactattagtttcagaactgaagcatcattaaccactgagaaagtggagacaatcagcagtatgctaccacacgtcgcgaaatgctcgatttggataccagaaatttggcagagaggcatatcacacagcatctattctcgagaaaagctctgtcactagtgctacta

SEQ ID NO: 4848 - DNA, 1057 bp, Zea Mays
catctcaatgtttcattcattaaacttcgcgagaacatgggaggagcagtagagcagcacaggacgtagatgtacggtagccggccggcgcccatggattcaagctcacagcccgccgcaattgatggatcgagagggagcggaggaggagagagaaacaaaagggaggaggaggacgacgacgaggcggcggcggaggccggcaacggcagacagctggtgatgcccgaggacgggtacgagtggaagaagtacggccagaagttcatcaagaacatccagaaaatgaggagctacttccggtgccggcacaggctgtgcggcgccaagaagaaggtggagtggcacccgcgcgaccccggcggcgacctccgcatcgtctacgacggcgcgcaccagcacgggcccccgccgctggcggctcctcccggcggccacggccagatgcagggcggcggcgcctccgactccaacagatacgagctgtgcacccagtacttcggcggggcccggtcgcgctgacgacctggcgggccagctagctagcgtcgggggtggcatggcagctgacaagaaaggccggccggcgggcggcggcgtggcgtcccgtcgcgtcacgctcacgcccgcatcacctcctgcccctgctggctgctggcctgctgcagcaccgatcgctttcgctgcgcaccggagggcagcggcagcggcagcggctggctggtgctgccggtggcggttgacttgacgccttgcgccggcgcaaccgacgtgatgttgagtgcggattaattggtgctgcaccggtcaacgctgtggtctactactagtgtactacactattacgacgacggtgcgtacaaaaaattaaagctagctttatcagtggaataagcctaatctgtttagtcagatttaacatccaaccatttgcagattgaaaagcaccagtgagtaccgaggcactccttccagaattatataattcagcttatagatataagcatctaatgacctgcttataaattatcataatctagatatctagattatatta

SEQ ID NO: 4849 - DNA, 643 bp, Zea Mays
ttaataatactaaaacgagtgtatagtctcgcattaatttattaaactagaattatccagctcccagtgcaataagcctatgataagcagaacattttacatatacatcaagcttttacagaacttgtgatctttatctgatcatttaacgatctgtgggttatcagaagcgataaccctcagttgtttcagatggaggatggatgtgcaccaccagtttacagccctgtatacttcacccaataaccgatcactctgaaagaatgaactatctgtggctccttgatgagcccagcatgtttgttgtttaggttcccttaggttaaacgctaaatcttcatgatggaatgtggttgctggaactccaagacagctatgttttctacatagttctttacttcagccaccattctgttgtacgattcagggtatttgcaaaggttcacaattttgattcagctccctggctagtgcctgcaacgtcaacatgatcctttacaaatgttcgaaggcatccattgattacccgaggggcaccaccatcacaaaatcgctttgccaaatctactgcctgaaagacaagacacatcaagagacatttattctactactagtactaaaattcgaagaaaatagatataag

SEQ ID NO: 4850 - DNA, 4056 bp, Zea Mays
agagctcgagtatccttgccacaggctcatcctgaccatgaaaatttcgagatcagacacaaaaaaaaagatggcaaaaatactaaatattaaaatatagacgaacacataatagctggacactagtttagagatcagacagcctataaactgaaatcaaagtaatatgttgtgtttataaagcatctgagctctggtagtagaaacacatatataaataaggcgattcagattaaggaaggtacattcttcagatttagtatcacttcctgcccaacagaaacagctaattaactatgctggaaattaagtatcacgataaggtaagacgtaattcgaaaataacaatgtgatgggtaccacaattaggggtacctagattatgtccctaaacataccaagacaccgagtactagggaatcacagggcaaaacgcgctccccgacctccaaggtcatgcaggaccaaatcacgattcgtccaaggcacaactacgcttgcctcgggtgaacgctacgcccgcatgggtccgcgactccccgggggcacccttggacggaaaacgcatatctgcctcgcacgagggcatcttgggcgaaggtccagccacgagcccggcctcaaccaaaattctcggaacctcaggacgtgcacatttaatgcccactgtacgaacacctgccccgccgaaggcgccgaagtaaacaaagaacgatgcgaccgcggtcaaacctactttcaccacccacaacgacgcacgagcgtgattaacgagcactattccccactccggttattgtttcaacaactccgagtgggacatacgacgtctggtcaaggtctcgacctcaggagaaaactctgcctcgcccgagctcagcctcggccaactgccctggcaggggcgcattaaatgccaccaactctccagcgaatcccacaggagaccattccgaccgttgttccaaccattccaggcatgactgcatacccgtgcgccgacccgacctcggtctcgggagaagtcttcatcttgctcgagcccggcctcggccaacagccccaacagagaaacgcacgacgtcgccgaccctcccacaaacaccgctgaagacgggatggctacacaaaccgcaaggtcgatgtcccatctgctttccgccatcccagatgacgaacgagctagattaccatgcacttttcaccatgctgagcgctatttcaaccactacgactcgatagtcgacacacttctaaacatctcatccgcacccctcataggacaggctcaggtacgagtccgagaccccgaccccgacctcagctctctacccggtcaaagcgaaggttacagagatcggacatccttctcctgatcaaaagcaacatccaggacaagggccatcccgccgaccatactgctacaagggctcagattcatctcccccaaacattacagcagcacgacgacccttgtactcctgggcttcccccttgcggctataaaaggagtccagggtccctaaggaaaaaaaggacacgacacttcactgtttgctcttcactcccgatattggcaatcgactcaatcactctcagagacttgggactcactccctctctcgaccagcttgtatcccctactatgagcacctaggtgcaggataatataagtcccatcctccactcgctagaagaagtatggccttatcttgctcgaaccatgataaaccttgtgtcttcttgcatcacccatctggaccagggcacgtagcacaaattcacttgttggttaggatcctcgggtcaaaacaccgacacaatggttgtgtaacaatgaaaactatggaagatctcaatatttcactgcatcacaatgaacaaatattgaagcaatgacaaaagataaggcaggaaataatccttgatggccatacaattctggcatgcaccagagtaattgttcactaattcagtgtagtgaaaaaagttgatgtacttactatacagaataaggatatgtttggaccaaactgataaacataataaccagcttgaatgcttgatgcatgtcgaagggatttgatgaatcaacacaaaagattaggaaaaggcatccaaccttccaagcttgggggattattttgtcgatgatctctacatgcttatcccatccactggcaacagccactaaaagttccctggacaacctgtagtgaataagagtagtgactaaatattaaacaggaaatgaaattttatcatataccagaacagtgtgtcgatacctgatgcctttagtggaatggggcgagaagaaaagtataccgtaagacaaagttgttgtaaaccagttttggaggagctgaaagtacatctgcttctgaatatgaaagaaaaacatgtcagattctttgcagaagaatgactaaacactaatggaaaacatttacaaaaaaagaaatatatacttagtcagctgatctcacaacagattagagaagaaaatgtatgcggttaatatgactatatgagccatttagcatgccacataaggatatgtttattgcgctcaacaacatagttacataggtgccactggactgctacaaaagatgcatgctaatgaaggtcgaacaattttcagcttgtcaattaaaattgaaaagtgtaatcaacacatagcttaataaaatacatcaaaattaactagtgcctagagtgatggattaatagctctcttagaactcagtctggaaacctaaaaaaatcagatactcaacccatttagaacttgaacctttttttaataaaagggccacttgacccggccttctttggaggccattgtaggaagcagggatcgagcctggccgacttgaacttttgaggcccaactcattatgtcgtaattcttaaaagtgacaactgacgacctagcctgactagttggcacctatgcattcgccactatccctaattaagggttaggtaacacgcagctgcttacctagatagcatattgcatctttttgaaccagtgcactgcattaattgttctagtttgatggtctgaaattcatagcaactgttagacaacaatattcattgccttgtatagcatagccggccggccttgtatagcaggctaggatagagagagatttgggaaggagtccaggatggtaaggatcaatgcggaatccaggcttgtataccaacttgaaattgttctagcatgccctcctgttttttttatatacaacaatatgcacacagccgcaataaaaaaaaatgtactaagttcaataatgtatttgtggaacatccaatgatccattgctctctttactttaggaaatcagaatcatagatataataatacgaaggaagtttcaaaacttgggctgaaactcaccatagaatttgtttaaacaggaatcaactaaattttctggtgattgtttcaaattgtccaaaggataacggataaaacactcctataatggcccaactgctcttgtgctctttggaaacttctggatatagagatattccatcttaaaatcgcaaacaacggagatatgtctaaattaattaccaactacaatttaatgactccagctgtagccgctttaacatatagtactgtactccctccagtgcagtaaaggtagtcgtttaggacatgattgtgcataccaaggagtgattaattatcatagagttttccctgtttgcccctattaaatagggatatgggtgcattaatgtcactaaaacaatcagacttgattggttgctgcagcagctccaaggcattctagaccggaggtctcaagttcgattcctcttaaatgcatttttttttgcaattagtaggggcaataacgtccaaatcctatacccacgcgcgctatgacttctttttgtgcacgctcggtcacgcgcaggatgacttcttttactgcaccggagggagtacaaccagaagttgcgcgggtatagttgttaccgttggctgaatccttctcgttctgactggtcagcttctca

SEQ ID NO: 4851 - DNA, 1192 bp, Zea Mays
aattaataaatatttttttccatggctatcgatcggctctctgcaagtgggccctctcccgcggggcgatgaacccgaagctggtgcggcttggaaatctgagaagcgctacaagaagttggagctgctcgcctgctgcccctttcctcccccgggccccctctccgctgcgacggcgagcccaagaaaactttcctctaggagcgcatggaggtgtccgctgggctccggccgccgcccgtcgctgcggcagcgtcgctccgaggccgtcggtttgcgtcggtgccgccgctcgcggcttcccattcggtgcggtccgtgtcccgcgcggttaagaataaagcaagtgcaatctatgacctccaaaggaatagaagtaaccttgaatcgctattctgctacgacaaatctgtcccagaggagaatattggaaaaccgtccggtctagatctggaaaagaaggatgtcggggacaaccctccctgctcaagctgtgaagctaaaggcgctgtgctgtgcgcaacatgcgctggttcaggcttgtacgtcgactcgatactggagagccaagggatcatcgtgaaagtcagatgcctaggctgtggaggaactgggaacatcatgtgctccaagtgtggaggccgtgggcatacctgaatgataaaaagcttggacattgcagtgtctccgcagcaagacagtacaatcctgctagcatccttcccgagttacgttggtgggtatttggtctcatggtgacatcgtcaatcaaaaagagttacgattcttccggagaattttccttgtgctgatctagctgctgtaactgcatcgaaacatgctttagaagctattgaaccccatcccccccccccccccttttgctttttattcccctcgttttcatgcctaaaagtttaaaggacgatgcgtcaaaggattcgatgttatgttgtaatcataaaggttaatgaaatgtgaaagatacacttcgtttatgggagagattagattcaaagtgtcctgtgcagtaactgagcagaagtgtggtcacatcacatcacaaatactagtacatactccaactccattcaagaaagaatgcaattctagcagtgttatgttttggtattttaaattttaactaattatagataaaaaaagaatcaatatttataatgtgaaataaata

SEQ ID NO: 4852 - DNA, 945 bp, Zea Mays
gcctcctttacattctcccctcctgttccgccccctcgcgcggtgtgaattgctagtctaggatgcgcgggggcgtggggaccaaatagaataaagcaagtgcaatctatgacctccaaaggaatagaagtaaccttgaatcgctattctgctacgacaaatctgtcccagaggagaatattggaaaaccgtccggtctagatctggaaaagaaggatgtcggggacaaccctccctgctcaagctgtgaagctaaaggcgctgtgctgtgcgcaacatgcgctggttcaggcttgtacgtcgactcgatactggagagccaagggatcatcgtgaaagtcagatgcctaggctgtggaggaactgggaacatcatgtgctccaagtgtggaggccgtgggcatacctgaatgataaaaagcttggacattgcagtgtctccgcagcaagacagtacaatcctgctagcatccttcccgagttacgttggtgggtatttggtctcatggtgacatcgtcaatcaaaaagagttacgattcttccggagaattttccttgtgctgatctagctgctgtaactgcatcgaaacatgctttagaagctattgaaccccatcccccccccccccccttttgctttttattcccctcgttttcatgcctaaaagtttaaaggacgatgcgtcaaaggattcgatgttatgttgtaatcataaaggttaatgaaatgtgaaagatacacttcgtttatgggagagattagattcaaagtgtcctgtgcagtaactgagcagaagtgtggtcacatcacatcacaaatactagtacatactccaactccattcaagaaagaatgcaattctagcagtgttatgttttggtattttaaattttaactaattatagataaaaaaagaatcaatatttataatgtgaaataaata

SEQ ID NO: 4853 - DNA, 925 bp, Zea Mays
gctgaatatattccactaatacttcaacagataaggctcccttgatgtctgaggtccatcttctattcaaataaagcaagtgcaatctatgacctccaaaggaatagaagtaaccttgaatcgctattctgctacgacaaatctgtcccagaggagaatattggaaaaccgtccggtctagatctggaaaagaaggatgtcggggacaaccctccctgctcaagctgtgaagctaaaggcgctgtgctgtgcgcaacatgcgctggttcaggcttgtacgtcgactcgatactggagagccaagggatcatcgtgaaagtcagatgcctaggctgtggaggaactgggaacatcatgtgctccaagtgtggaggccgtgggcatacctgaatgataaaaagcttggacattgcagtgtctccgcagcaagacagtacaatcctgctagcatccttcccgagttacgttggtgggtatttggtctcatggtgacatcgtcaatcaaaaagagttacgattcttccggagaattttccttgtgctgatctagctgctgtaactgcatcgaaacatgctttagaagctattgaaccccatcccccccccccccccttttgctttttattcccctcgttttcatgcctaaaagtttaaaggacgatgcgtcaaaggattcgatgttatgttgtaatcataaaggttaatgaaatgtgaaagatacacttcgtttatgggagagattagattcaaagtgtcctgtgcagtaactgagcagaagtgtggtcacatcacatcacaaatactagtacatactccaactccattcaagaaagaatgcaattctagcagtgttatgttttggtattttaaattttaactaattatagataaaaaaagaatcaatatttataatgtgaaataaata

SEQ ID NO: 4854 - DNA, 1464 bp, Zea Mays
aggatatccattgtgatcgaaatgtcagatgcagaagggggaagcaacaacaccacgtcgtccgcatacatggagatccgatggagcctggatggtcttgacagtggctgcaatagtcctgcatcttctgcttgtgaaaataagaagcccaggacatccatagcaaggataaaaagcatggcagaaagaggatctccctgcctaagccctctctgatgcttgataccgttctctgggaaagggaagggaaaccatttagcaacacttgtgtagatgaagaggaaagcaacccacaaataatatccctccatatttggccaaaaccaaagtgttccatgacaacaataaggaagggccaagaaactgaatcaaatgcttttgtgatatctaacttgagaagaaggctagccttttttttgttgatgaagaagcctcgaggtttgctgcaccagcataaaattgtcttgtatgaaacgacccttaatgaaagcactttgattaggtgagaccatgtcataaagtcttctagcaagcctatttgcaaggattttggtgatgagttttgcgacactgtgtacaagactaatgggcctaaaatccttaacctgaataaagcaagtgcaatctatgacctccaaaggaatagaagtaaccttgaatcgctattctgctacgacaaatctgtcccagaggagaatattggaaaaccgtccggtctagatctggaaaagaaggatgtcggggacaaccctccctgctcaagctgtgaagctaaaggcgctgtgctgtgcgcaacatgcgctggttcaggcttgtacgtcgactcgatactggagagccaagggatcatcgtgaaagtcagatgcctaggctgtggaggaactgggaacatcatgtgctccaagtgtggaggccgtgggcatacctgaatgataaaaagcttggacattgcagtgtctccgcagcaagacagtacaatcctgctagcatccttcccgagttacgttggtgggtatttggtctcatggtgacatcgtcaatcaaaaagagttacgattcttccggagaattttccttgtgctgatctagctgctgtaactgcatcgaaacatgctttagaagctattgaaccccatcccccccccccccccttttgctttttattcccctcgttttcatgcctaaaagtttaaaggacgatgcgtcaaaggattcgatgttatgttgtaatcataaaggttaatgaaatgtgaaagatacacttcgtttatgggagagattagattcaaagtgtcctgtgcagtaactgagcagaagtgtggtcacatcacatcacaaatactagtacatactccaactccattcaagaaagaatgcaattctagcagtgttatgttttggtattttaaattttaactaattatagataaaaaaagaatcaatatttataatgtgaaataaata

SEQ ID NO: 4855 - DNA, 941 bp, Zea Mays
ctcaaagccaaaaagcccaagcatcagcaggctggccgctggcagcctgacacacatcatgctgtttgctgcgtggacatgtggttttttctttagagaaaagtggagcagctctctgaagaggtagattcattgaaggaaacccttgacaggcattctctgcgacagaaaaaacggattctggaagcaaaagaaagagctgagctatttgaaagagctaacggtgaatcttcacacgtcctccgaatattcgacgacgaagcccaagcaaagcaatcagcccgtaactcctcacgaatgctcgaagaagcttacgagacaggagtgggtatccttcacaagtacgctgaccagagggatcgactgaagagtgctcaaaggaaagctttggatgtcctgaacactgtcggtctgtcaaactccgttctgaaacttatcgagaggcggcaccgcgtggacaggtggatcgcgtatgctggtatggtcatcaccgtggtggtgatgattgcgttttggcggttaacgcattagtgctgggctgtgtttgttacatatttctatcccagatatcaatgtgcaaacaagggggatggggcagattcagatggtgcagttttttttcgctggtcgtggagcagttcaagtttgcctcgccggtccgtcgcgtgcatagttgatgccggacccccaaagtgggttaaatgttcaaattccattgtatgcaatgctgctgtgtagtctattgttacgacttccatgtaactacacaagcttttgcgggacacagaagagaaaaggcgctgtattatttctgcacgaaatattgtactcgtaatatctagcctgcagttgaatagcacaaaataacggaaacctgtgagacctgaattttcagatttaactgaggaaaagatatgtgtctagcatatgttcctcgtctg

SEQ ID NO: 4856 - DNA, 690 bp, Zea Mays
aaacaatcaaatttatagccacatcaaatccatatcctcatgtgctgacctggaacttgccataagcattttcgctaacgacaatataatggctacttgtgatgacgtgtttatactaagtagaaaccatccacaccgcctcacgtgcttattgtgaccgctaattgtaacaccgcttctatatatacccgctataactagagaaatcctcgcaactcttcgcttacgaatctcaatcttcatttatgccacccctttttcttctcctccattattccattctttctgcccatgtagcctcaagcatccatccccatctgcgaccatggctggcggctccaaagccatgtcaccaccattgactatcccttcttattttccgtgcgtgcatctgtcatgcatgtgtcccttcttcttcatcggcagtttccctcatctcttacactgactttgctacggatacaccatcgagatattatgaagagatcgacaacctattccagcctaatctggtgggggaggtgtcttcaggccgactccctatgtcgtcgcgcaccgccgcatcacaggcaaattaaaccgtagatccagacacatcactacaccagatgagtgagcacaagatgtacatgcatgtaccagcagtccagcacacagagaacgggcagctggtgcagcccagctgtgcac

SEQ ID NO: 4857 - DNA, 1439 bp, Zea Mays
gtttatactaagtagaaaccatccacaccgcctcacgtgcttattgtgaccgctaattgtaacaccgcttctatatatacccgctataactagagaaatcctcgcaactcttcgcttacgaatctcaatcttcatttatgccacccctttttcttctcctccattattccattctttctgcccatgtagcctcaagcatccatccccatctgcgaccatggctggcggctccaaagccatgtcaccaccattgactatcccttcttattttccgtgcgtgcatctgtcatgcatgtgtcccttcttcttcatcggcagtttccctcatctcttacactgactttgctacggatacaccatcgagatattatgaagagatcgacaacctattccagcctaatctggtgggggaggtgtcttcaggccgactccctatgtcgtcgcgcaccgccgcatcacagacaagattgggccagacgacgtcgggctcagggacgagatccgcttcttcaacaagatgaacgccgctggtcttcaaaaccctcctatcgtcacatgcaaacctatttacgagggcgccaactttacgatcgcggtgttcttcttgccactgggagcggtcatgcctctccacgaccacccgggcatgacggtcttcacgaaggtgctcatcgggtcagcgcgcctggaggcctacgactgggtccgtccccgtgtcttggccggctgctgctcgggctcccgtcgccggacgctcgcgaagaaggtgcgggacgaccacggcgtcaccgcagcggcgtccgcctgggtgctgttccccaacagcggcgggaacatgcaccgcttcgcggccgcggaggacgcccactgcgcgttcctcgacgtcctcacgccgccctacgcgcccacggaccgaaggcgctgcaccttttaccaggacctcccctacgaacaccatcgtcctcgtccctgtacctgtaggtcgacagccacaggcggtgccatctgtgacgacgacgtgcttgttgcggaggagcagacgtgtcggctggcatggttggaggaggtcccgcagcctaggaacctgagggttgtctgcttgccgttccgaggcccaacgatcttctagcctcatcaacagcccatccggcaggcagaccctgcttactatctctagctatgagggaggcatagttgatcaaaaaaaaatattgtctttttccttttggagaataggatcccgtgctgataaatgatgatgtttacagtatgtagtgttaagctactctactgcgtcactgagacaaaacgtattcagctcttcacaggtggacgacaaagccactggcttctgtacttctgtttctgcgatgaaccagatcaccgccatagtcaatataataggctctaagtctgcattctcccctttcacatatctg

SEQ ID NO: 4858 - DNA, 1852 bp, Zea Mays
gtttatactaagtagaaaccatccacaccgcctcacgtgcttattgtgaccgctaattgtaacaccgcttctatatatacccgctataactagagaaatcctcgcaactcttcgcttacgaatctcaatcttcatttatgccacccctttttcttctcctccattattccattctttctgcccatgtagcctcaagcatccatccccatctgcgaccatggctggcggctccaaagccatgtcaccaccattgactatcccttcttattttccgtgcgtgcatctgtcatgcatgtgtcccttcttcttcatcggcagtttccctcatctcttacactgactttgctacggatacaccatcgagatattatgaagagatcgacaacctattccagcctaatctggtgggggaggtgtcttcaggccgactccctatgtcgtcgcgcaccgccgcatcacagttgcaggaacgcacggtgctagtttcgagtgtagcgcggcaatatggaggcaaagagcgcggccgcggaggtgctcaggaagaccgacgctggcggagacaatgagaggtataggcatggggagctggggcgcgaggctgtggaggaggaggaggtgaaaccgcgaagggtggcggatgcgccgctgccggcggagaggaagaggaagcgcgcggcggacccggaggacgacggcagcgtgagcgacagcggcagcggcagcgaagggcctccgcagcagcagcagcaggtgaagccgtgtctttccccggtgccgcctctccaacggctcctgagtgcgtgccgcgccctgctcactggctcctcctccccgccgacgccttccgctgtcgccttgatccgtggcattatggacaagattgggccagacgacgtcgggctcagggacgagatccgcttcttcaacaagatgaacgccgctggtcttcaaaaccctcctatcgtcacatgcaaacctatttacgagggcgccaactttacgatcgcggtgttcttcttgccactgggagcggtcatgcctctccacgaccacccgggcatgacggtcttcacgaaggtgctcatcgggtcagcgcgcctggaggcctacgactgggtccgtccccgtgtcttggccggctgctgctcgggctcccgtcgccggacgctcgcgaagaaggtgcgggacgaccacggcgtcaccgcagcggcgtccgcctgggtgctgttccccaacagcggcgggaacatgcaccgcttcgcggccgcggaggacgcccactgcgcgttcctcgacgtcctcacgccgccctacgcgcccacggaccgaaggcgctgcaccttttaccaggacctcccctacgaacaccatcgtcctcgtccctgtacctgtaggtcgacagccacaggcggtgccatctgtgacgacgacgtgcttgttgcggaggagcagacgtgtcggctggcatggttggaggaggtcccgcagcctaggaacctgagggttgtctgcttgccgttccgaggcccaacgatcttctagcctcatcaacagcccatccggcaggcagaccctgcttactatctctagctatgagggaggcatagttgatcaaaaaaaaatattgtctttttccttttggagaataggatcccgtgctgataaatgatgatgtttacagtatgtagtgttaagctactctactgcgtcactgagacaaaacgtattcagctcttcacaggtggacgacaaagccactggcttctgtacttctgtttctgcgatgaaccagatcaccgccatagtcaatataataggctctaagtctgcattctcccctttcacatatctg

SEQ ID NO: 4859 - DNA, 1779 bp, Zea Mays
cttctatatatacccgctataactagagaaatcctcgcaactcttcgcttacgaatctcaatcttcatttatgccacccctttttcttctcctccattattccattctttctgcccatgtagcctcaagcatccatccccatctgcgaccatggctggcggctccaaagccatgtcaccaccattgactatcccttcttattttccgtgcgtgcatctgtcatgcatgtgtcccttcttcttcatcggcagtttccctcatctcttacactgactttgctacggatacaccatcgagatattatgaagagatcgacaacctattccagcctaatctggtgggggaggtgtcttcaggccgactccctatgtcgtcgcgcaccgccgcatcacaggaacgcacggtgctagtttcgagtgtagcgcggcaatatggaggcaaagagcgcggccgcggaggtgctcaggaagaccgacgctggcggagacaatgagaggtataggcatggggagctggggcgcgaggctgtggaggaggaggaggtgaaaccgcgaagggtggcggatgcgccgctgccggcggagaggaagaggaagcgcgcggcggacccggaggacgacggcagcgtgagcgacagcggcagcggcagcgaagggcctccgcagcagcagcagcaggtgaagccgtgtctttccccggtgccgcctctccaacggctcctgagtgcgtgccgcgccctgctcactggctcctcctccccgccgacgccttccgctgtcgccttgatccgtggcattatggacaagattgggccagacgacgtcgggctcagggacgagatccgcttcttcaacaagatgaacgccgctggtcttcaaaaccctcctatcgtcacatgcaaacctatttacgagggcgccaactttacgatcgcggtgttcttcttgccactgggagcggtcatgcctctccacgaccacccgggcatgacggtcttcacgaaggtgctcatcgggtcagcgcgcctggaggcctacgactgggtccgtccccgtgtcttggccggctgctgctcgggctcccgtcgccggacgctcgcgaagaaggtgcgggacgaccacggcgtcaccgcagcggcgtccgcctgggtgctgttccccaacagcggcgggaacatgcaccgcttcgcggccgcggaggacgcccactgcgcgttcctcgacgtcctcacgccgccctacgcgcccacggaccgaaggcgctgcaccttttaccaggacctcccctacgaacaccatcgtcctcgtccctgtacctgtaggtcgacagccacaggcggtgccatctgtgacgacgacgtgcttgttgcggaggagcagacgtgtcggctggcatggttggaggaggtcccgcagcctaggaacctgagggttgtctgcttgccgttccgaggcccaacgatcttctagcctcatcaacagcccatccggcaggcagaccctgcttactatctctagctatgagggaggcatagttgatcaaaaaaaaatattgtctttttccttttggagaataggatcccgtgctgataaatgatgatgtttacagtatgtagtgttaagctactctactgcgtcactgagacaaaacgtattcagctcttcacaggtggacgacaaagccactggcttctgtacttctgtttctgcgatgaaccagatcaccgccatagtcaatataataggctctaagtctgcattctcccctttcacatatctg

SEQ ID NO: 4860 - DNA, 1746 bp, Zea Mays
cgaatctcaatcttcatttatgccacccctttttcttctcctccattattccattctttctgcccatgtagcctcaagcatccatccccatctgcgaccatggctggcggctccaaagccatgtcaccaccattgactatcccttcttattttccgtgcgtgcatctgtcatgcatgtgtcccttcttcttcatcggcagtttccctcatctcttacactgactttgctacggatacaccatcgagatattatgaagagatcgacaacctattccagcctaatctggtgggggaggtgtcttcaggccgactccctatgtcgtcgcgcaccgccgcatcacagttgcaggaacgcacggtgctagtttcgagtgtagcgcggcaatatggaggcaaagagcgcggccgcggaggtgctcaggaagaccgacgctggcggagacaatgagaggtataggcatggggagctggggcgcgaggctgtggaggaggaggaggtgaaaccgcgaagggtggcggatgcgccgctgccggcggagaggaagaggaagcgcgcggcggacccggaggacgacggcagcgtgagcgacagcggcagcggcagcgaagggcctccgcagcagcagcagcaggtgaagccgtgtctttccccggtgccgcctctccaacggctcctgagtgcgtgccgcgccctgctcactggctcctcctccccgccgacgccttccgctgtcgccttgatccgtggcattatggtgttctcatcagacaagattgggccagacgacgtcgggctcagggacgagatccgcttcttcaacaagatgaacgccgctggtcttcaaaaccctcctatcgtcacatgcaaacctatttacgagggcgccaactttacgatcgcggtgttcttcttgccactgggagcggtcatgcctctccacgaccacccgggcatgacggtcttcacgaaggtgctcatcgggtcagcgcgcctggaggcctacgactgggtccgtccccgtgtcttggccggctgctgctcgggctcccgtcgccggacgctcgcgaagaaggtgcgggacgaccacggcgtcaccgcagcggcgtccgcctgggtgctgttccccaacagcggcgggaacatgcaccgcttcgcggccgcggaggacgcccactgcgcgttcctcgacgtcctcacgccgccctacgcgcccacggaccgaaggcgctgcaccttttaccaggacctcccctacgaacaccatcgtcctcgtccctgtacctgtaggtcgacagccacaggcggtgccatctgtgacgacgacgtgcttgttgcggaggagcagacgtgtcggctggcatggttggaggaggtcccgcagcctaggaacctgagggttgtctgcttgccgttccgaggcccaacgatcttctagcctcatcaacagcccatccggcaggcagaccctgcttactatctctagctatgagggaggcatagttgatcaaaaaaaaatattgtctttttccttttggagaataggatcccgtgctgataaatgatgatgtttacagtatgtagtgttaagctactctactgcgtcactgagacaaaacgtattcagctcttcacaggtggacgacaaagccactggcttctgtacttctgtttctgcgatgaaccagatcaccgccatagtcaatataataggctctaagtctgcattctcccctttcacatatctg

SEQ ID NO: 4861 - DNA, 1543 bp, Zea Mays
caacgatctcttgttgcccttctcgccaccacgtcggtcgtcgttgcttgcaccacaccaccagagcgacggccggggttcaccgtcgcgagctcttttggaaacgagggggcggcgctgctggtttcgtctaatccaccattccaccatgcttgcaggaacgcacggtgctagtttcgagtgtagcgcggcaatatggaggcaaagagcgcggccgcggaggtgctcaggaagaccgacgctggcggagacaatgagaggtataggcatggggagctggggcgcgaggctgtggaggaggaggaggtgaaaccgcgaagggtggcggatgcgccgctgccggcggagaggaagaggaagcgcgcggcggacccggaggacgacggcagcgtgagcgacagcggcagcggcagcgaagggcctccgcagcagcagcagcaggtgaagccgtgtctttccccggtgccgcctctccaacggctcctgagtgcgtgccgcgccctgctcactggctcctcctccccgccgacgccttccgctgtcgccttgatccgtggcattatggacaagattgggccagacgacgtcgggctcagggacgagatccgcttcttcaacaagatgaacgccgctggtcttcaaaaccctcctatcgtcacatgcaaacctatttacgagggcgccaactttacgatcgcggtgttcttcttgccactgggagcggtcatgcctctccacgaccacccgggcatgacggtcttcacgaaggtgctcatcgggtcagcgcgcctggaggcctacgactgggtccgtccccgtgtcttggccggctgctgctcgggctcccgtcgccggacgctcgcgaagaaggtgcgggacgaccacggcgtcaccgcagcggcgtccgcctgggtgctgttccccaacagcggcgggaacatgcaccgcttcgcggccgcggaggacgcccactgcgcgttcctcgacgtcctcacgccgccctacgcgcccacggaccgaaggcgctgcaccttttaccaggacctcccctacgaacaccatcgtcctcgtccctgtacctgtaggtcgacagccacaggcggtgccatctgtgacgacgacgtgcttgttgcggaggagcagacgtgtcggctggcatggttggaggaggtcccgcagcctaggaacctgagggttgtctgcttgccgttccgaggcccaacgatcttctagcctcatcaacagcccatccggcaggcagaccctgcttactatctctagctatgagggaggcatagttgatcaaaaaaaaatattgtctttttccttttggagaataggatcccgtgctgataaatgatgatgtttacagtatgtagtgttaagctactctactgcgtcactgagacaaaacgtattcagctcttcacaggtggacgacaaagccactggcttctgtacttctgtttctgcgatgaaccagatcaccgccatagtcaatataataggctctaagtctgcattctcccctttcacatatctg

SEQ ID NO: 4862 - DNA, 1619 bp, Zea Mays
tggaaacgagggggcggcgctgctggtttcgtctaatccaccattccaccatgcttcttccttcccttcccggccggccgcaagcagggacttgatctcaagagacgcgcgcgtgtataaaatggccggccggcgcttgctggcctagatcctcacccatctatcgagctaggactgctagatcctcacctgcccgactctcgctcgtcggttcgatctttcccatagttgcaggaacgcacggtgctagtttcgagtgtagcgcggcaatatggaggcaaagagcgcggccgcggaggtgctcaggaagaccgacgctggcggagacaatgagaggtataggcatggggagctggggcgcgaggctgtggaggaggaggaggtgaaaccgcgaagggtggcggatgcgccgctgccggcggagaggaagaggaagcgcgcggcggacccggaggacgacggcagcgtgagcgacagcggcagcggcagcgaagggcctccgcagcagcagcagcaggtgaagccgtgtctttccccggtgccgcctctccaacggctcctgagtgcgtgccgcgccctgctcactggctcctcctccccgccgacgccttccgctgtcgccttgatccgtggcattatggacaagattgggccagacgacgtcgggctcagggacgagatccgcttcttcaacaagatgaacgccgctggtcttcaaaaccctcctatcgtcacatgcaaacctatttacgagggcgccaactttacgatcgcggtgttcttcttgccactgggagcggtcatgcctctccacgaccacccgggcatgacggtcttcacgaaggtgctcatcgggtcagcgcgcctggaggcctacgactgggtccgtccccgtgtcttggccggctgctgctcgggctcccgtcgccggacgctcgcgaagaaggtgcgggacgaccacggcgtcaccgcagcggcgtccgcctgggtgctgttccccaacagcggcgggaacatgcaccgcttcgcggccgcggaggacgcccactgcgcgttcctcgacgtcctcacgccgccctacgcgcccacggaccgaaggcgctgcaccttttaccaggacctcccctacgaacaccatcgtcctcgtccctgtacctgtaggtcgacagccacaggcggtgccatctgtgacgacgacgtgcttgttgcggaggagcagacgtgtcggctggcatggttggaggaggtcccgcagcctaggaacctgagggttgtctgcttgccgttccgaggcccaacgatcttctagcctcatcaacagcccatccggcaggcagaccctgcttactatctctagctatgagggaggcatagttgatcaaaaaaaaatattgtctttttccttttggagaataggatcccgtgctgataaatgatgatgtttacagtatgtagtgttaagctactctactgcgtcactgagacaaaacgtattcagctcttcacaggtggacgacaaagccactggcttctgtacttctgtttctgcgatgaaccagatcaccgccatagtcaatataataggctctaagtctgcattctcccctttcacatatctg

SEQ ID NO: 4863 - DNA, 2040 bp, Zea Mays
cctcgttaagctgcttcctcctattaaacacgtcttccacaaaccaccaaagagttgagctgcttgcttgaattcccggggttatcaaaaggggggcttgcttgaatttaaagccctgccatctgccccggagcgccgccgcgcgagatgccccccaccgccaccgaagccacctcgtcgtcggcgaccagtgccacctcgtccacggatgccgacgccccgggccccacctcgccatcgccgtcccggcgcgcggcgcccactctgctcctcgtcgccttcctcgccgcactcctcatcttctccaccggcgacgatgccacggcgcagccgctcaacggtgtaagcttgcaaaacccagaggtttcatttgttccctcccccttggctggacaattttgtgagcgagtcctactatctggagtgccaaggttacatcttgatagttatgcaagccaaattcgtgtcaaaatgaatgtgtctcaatctattcctgagaagttccattggaaaatagaggtttgctttcatagtgtgaggcgggtgagtggcaaggttttcaaggtgggatgtggactgctgtaagttctccatatggaaacaaatatgttgatctgaaattggctgataagaaacctgctaggttcactctttccattcaggaagagtttcagaaatggcgtctggcttgccttggtattggatttgtattgctattcctgtcaccaattattagcaaatgggttcccttttactatagcagctctatggctcttggaatcctggctgttgttcttattgttattttccaggggatgaaactgctaccaatgggcaggaagagtttattttaccttgcaatttatggatctgtgttaggtgttggttcctatgctgtacactacttctcaacattggtctcttctattcttgaaaacttcggcttgagtgaagagttatacaaccctgtttctatcttcctgctggtagcaattgtcttgactggagctggttttggctattggatggtcaggagatttatcctttccaaagatggaagtgtagatgctgggatagcgcagtttgtgaagtgggctatgcgtgttgttgctacatttttcattatgcagagcacacttgatcctcttctagcactggttgctcttgcttttagctggtggttatgctctctgttgactacaaagaaagttcagaagaccatgacccagaaacaaaagcaatcaaaggttctttctcagcaaatgcttactcaaggattgcccacgggtcctaaaatccagtttttaagtccatctaagacaggctttggaggaaccacatctagaacttccgccacacagtatggtcggagcaatttggccaatcgaggtatggtctgctcagcacttgcaaagcgcgcagtgcccaacgaagacgaagaccactactccaccttccacaacatccagccacggaaatatacgaagcaggaatgggaggacttcacccaggaatcgactaggaaggcgcttgcggagtgcacagctaccccagagtttgcccagtgggtcggtgacaacgctcgtcgtctgcaagtagagaaagaggaggacaacttgtcagaggaagagatcatggagagctccagctcgtcggaagaaactggggatgaagctgatggagctcctggcctgatcagactgtggggctagcatgccggttgaacttgtaagagccccaagcatatatgctcctgccatttcacgtgtaaagagtagcaaccggtcattttaactagtgtagcagcagggtagggtggtagcagctgattgctttcgcagttgttgccacggtggcagtagttggctagccatctcaggtcaattgatgctaggtttagctaactgtctgttatcagcggattcttagttctctagagctgatatatgtgtaatggtttaaacaatctaatctgtgactggatccagcattttgttgatctggttggaagttgggtcgttagcatttcttggcgctcca

SEQ ID NO: 4864 - DNA, 3910 bp, Zea Mays
ccaaagagttgagctgcttgcttgaattcccggggttatcaaaaggggggcttgcttgaatttaaagccctgccatctgccccggagcgccgccgcgcgagatgccccccaccgccaccgaagccacctcgtcgtcggcgaccagtgccacctcgtccacggatgccgacgccccgggccccacctcgccatcgccgtcccggcgcgcggcgcccactctgctcctcgtcgccttcctcgccgcactcctcatcttctccaccggcgacgatgccacggcgcagccgctcaacggtgtaagcttgcaaaacccagaggtttcatttgttccctcccccttggctggacaattttgtgagcgagtcctactatctggagtgccaaggttacatcttgatagttatgcaagccaaattcgtgtcaaaatgaatgtgtctcaatctattcctgagaagttccattggaaaatagaggtttgctttcataggaatgcctctatgggtttatgccagtgtgaggcgggtgagtggcaaggttttcaaggtgggatgtggactgctgtaagttctccatatggaaacaaatatgttgatctgaaattggctgataagaaacctgctaggttcactctttccattcaggaagagtttcagaaatggcgtctggcttgccttggtattggatttgtattgctattcctgtcaccaattattagcaaatgggttcccttttactatagcagctctatggctcttggaatcctggctgttgttcttattgttattttccaggggatgaaactgctaccaatgggcaggaagagtttattttaccttgcaatttatggatctgtgttaggtgttggttcctatgctgtacactacttctcaacattggtctcttctattcttgaaaacttcggcttgagtgaagagttatacaaccctgtaagtaaattcttcttgcatgttttctaataataaatcaactgactaaaaaaagacggacctagtgttagcggttcccacattttgctgagaggctgcgtcgaacctaggggcttctcacctgcactaggcctgtatttctaataaatcaactaaaataaaaaggggcggacccagtgttggaggctctcacatgagtggggtctggggaagggataaattgaggcatcgaacctgagacccggtgacttagtgagacagttctcaccactatgccagacctgtccttctaataaatcaactaacatttttattaattccccttttttgcttgcatagtattatttactgttttttttgtcttctggatattggtttttctaatgtttgttccatcagaaatgaagcacaccagtttatttagtagtcctagtatctttatcattaagtgactttgcaaacttgaaataatcatggaaagtagagcatgtgtatcaagttgcaaggaagtttttgtttgttctgatttttttggacctgatcatagtaactgatagcctgaaccctgagtttattacttatagatagattcattgattcaatatgcccaattgtcgattataactacagcctttgtaagctaaattggtctatatcctgctaatgctttacatttaccaaggtgcacattagacctacctcaatatttattgttatgattggaacgcagtctgcaaagataaaatgggcagaccttgcgaaagggcctctagctgagttggttaggtggtttgagtaacattccttaggtcccgagtttgactcttgagttcgactccccgtgggagcgaattttaggttgtggttaaaaaaatcccctcgtctgtcccacgtcaaagcccatgtctaaggtccggctctggttgcggtcgttctcacatgggctacggtgccgctgtgtatgggtggggcaggggttcgagggttttctcaacctgcataagaaggtcttcttaatataatgccgtgagagcggtcttacccctgcaggtcgagtttttttaaaaaagggcagacctagtgtcagaggcccccacatgagtgggatttggtaaagggataaaccaaggtaagtatttctcccacaaatgtgaagagtctgtttcgaacttgtgacttggtgactcagacagatagcggtctcacggctgtactaggcctgcccttcttaacaattctgcaaagatgacttgtgtatttctgactcctgacgttagccagtcattatctagatactttgatggtgtatcagataagtgtaaacaatatggaagttaatagtgtattacatgcatttgcattactatatggcagtgcggttacttctaacatcagaagcttgttttcttttaatgaagtttgaaactttgacctacaaagcctacaagttacaagagcataatttcagatctactgccccatttatctgttcggtgcactgtggaaaaatgatggtttgagtttttatttttatttgttgtttaccttccatataaaacctaatttgtgtgcaaaaacatagcgcactgcatatagagtttcatgactttattcgagaccatgccagttgggtcataactcataattgacacgtatttatgggacactgttattcataaagatgaggtatctgcaaatagttacatcacctcaaatactgtacatttgcggttcaccatgcatttttttggttatgcttgttgacctgtatggtacagtggactattcattgctcgtttaagtacatcatcagtctgttacatagttttgcctagttagctttacctgttatagaagtctgtaagtaacgtaagttaatgatgaattacaggtttctatcttcctgctggtagcaattgtcttgactggagctggttttggctattggatggtcaggagatttatcctttccaaagatggaagtgtagatgctgggatagcgcagtttgtgaagtgggctatgcgtgttgttgctacatttttcattatgcagagcacacttgatcctcttctagcactggttgctcttgcttttagctggtggttatgctctctgttgactacaaagaaagttcagaagaccatgacccagaaacaaaagcaatcaaaggttctttctcagcaaatgcttactcaaggattgcccacgggtcctaaaatccagtttttaagtccatctaagacaggctttggaggaaccacatctagaacttccgccacacagtatggtcggagcaatttggccaatcgaggtatggtctgctcagcacttgcaaagcgcgcagtgcccaacgaagacgaagaccactactccaccttccacaacatccagccacggaaatatacgaagcaggaatgggaggacttcacccaggaatcgactaggaaggcgcttgcggagtgcacagctaccccagagtttgcccagtgggtcggtgacaacgctcgtcgtctgcaagtagagaaagaggaggacaacttgtcagaggaagagatcatggagagctccagctcgtcggaagaaactggggatgaagctgatggagctcctggcctgatcagactgtggggctagcatgccggttgaacttgtaagagccccaagcatatatgctcctgccatttcacgtgtaaagagtagcaaccggtcattttaactagtgtagcagcagggtagggtggtagcagctgattgctttcgcagttgttgccacggtggcagtagttggctagccatctcaggtcaattgatgctaggtttagctaactgtctgttatcagcggattcttagttctctagagctgatatatgtgtaatggtttaaacaatctaatctgtgactggatccagcattttgttgatctggttggaagttgggtcgttagcatttcttggcgctcca

SEQ ID NO: 4865 - DNA, 1954 bp, Zea Mays
ccaaagagttgagctgcttgcttgaattcccggggttatcaaaaggggggcttgcttgaatttaaagccctgccatctgccccggagcgccgccgcgcgagatgccccccaccgccaccgaagccacctcgtcgtcggcgaccagtgccacctcgtccacggatgccgacgccccgggccccacctcgccatcgccgtcccggcgcgcggcgcccactctgctcctcgtcgccttcctcgccgcactcctcatcttctccaccggcgacgatgccacggcgcagccgctcaacggtgtaagcttgcaaaacccagaggtttcatttgttccctcccccttggctggacaattttgtgagcgagtcctactatctggagtgccaaggttacatcttgatagttatgcaagccaaattcgtgtcaaaatgaatgtgtctcaatctattcctgagaagttccattggaaaatagaggtttgctttcataggaatgcctctatgggtttatgccagtgtgaggcgggtgagtggcaaggttttcaaggtgggatgtggactgctgtaagttctccatatggaaacaaatatgttgatctgaaattggctgataagaaacctgctaggttcactctttccattcaggaagagtttcagaaatggcgtctggcttgccttggtattggatttgtattgctattcctgtcaccaattattagcaaatgggttcccttttactatagcagctctatggctcttggaatcctggctgttgttcttattgttattttccaggggatgaaactgctaccaatgggcaggaagagtttattttaccttgcaatttatggatctgtgttaggtgttggttcctatgctgtacactacttctcaacattggtctcttctattcttgaaaacttcggcttgagtgaagagttatacaaccctgagatttatcctttccaaagatggaagtgtagatgctgggatagcgcagtttgtgaagtgggctatgcgtgttgttgctacatttttcattatgcagagcacacttgatcctcttctagcactggttgctcttgcttttagctggtggttatgctctctgttgactacaaagaaagttcagaagaccatgacccagaaacaaaagcaatcaaaggttctttctcagcaaatgcttactcaaggattgcccacgggtcctaaaatccagtttttaagtccatctaagacaggctttggaggaaccacatctagaacttccgccacacagtatggtcggagcaatttggccaatcgaggtatggtctgctcagcacttgcaaagcgcgcagtgcccaacgaagacgaagaccactactccaccttccacaacatccagccacggaaatatacgaagcaggaatgggaggacttcacccaggaatcgactaggaaggcgcttgcggagtgcacagctaccccagagtttgcccagtgggtcggtgacaacgctcgtcgtctgcaagtagagaaagaggaggacaacttgtcagaggaagagatcatggagagctccagctcgtcggaagaaactggggatgaagctgatggagctcctggcctgatcagactgtggggctagcatgccggttgaacttgtaagagccccaagcatatatgctcctgccatttcacgtgtaaagagtagcaaccggtcattttaactagtgtagcagcagggtagggtggtagcagctgattgctttcgcagttgttgccacggtggcagtagttggctagccatctcaggtcaattgatgctaggtttagctaactgtctgttatcagcggattcttagttctctagagctgatatatgtgtaatggtttaaacaatctaatctgtgactggatccagcattttgttgatctggttggaagttgggtcgttagcatttcttggcgctcca

SEQ ID NO: 4866 - DNA, 1117 bp, Zea Mays
cagaggcccccacatgagtgggatttggtaaagggataaaccaaggtttctatcttcctgctggtagcaattgtcttgactggagctggttttggctattggatggtcaggagatttatcctttccaaagatggaagtgtagatgctgggatagcgcagtttgtgaagtgggctatgcgtgttgttgctacatttttcattatgcagagcacacttgatcctcttctagcactggttgctcttgcttttagctggtggttatgctctctgttgactacaaagaaagttcagaagaccatgacccagaaacaaaagcaatcaaaggttctttctcagcaaatgcttactcaaggattgcccacgggtcctaaaatccagtttttaagtccatctaagacaggctttggaggaaccacatctagaacttccgccacacagtatggtcggagcaatttggccaatcgaggtatggtctgctcagcacttgcaaagcgcgcagtgcccaacgaagacgaagaccactactccaccttccacaacatccagccacggaaatatacgaagcaggaatgggaggacttcacccaggaatcgactaggaaggcgcttgcggagtgcacagctaccccagagtttgcccagtgggtcggtgacaacgctcgtcgtctgcaagtagagaaagaggaggacaacttgtcagaggaagagatcatggagagctccagctcgtcggaagaaactggggatgaagctgatggagctcctggcctgatcagactgtggggctagcatgccggttgaacttgtaagagccccaagcatatatgctcctgccatttcacgtgtaaagagtagcaaccggtcattttaactagtgtagcagcagggtagggtggtagcagctgattgctttcgcagttgttgccacggtggcagtagttggctagccatctcaggtcaattgatgctaggtttagctaactgtctgttatcagcggattcttagttctctagagctgatatatgtgtaatggtttaaacaatctaatctgtgactggatccagcattttgttgatctggttggaagttgggtcgttagcatttcttggcgctcca

SEQ ID NO: 4867 - DNA, 2977 bp, Zea Mays
ctcagagcgagcaattttccaacagatacgacaccagacgagagggaacctcgagccaagaaagcgagagggggaagctgcggccgccggccgagcgagctcgccgtccccatccacccctctcactctcctcttcctcctctctgtctttcgctccgtccagccgccgcgtaatccgcggaaccagatgccctcatccgccctctgatcgaatcccgcgagaaaggccggttctctgtcctgccgtgccggcgatcttgatggcattggaggcggggagcagcggctgcggcgggaggggatggggcggcgggttccggagcctgatgcggcggaagcaggtggactccgaccggatccgcgccgagggccagccgcagctcgccaaggagctcaacgtgccggagctggtcgccatcggagttggttccacagttggagcaggagtatatgttcttgtgggaataattgctagggagcacgctggtccagcattgacaatttcatttctgatagctggaatagcagccacactttcagctttctgttatgctgagcttgctagtcgttgcccctctgctggaagtgcctaccattattcatacatctgtgttggagaaggtgttgcctggttgattggctgggctctagtgctggaatatactattggtggatctgctgttgcccgtggtatatctccaaacttagccttgttttttggaggacaggatagtctgccatggattttagcacgccatcagcttccatggtttggtatcattattgatccctgtgcagctgctcttgtttgtgttgtgactgttttactctgcatgggaattaaagagagttcatttgcacaaggagttgtaacagttctgaatgcttttgtaatgatatttgttattgtagctggtagttatattggcttccaaataggatgggtcggctacaaggattctgatgggtatttcccatatggagtaaatggaatgcttgctggatcagcaactgttttctttgcatacataggctttgatacagttgctagtacagctgaagaggttaggaatccacagagagatcttccattgggaatcggagtagcgttggctatttgttgtgcattgtatatggctgtttctgttgttattgttgggctggtaccatattttgccatggacccagatactcctatttcatctgcctttgcaaaacatggaatgcaatgggccatgtatgttgtgacaactggtgctgttcttgcactctgctcgaacttgatgggctcacttcttccacaggtatacagtgataaaacataaaagtatattatgacttactcctgatgacacccagtggatgaaattgaatggaatttgagttgattctactattctagtacatgtgaacttttcattccactgtcagttactctgcaataagttgtgaacctagccttgtaagtggccaaaactcaatgactcctgacccttattgtataatttatctgttcttcggtttgcactttggattcctcatttaactcaacattatccatcaattacattgccccccattcattcattttgaatttaaatcccattgaactaatgctgcaatgaactttgattcccatgccacatctatgagcgaagatgtaggcatgtagtactatggtgaaccacatcagcactatgcagatgatattttaatacttggtgtcattatgatttgaattgttattctcgcagcctagaatacttatggccatggcacgagatggcctgttgccatccttcttctctgatgttaacaagcaaactcaagtacctgttaagagcacaattgtgacaggcatctgtgcagctgctctggcttttacaatggatgtctcacagttagcaggaatggtcagtgtaggcacactccttgcattcaccgtagttgctgtttcgatcttgatactcagatatgtccctccagatgaggtccctttgccaccctctctgcaagaatcattccgtttgaaccaggaatgcgatgaggaaagggacagggctcttcttggagttgggaactgtaccttgtctcagacaaaggatgtgattgtggtagtagaatcagttaaggaccctctcattgatataccgctgcataaaggcaagatggatgagacaaagcgccgaaagatagcctctttaagcataggatctgtgtgtataggggttctgatcctcacatcttcagcctctgccacatggttgccttttctcccgatatgtattggctgcatcattggagttgtgctccttctggctggcctcagtttgctctcctggatcgaccaagatgctggcaggcactcttttggtcattctggaggattcacatgcccttttgttccagtgctgccagttttgtgcatcctgataaatacgtatctgttgataaacctgggtggtgacacatggatgagagttggcatatggctgctgatgggtgttctcctgtacattttctacggacgaacccacagctccctaacagatgtcgtctacgttccagtagcgcaggctgatgagatgtacaggagttcatcaggatatgtatcatagaaaagaacagccgcagttacttcaaggtggttggtcattcagttgtagataattggttatcaaccaggaaagaggggaattggctgttatttctttcatgcttggccaacaagatctcgtggatgcaactttgcaagatatatatgatgttcacgagcctggtcaatttacacattgtttgttggagtgtgcgtagatgtggtgtatataaacccagctgggtggaatgatgtggtacataatttatgcaattcatgtaaaagccctttctacctttctactgaaatgggagagcatttaaagggcatattgaaacagtacatgaatggcaagagaagctacctttttttatatctttt

SEQ ID NO: 4868 - DNA, 2623 bp, Zea Mays
gcgagcaattttccaacagatacgacaccagacgagagggaacctcgagccaagaaagcgagagggggaagctgcggccgccggccgagcgagctcgccgtccccatccacccctctcactctcctcttcctcctctctgtctttcgctccgtccagccgccgcgtaatccgcggaaccagatgccctcatccgccctctgatcgaatcccgcgagaaaggccggttctctgtcctgccgtgccggcgatcttgatggcattggaggcggggagcagcggctgcggcgggaggggatggggcggcgggttccggagcctgatgcggcggaagcaggtggactccgaccggatccgcgccgagggccagccgcagctcgccaaggagctcaacgtgccggagctggtcgccatcggagttggttccacagttggagcaggagtatatgttcttgtgggaataattgctagggagcacgctggtccagcattgacaatttcatttctgatagctggaatagcagccacactttcagctttctgttatgctgagcttgctagtcgttgcccctctgctggaagtgcctaccattattcatacatctgtgttggagaaggtgttgcctggttgattggctgggctctagtgctggaatatactattggtggatctgctgttgcccgtggtatatctccaaacttagccttgttttttggaggacaggatagtctgccatggattttagcacgccatcagcttccatggtttggtatcattattgatccctgtgcagctgctcttgtttgtgttgtgactgttttactctgcatgggaattaaagagagttcatttgcacaaggagttgtaacagttctgaatgcttttgtaatgatatttgttattgtagctggtagttatattggcttccaaataggatgggtcggctacaaggattctgatgggtatttcccatatggagtaaatggaatgcttgctggatcagcaactgttttctttgcatacataggctttgatacagttgctagtacagctgaagaggttaggaatccacagagagatcttccattgggaatcggagtagcgttggctatttgttgtgcattgtatatggctgtttctgttgttattgttgggctggtaccatattttgccatggacccagatactcctatttcatctgcctttgcaaaacatggaatgcaatgggccatgtatgttgtgacaactggtgctgttcttgcactctgctcgaacttgatgggctcacttcttccacagcctagaatacttatggccatggcacgagatggcctgttgccatccttcttctctgatgttaacaagcaaactcaagtacctgttaagagcacaattgtgacaggcatctgtgcagctgctctggcttttacaatggatgtctcacagttagcaggaatgagatggagctccaaagtaccaagaacacaagggttattcttatggtttgtctagtcatagccattttcacaacaatggactatggaagagagagttccttcaggactgtacatacacacaagcaatacaaatcataaggtggagtgaaataaaaaatatgttcttttggttgcagatgaggtccctttgccaccctctctgcaagaatcattccgtttgaaccaggaatgcgatgaggaaagggacagggctcttcttggagttgggaactgtaccttgtctcagacaaaggatgtgattgtggtagtagaatcagttaaggaccctctcattgatataccgctgcataaaggcaagatggatgagacaaagcgccgaaagatagcctctttaagcataggatctgtgtgtataggggttctgatcctcacatcttcagcctctgccacatggttgccttttctcccgatatgtattggctgcatcattggagttgtgctccttctggctggcctcagtttgctctcctggatcgaccaagatgctggcaggcactcttttggtcattctggaggattcacatgcccttttgttccagtgctgccagttttgtgcatcctgataaatacgtatctgttgataaacctgggtggtgacacatggatgagagttggcatatggctgctgatgggtgttctcctgtacattttctacggacgaacccacagctccctaacagatgtcgtctacgttccagtagcgcaggctgatgagatgtacaggagttcatcaggatatgtatcatagaaaagaacagccgcagttacttcaaggtggttggtcattcagttgtagataattggttatcaaccaggaaagaggggaattggctgttatttctttcatgcttggccaacaagatctcgtggatgcaactttgcaagatatatatgatgttcacgagcctggtcaatttacacattgtttgttggagtgtgcgtagatgtggtgtatataaacccagctgggtggaatgatgtggtacataatttatgcaattcatgtaaaagccctttctacctttctactgaaatgggagagcatttaaagggcatattgaaacagtacatgaatggcaagagaagctacctttttttatatctttt

SEQ ID NO: 4869 - DNA, 2578 bp, Zea Mays
caattttccaacagatacgacaccagacgagagggaacctcgagccaagaaagcgagagggggaagctgcggccgccggccgagcgagctcgccgtccccatccacccctctcactctcctcttcctcctctctgtctttcgctccgtccagccgccgcgtaatccgcggaaccagatgccctcatccgccctctgatcgaatcccgcgagaaaggccggttctctgtcctgccgtgccggcgatcttgatggcattggaggcggggagcagcggctgcggcgggaggggatggggcggcgggttccggagcctgatgcggcggaagcaggtggactccgaccggatccgcgccgagggccagccgcagctcgccaaggagctcaacgtgccggagctggtcgccatcggagttggttccacagttggagcaggagtatatgttcttgtgggaataattgctagggagcacgctggtccagcattgacaatttcatttctgatagctggaatagcagccacactttcagctttctgttatgctgagcttgctagtcgttgcccctctgctggaagtgcctaccattattcatacatctgtgttggagaaggtgttgcctggttgattggctgggctctagtgctggaatatactattggtggatctgctgttgcccgtggccttgttttttggaggacaggatagtctgccatggattttagcacgccatcagcttccatggtttggtatcattattgatccctgtgcagctgctcttgtttgtgttgtgactgttttactctgcatgggaattaaagagagttcatttgcacaaggagttgtaacagttctgaatgcttttgtaatgatatttgttattgtagctggtagttatattggcttccaaataggatgggtcggctacaaggattctgatgggtaatgcataaaggcttagtgcttcttttcttttgtaggatttcatagtggtgtgctcataggtatatgaactttccaggtatttcccatatggagtaaatggaatgcttgctggatcagcaactgttttctttgcatacataggctttgatacagttgctagtacagctgaagaggttaggaatccacagagagatcttccattgggaatcggagtagcgttggctatttgttgtgcattgtatatggctgtttctgttgttattgttgggctggtaccatattttgccatggacccagatactcctatttcatctgcctttgcaaaacatggaatgcaatgggccatgtatgttgtgacaactggtgctgttcttgcactctgctcgaacttgatgggctcacttcttccacagcctagaatacttatggccatggcacgagatggcctgttgccatccttcttctctgatgttaacaagcaaactcaagtacctgttaagagcacaattgtgacaggcatctgtgcagctgctctggcttttacaatggatgtctcacagttagcaggaatggtcagtgtaggcacactccttgcattcaccgtagttgctgtttcgatcttgatactcagatatgtccctccagatgaggtccctttgccaccctctctgcaagaatcattccgtttgaaccaggaatgcgatgaggaaagggacagggctcttcttggagttgggaactgtaccttgtctcagacaaaggatgtgattgtggtagtagaatcagttaaggaccctctcattgatataccgctgcataaaggcaagatggatgagacaaagcgccgaaagatagcctctttaagcataggatctgtgtgtataggggttctgatcctcacatcttcagcctctgccacatggttgccttttctcccgatatgtattggctgcatcattggagttgtgctccttctggctggcctcagtttgctctcctggatcgaccaagatgctggcaggcactcttttggtcattctggaggattcacatgcccttttgttccagtgctgccagttttgtgcatcctgataaatacgtatctgttgataaacctgggtggtgacacatggatgagagttggcatatggctgctgatgggtgttctcctgtacattttctacggacgaacccacagctccctaacagatgtcgtctacgttccagtagcgcaggctgatgagatgtacaggagttcatcaggatatgtatcatagaaaagaacagccgcagttacttcaaggtggttggtcattcagttgtagataattggttatcaaccaggaaagaggggaattggctgttatttctttcatgcttggccaacaagatctcgtggatgcaactttgcaagatatatatgatgttcacgagcctggtcaatttacacattgtttgttggagtgtgcgtagatgtggtgtatataaacccagctgggtggaatgatgtggtacataatttatgcaattcatgtaaaagccctttctacctttctactgaaatgggagagcatttaaagggcatattgaaacagtacatgaatggcaagagaagctacctttttttatatctttt

SEQ ID NO: 4870 - DNA, 2862 bp, Zea Mays
ccaacagatacgacaccagacgagagggaacctcgagccaagaaagcgagagggggaagctgcggccgccggccgagcgagctcgccgtccccatccacccctctcactctcctcttcctcctctctgtctttcgctccgtccagccgccgcgtaatccgcggaaccagatgccctcatccgccctctgatcgaatcccgcgagaaaggccggttctctgtcctgccgtgccggcgatcttgatggcattggaggcggggagcagcggctgcggcgggaggggatggggcggcgggttccggagcctgatgcggcggaagcaggtggactccgaccggatccgcgccgagggccagccgcagctcgccaaggagctcaacgtgccggagctggtcgccatcggagttggttccacagttggagcaggagtatatgttcttgtgggaataattgctagggagcacgctggtccagcattgacaatttcatttctgatagctggaatagcagccacactttcagctttctgttatgctgagcttgctagtcgttgcccctctgctggaagtgcctaccattattcatacatctgtgttggagaaggtgttgcctggttgattggctgggctctagtgctggaatatactattggtggatctgctgttgcccgtggtatatctccaaacttagccttgttttttggaggacaggatagtctgccatggattttagcacgccatcagcttccatggtttggtatcattattgatccctgtgcagctgctcttgtttgtgttgtgactgttttactctgcatgggaattaaagagagttcatttgcacaaggagttgtaacagttctgaatgcttttgtaatgatatttgttattgtagctggtagttatattggcttccaaataggatgggtcggctacaaggattctgatgggtatttcccatatggagtaaatggaatgcttgctggatcagcaactgttttctttgcatacataggctttgatacagttgctagtacagctgaagaggttaggaatccacagagagatcttccattgggaatcggagtagcgttggctatttgttgtgcattgtatatggctgtttctgttgttattgttgggctggtaccatattttgccatggacccagatactcctatttcatctgcctttgcaaaacatggaatgcaatgggccatgtatgttgtgacaactggtgctgttcttgcactctgctcgaacttgatgggctcacttcttccacagcctagaatacttatggccatggcacgagatggcctgttgccatccttcttctctgatgttaacaagcaaactcaagtacctgttaagagcacaattgtgacaggcatctgtgcagctgctctggcttttacaatggatgtctcacagttagcaggaatggtaaggaaccagctatctgtgattgtttgtgttggtggagaagacacaggtttgggagattttctctattacttaggccacactaaccatgtctggttatagttacatatataggaccaagtggtctgttgcaactgaaagtagagataagattacaactactaaagtagagataaggtagaagataagatgctatatctagatgccataacataggcactaactactgctactactactacttatcctagagatggagctccaaagtaccaagaacacaagggttattcttatggtttgtctagtcatagccattttcacaacaatggactatggaagagagagttccttcaggactgtacatacacacaagcaatacaaatcataaggtggagtgaaataaaaaatatgttcttttggttgcagatgaggtccctttgccaccctctctgcaagaatcattccgtttgaaccaggaatgcgatgaggaaagggacagggctcttcttggagttgggaactgtaccttgtctcagacaaaggatgtgattgtggtagtagaatcagttaaggaccctctcattgatataccgctgcataaaggcaagatggatgagacaaagcgccgaaagatagcctctttaagcataggatctgtgtgtataggggttctgatcctcacatcttcagcctctgccacatggttgccttttctcccgatatgtattggctgcatcattggagttgtgctccttctggctggcctcagtttgctctcctggatcgaccaagatgctggcaggcactcttttggtcattctggaggattcacatgcccttttgttccagtgctgccagttttgtgcatcctgataaatacgtatctgttgataaacctgggtggtgacacatggatgagagttggcatatggctgctgatgggtgttctcctgtacattttctacggacgaacccacagctccctaacagatgtcgtctacgttccagtagcgcaggctgatgagatgtacaggagttcatcaggatatgtatcatagaaaagaacagccgcagttacttcaaggtggttggtcattcagttgtagataattggttatcaaccaggaaagaggggaattggctgttatttctttcatgcttggccaacaagatctcgtggatgcaactttgcaagatatatatgatgttcacgagcctggtcaatttacacattgtttgttggagtgtgcgtagatgtggtgtatataaacccagctgggtggaatgatgtggtacataatttatgcaattcatgtaaaagccctttctacctttctactgaaatgggagagcatttaaagggcatattgaaacagtacatgaatggcaagagaagctacctttttttatatctttt

SEQ ID NO: 4871 - DNA, 3375 bp, Zea Mays
cgacaccagacgagagggaacctcgagccaagaaagcgagagggggaagctgcggccgccggccgagcgagctcgccgtccccatccacccctctcactctcctcttcctcctctctgtctttcgctccgtccagccgccgcgtaatccgcggaaccagatgccctcatccgccctctgatcgaatcccgcgagaaaggccggttctctgtcctgccgtgccggcgatcttgatggcattggaggcggggagcagcggctgcggcgggaggggatggggcggcgggttccggagcctgatgcggcggaagcaggtggactccgaccggatccgcgccgagggccagccgcagctcgccaaggagctcaacgtgccggagctggtcgccatcggagttggttccacagttggagcaggagtatatgttcttgtgggaataattgctagggagcacgctggtccagcattgacaatttcatttctgatagctggaatagcagccacactttcagctttctgttatgctgagcttgctagtcgttgcccctctgctggaagtgcctaccattattcatacatctgtgttggagaaggtgttgcctggttgattggctgggctctagtgctggaatatactattggtggatctgctgttgcccgtggtatatctccaaacttagccttgttttttggaggacaggatagtctgccatggattttagcacgccatcagcttccatggtttggtatcattattgatccctgtgcagctgctcttgtttgtgttgtgactgttttactctgcatgggaattaaagagagttcatttgcacaaggagttgtaacagttctgaatgcttttgtaatgatatttgttattgtagctggtagttatattggcttccaaataggatgggtcggctacaaggattctgatgggtatttcccatatggagtaaatggaatgcttgctggatcagcaactgttttctttgcatacataggctttgatacagttgctagtacagctgaagaggttaggaatccacagagagatcttccattgggaatcggagtagcgttggctatttgttgtgcattgtatatggctgtttctgttgttattgttgggctggtaccatattttgccatggacccagatactcctatttcatctgcctttgcaaaacatggaatgcaatgggccatgtatgttgtgacaactggtgctgttcttgcactctgctcgaacttgatgggctcacttcttccacaggtatacagtgataaaacataaaagtatattatgacttactcctgatgacacccagtggatgaaattgaatggaatttgagttgattctactattctagtacatgtgaacttttcattccactgtcagttactctgcaataagttgtgaacctagccttgtaagtggccaaaactcaatgactcctgacccttattgtataatttatctgttcttcggtttgcactttggattcctcatttaactcaacattatccatcaattacattgccccccattcattcattttgaatttaaatcccattgaactaatgctgcaatgaactttgattcccatgccacatctatgagcgaagatgtaggcatgtagtactatggtgaaccacatcagcactatgcagatgatattttaatacttggtgtcattatgatttgaattgttattctcgcagcctagaatacttatggccatggcacgagatggcctgttgccatccttcttctctgatgttaacaagcaaactcaagtacctgttaagagcacaattgtgacaggcatctgtgcagctgctctggcttttacaatggatgtctcacagttagcaggaatggtaaggaaccagctatctgtgattgtttgtgttggtggagaagacacaggtttgggagattttctctattacttaggccacactaaccatgtctggttatagttacatatataggaccaagtggtctgttgcaactgaaagtagagataagattacaactactaaagtagagataaggtagaagataagatgctatatctagatgccataacataggcactaactactgctactactactacttatcctagagatggagctccaaagtaccaagaacacaagggttattcttatggtttgtctagtcatagccattttcacaacaatggactatggaagagagagttccttcaggactgtacatacacacaagcaatacaaatcataaggtggagtgaaataaaaaatatgttcttttggttgcaggtcagtgtaggcacactccttgcattcaccgtagttgctgtttcgatcttgatactcagatatgtccctccagatgaggtccctttgccaccctctctgcaagaatcattccgtttgaaccaggaatgcgatgaggaaagggacagggctcttcttggagttgggaactgtaccttgtctcagacaaaggatgtgattgtggtagtagaatcagttaaggaccctctcattgatataccgctgcataaaggcaagatggatgagacaaagcgccgaaagatagcctctttaagcataggatctgtgtgtataggggttctgatcctcacatcttcagcctctgccacatggttgccttttctcccgatatgtattggctgcatcattggagttgtgctccttctggctggcctcagtttgctctcctggatcgaccaagatgctggcaggcactcttttggtcattctggaggattcacatgcccttttgttccagtgctgccagttttgtgcatcctgataaatacgtatctgttgataaacctgggtggtgacacatggatgagagttggcatatggctgctgatgggtgttctcctgtacattttctacggacgaacccacagctccctaacagatgtcgtctacgttccagtagcgcaggctgatgagatgtacaggagttcatcaggatatgtatcatagaaaagaacagccgcagttacttcaaggtggttggtcattcagttgtagataattggttatcaaccaggaaagaggggaattggctgttatttctttcatgcttggccaacaagatctcgtggatgcaactttgcaagatatatatgatgttcacgagcctggtcaatttacacattgtttgttggagtgtgcgtagatgtggtgtatataaacccagctgggtggaatgatgtggtacataatttatgcaattcatgtaaaagccctttctacctttctactgaaatgggagagcatttaaagggcatattgaaacagtacatgaatggcaagagaagctacctttttttatatctttt

SEQ ID NO: 4872 - DNA, 2425 bp, Zea Mays
cgagagggaacctcgagccaagaaagcgagagggggaagctgcggccgccggccgagcgagctcgccgtccccatccacccctctcactctcctcttcctcctctctgtctttcgctccgtccagccgccgcgtaatccgcggaaccagatgccctcatccgccctctgatcgaatcccgcgagaaaggccggttctctgtcctgccgtgccggcgatcttgatggcattggaggcggggagcagcggctgcggcgggaggggatggggcggcgggttccggagcctgatgcggcggaagcaggtggactccgaccggatccgcgccgagggccagccgcagctcgccaaggagctcaacgtgccggagctggtcgccatcggagttggttccacagttggagcaggagtatatgttcttgtgggaataattgctagggagcacgctggtccagcattgacaatttcatttctgatagctggaatagcagccacactttcagctttctgttatgctgagcttgctagtcgttgcccctctgctggaagtgcctaccattattcatacatctgtgttggagaaggtgttgcctggttgattggctgggctctagtgctggaatatactattggtggatctgctgttgcccgtggtatatctccaaacttagccttgttttttggaggacaggatagtctgccatggattttagcacgccatcagcttccatggtttggtatcattattgatccctgtgcagctgctcttgtttgtgttgtgactgttttactctgcatgggaattaaagagctggtagttatattggcttccaaataggatgggtcggctacaaggattctgatgggtatttcccatatggagtaaatggaatgcttgctggatcagcaactgttttctttgcatacataggctttgatacagttgctagtacagctgaagaggttaggaatccacagagagatcttccattgggaatcggagtagcgttggctatttgttgtgcattgtatatggctgtttctgttgttattgttgggctggtaccatattttgccatggacccagatactcctatttcatctgcctttgcaaaacatggaatgcaatgggccatgtatgttgtgacaactggtgctgttcttgcactctgctcgaacttgatgggctcacttcttccacagcctagaatacttatggccatggcacgagatggcctgttgccatccttcttctctgatgttaacaagcaaactcaagtacctgttaagagcacaattgtgacaggcatctgtgcagctgctctggcttttacaatggatgtctcacagttagcaggaatggtcagtgtaggcacactccttgcattcaccgtagttgctgtttcgatcttgatactcagatatgtccctccagatgaggtccctttgccaccctctctgcaagaatcattccgtttgaaccaggaatgcgatgaggaaagggacagggctcttcttggagttgggaactgtaccttgtctcagacaaaggatgtgattgtggtagtagaatcagttaaggaccctctcattgatataccgctgcataaaggcaagatggatgagacaaagcgccgaaagatagcctctttaagcataggatctgtgtgtataggggttctgatcctcacatcttcagcctctgccacatggttgccttttctcccgatatgtattggctgcatcattggagttgtgctccttctggctggcctcagtttgctctcctggatcgaccaagatgctggcaggcactcttttggtcattctggaggattcacatgcccttttgttccagtgctgccagttttgtgcatcctgataaatacgtatctgttgataaacctgggtggtgacacatggatgagagttggcatatggctgctgatgggtgttctcctgtacattttctacggacgaacccacagctccctaacagatgtcgtctacgttccagtagcgcaggctgatgagatgtacaggagttcatcaggatatgtatcatagaaaagaacagccgcagttacttcaaggtggttggtcattcagttgtagataattggttatcaaccaggaaagaggggaattggctgttatttctttcatgcttggccaacaagatctcgtggatgcaactttgcaagatatatatgatgttcacgagcctggtcaatttacacattgtttgttggagtgtgcgtagatgtggtgtatataaacccagctgggtggaatgatgtggtacataatttatgcaattcatgtaaaagccctttctacctttctactgaaatgggagagcatttaaagggcatattgaaacagtacatgaatggcaagagaagctacctttttttatatctttt

SEQ ID NO: 4873 - DNA, 2647 bp, Zea Mays
cgagagggaacctcgagccaagaaagcgagagggggaagctgcggccgccggccgagcgagctcgccgtccccatccacccctctcactctcctcttcctcctctctgtctttcgctccgtccagccgccgcgtaatccgcggaaccagatgccctcatccgccctctgatcgaatcccgcgagaaaggccggttctctgtcctgccgtgccggcgatcttgatggcattggaggcggggagcagcggctgcggcgggaggggatggggcggcgggttccggagcctgatgcggcggaagcaggtggactccgaccggatccgcgccgagggccagccgcagctcgccaaggagctcaacgtgccggagctggtcgccatcggagttggttccacagttggagcaggagtatatgttcttgtgggaataattgctagggagcacgctggtccagcattgacaatttcatttctgatagctggaatagcagccacactttcagctttctgttatgctgagcttgctagtcgttgcccctctgctggaagtgcctaccattattcatacatctgtgttggagaaggtgttgcctggttgattggctgggctctagtgctggaatatactattggtggatctgctgttgcccgtggtatatctccaaacttagccttgttttttggaggacaggatagtctgccatggattttagcacgccatcagcttccatggtttggtatcattattgatccctgtgcagctgctcttgtttgtgttgtgactgttttactctgcatgggaattaaagagagttcatttgcacaaggagttgtaacagttctgaatgcttttgtaatgatatttgttattgtagctggtagttatattggcttccaaataggatgggtcggctacaaggattctgatgggtatttcccatatggagtaaatggaatgcttgctggatcagcaactgttttctttgcatacataggctttgatacagttgctagtacagctgaagaggttaggaatccacagagagatcttccattgggaatcggagtagcgttggctatttgttgtgcattgtatatggctgtttctgttgttattgttgggctggtaccatattttgccatggacccagatactcctatttcatctgcctttgcaaaacatggaatgcaatgggccatgtatgttgtgacaactggtgctgttcttgcactctgctcgaacttgatgggctcacttcttccacaggtatacagtgataaaacataaaagtatattatgacttactcctgatgacacccagtggatgaaattgaatggaatttgagttgattctactattctagtacatgtgaacttttcattccactgtcagttactctgcaataagttgtgaacctagccttcctagaatacttatggccatggcacgagatggcctgttgccatccttcttctctgatgttaacaagcaaactcaagtacctgttaagagcacaattgtgacaggcatctgtgcagctgctctggcttttacaatggatgtctcacagttagcaggaatggtcagtgtaggcacactccttgcattcaccgtagttgctgtttcgatcttgatactcagatatgtccctccagatgaggtccctttgccaccctctctgcaagaatcattccgtttgaaccaggaatgcgatgaggaaagggacagggctcttcttggagttgggaactgtaccttgtctcagacaaaggatgtgattgtggtagtagaatcagttaaggaccctctcattgatataccgctgcataaaggcaagatggatgagacaaagcgccgaaagatagcctctttaagcataggatctgtgtgtataggggttctgatcctcacatcttcagcctctgccacatggttgccttttctcccgatatgtattggctgcatcattggagttgtgctccttctggctggcctcagtttgctctcctggatcgaccaagatgctggcaggcactcttttggtcattctggaggattcacatgcccttttgttccagtgctgccagttttgtgcatcctgataaatacgtatctgttgataaacctgggtggtgacacatggatgagagttggcatatggctgctgatgggtgttctcctgtacattttctacggacgaacccacagctccctaacagatgtcgtctacgttccagtagcgcaggctgatgagatgtacaggagttcatcaggatatgtatcatagaaaagaacagccgcagttacttcaaggtggttggtcattcagttgtagataattggttatcaaccaggaaagaggggaattggctgttatttctttcatgcttggccaacaagatctcgtggatgcaactttgcaagatatatatgatgttcacgagcctggtcaatttacacattgtttgttggagtgtgcgtagatgtggtgtatataaacccagctgggtggaatgatgtggtacataatttatgcaattcatgtaaaagccctttctacctttctactgaaatgggagagcatttaaagggcatattgaaacagtacatgaatggcaagagaagctacctttttttatatctttt

SEQ ID NO: 4874 - DNA, 2951 bp, Zea Mays
cgagagggaacctcgagccaagaaagcgagagggggaagctgcggccgccggccgagcgagctcgccgtccccatccacccctctcactctcctcttcctcctctctgtctttcgctccgtccagccgccgcgtaatccgcggaaccagatgccctcatccgccctctgatcgaatcccgcgagaaaggccggttctctgtcctgccgtgccggcgatcttgatggcattggaggcggggagcagcggctgcggcgggaggggatggggcggcgggttccggagcctgatgcggcggaagcaggtggactccgaccggatccgcgccgagggccagccgcagctcgccaaggagctcaacgtgccggagctggtcgccatcggagttggttccacagttggagcaggagtatatgttcttgtgggaataattgctagggagcacgctggtccagcattgacaatttcatttctgatagctggaatagcagccacactttcagctttctgttatgctgagcttgctagtcgttgcccctctgctggaagtgcctaccattattcatacatctgtgttggagaaggtgttgcctggttgattggctgggctctagtgctggaatatactattggtggatctgctgttgcccgtggtatatctccaaacttagccttgttttttggaggacaggatagtctgccatggattttagcacgccatcagcttccatggtttggtatcattattgatccctgtgcagctgctcttgtttgtgttgtgactgttttactctgcatgggaattaaagagagttcatttgcacaaggagttgtaacagttctgaatgcttttgtaatgatatttgttattgtagctggtagttatattggcttccaaataggatgggtcggctacaaggattctgatgggtatttcccatatggagtaaatggaatgcttgctggatcagcaactgttttctttgcatacataggctttgatacagttgctagtacagctgaagaggttaggaatccacagagagatcttccattgggaatcggagtagcgttggctatttgttgtgcattgtatatggctgtttctgttgttattgttgggctggtaccatattttgccatggacccagatactcctatttcatctgcctttgcaaaacatggaatgcaatgggccatgtatacagtgataaaacataaaagtatattatgacttactcctgatgacacccagtggatgaaattgaatggaatttgagttgattctactattctagtacatgtgaacttttcattccactgtcagttactctgcaataagttgtgaacctagccttgtaagtggccaaaactcaatgactcctgacccttattgtataatttatctgttcttcggtttgcactttggattcctcatttaactcaacattatccatcaattacattgccccccattcattcattttgaatttaaatcccattgaactaatgctgcaatgaactttgattcccatgccacatctatgagcgaagatgtaggcatgtagtactatggtgaaccacatcagcactatgcagatgatattttaatacttggtgtcattatgatttgaattgttattctcgcagcctagaatacttatggccatggcacgagatggcctgttgccatccttcttctctgatgttaacaagcaaactcaagtacctgttaagagcacaattgtgacaggcatctgtgcagctgctctggcttttacaatggatgtctcacagttagcaggaatgagatggagctccaaagtaccaagaacacaagggttattcttatggtttgtctagtcatagccattttcacaacaatggactatggaagagagagttccttcaggactgtacatacacacaagcaatacaaatcataagatatgtccctccagatgaggtccctttgccaccctctctgcaagaatcattccgtttgaaccaggaatgcgatgaggaaagggacagggctcttcttggagttgggaactgtaccttgtctcagacaaaggatgtgattgtggtagtagaatcagttaaggaccctctcattgatataccgctgcataaaggcaagatggatgagacaaagcgccgaaagatagcctctttaagcataggatctgtgtgtataggggttctgatcctcacatcttcagcctctgccacatggttgccttttctcccgatatgtattggctgcatcattggagttgtgctccttctggctggcctcagtttgctctcctggatcgaccaagatgctggcaggcactcttttggtcattctggaggattcacatgcccttttgttccagtgctgccagttttgtgcatcctgataaatacgtatctgttgataaacctgggtggtgacacatggatgagagttggcatatggctgctgatgggtgttctcctgtacattttctacggacgaacccacagctccctaacagatgtcgtctacgttccagtagcgcaggctgatgagatgtacaggagttcatcaggatatgtatcatagaaaagaacagccgcagttacttcaaggtggttggtcattcagttgtagataattggttatcaaccaggaaagaggggaattggctgttatttctttcatgcttggccaacaagatctcgtggatgcaactttgcaagatatatatgatgttcacgagcctggtcaatttacacattgtttgttggagtgtgcgtagatgtggtgtatataaacccagctgggtggaatgatgtggtacataatttatgcaattcatgtaaaagccctttctacctttctactgaaatgggagagcatttaaagggcatattgaaacagtacatgaatggcaagagaagctacctttttttatatctttt

SEQ ID NO: 4875 - DNA, 2814 bp, Zea Mays
ctggttttaattgattgtgatatatgttgacataggttagtgcctcttatgagcaggctctgatggatgcccgaaagcagattgaacgagagatggaacgatttaaagtatgtgagaaggaaacaaaaactaaggccttctcaaaagaagggttaggtcagcaaccaaaaacagatcccaaagaaaaggccaaagctgaaacaagagactggcttaataatgtggttagtgatttggaaagccagattgataacttcgaagcagagattgaaggactttcaattaaaaagggaaaacaaagaccgcctcgattggtacatttagagaagtctattacgagacataaagctcatataaagaaattggagtcaatcttgagacttttggataatgatgagttgagtcctgagcaagtcaatgatgttaaagattttcttgatgattatgttgaacgtaatcaggaagactttgatgaattcagtgatgttgaggacctctatagcacattgcctatggagaaggttgaagcacttgaagacatggtttcacttgctccttctagtcttgtcaagggtgttgcttctgttccgactactgcagtttcgagtacaaagagttcgattgcaacttcacttactcagcctacagtatcaacagctccttcacaaagtacatcacaagatcaaacagaggacacagcttcccaagaaagcaatagtgaatctgtgccacaaacaccacctccaaaaggtggaaattctggaccttcaataccagctgtgccaattgctgtcagtactggtagtgcagctatttctgtacttgcagaaacaattagttcccctgtgcgaccaattgttcccaccacagtggctacaatactttcttctgctattccacgaagtgctcctgagaatacatctacggttacctcaattcctgcaaacttatctatcaccttgaaggatgatgaaagcatgagttttcctccacgacgaccatctcctgctattactgaaattggaattggcaggggcatagctcgaggaacaactagtcaggcattaggtacagctcccataactattggtccagtcccaggaaatggatcggttagtgcacttcctggaataaatgacttgtccaaaagaaatatattgaacactgacgagaagattaacagtggtggtctttctcagcagttggttatgcctcttggtagtaaagttcaaccccagcaggttcccaggactaatgatgcaattagctctgaatctgctaacacaaatgaaagccctattctcggtggaagagtattttctcctccagttgtttctggggttcaatggagacctctaggtgctgctgcatttcaaaatcaaagtgaaattagtcattttcgtggaaggcctgagatttctgctgatcacagggagaagtacatacaaagactgcagcaagtacagcagcaaggtggcagccttctgaacgtttctcatataactggcataaatcagaagcaatttccaacacagcagccaaatccccttctacaacagtttgtttatgcagtttaattcacagagttcctctatatcttcccaagtgaatcttggagttcaaggaacagatgctgggcatataaaaagtgaagaagaagaacaacttttggctgaagatggtgtggaatcttctgcaacaacaggagcaaataaacaaacaagtgaagatgacacaaagattccatattcgaatccttcagcacctgcagcagaaagcaatcagctgcctagggatactgatccatcacctgggcagcctttgcaacctggaatgtcatcatctggtgttggtgttatcggccgaagaagtgtatctgatcttggtgcaatcggagataaccttactggaacttctgctagttctggtcatgatcagctttataacctgcaaatgctagaagctgcattccacaagcttccacaaccaaaggactctgagcgtgctaaaacttacatcccgcggcaccctgcagttacccctgctagctatccccaagttcagccatcaattgtatctcatccctccttctgggaaagaattggtagcgacacattagctaccgacatgctattctttgcgttctattaccagcagaacacatatcaacaatacatggctgctagagaattgaagaagcaatcgtggagatttcaccggaggtacaatacctggttccagcggcatgtggagccacaggttacgactgatgagtatgagcggggatcatatgtatactttgatttccatgtcaccgaggatggctcaggatggtgccaaagaatcaagaatgacttcacattcgagtacaacttcttggaggatgagctatcagtacaaacaaactaaagtgggctgtaggtctaatcaaaccattctgtccattgtgaattttgtagttctcatgaggtgactgacttataatctggactcttgtaaaattctccagctgtaaactaatggtgaagttggagagcattccttgtaggttctgatgcaccgaacatgctgaaattagaatcgggttgtgccagtcaaatatatttgactccgctgtatattgtcgttctcatctgctttagcagcaacaattaagtcagcttagttctaaagctacagtggagttaaaacccccaacaaaagcacaaaataagtttcagggcataactgtttttcatttgttcatgtttaaggctaaggcacatgaataactgttttttattccttatttaaggctaaatttttagatatatt

SEQ ID NO: 4876 - DNA, 2794 bp, Zea Mays
ctggttttaattgattgtgatatatgttgacataggttagtgcctcttatgagcaggctctgatggatgcccgaaagcagattgaacgagagatggaacgatttaaagtatgtgagaaggaaacaaaaactaaggccttctcaaaagaagggttaggtcagcaaccaaaaacagatcccaaagaaaaggccaaagctgaaacaagagactggcttaataatgtggttagtgatttggaaagccagattgataacttcgaagcagagattgaaggactttcaattaaaaagggaaaacaaagaccgcctcgattggtacatttagagaagtctattacgagacataaagctcatataaagaaattggagtcaatcttgagacttttggataatgatgagttgagtcctgagcaagtcaatgatgttaaagattttcttgatgattatgttgaacgtaatcaggaagactttgatgaattcagtgatgttgaggacctctatagcacattgcctatggagaaggttgaagcacttgaagacatggtttcacttgctccttctagtcttgtcaagggtgttgcttctgttccgactactgcagtttcgagtacaaagagttcgattgcaacttcacttactcagtatcaacagctccttcacaaagtacatcacaagatcaaacagaggacacagcttcccaagaaagcaatagtgaatctgtgccacaaacaccacctccaaaaggtggaaattctggaccttcaataccagctgtgccaattgctgtcagtactggtagtgcagctatttctgtacttgcagaaacaattagttcccctgtgcgaccaattgttcccaccacagtggctacaatactttcttctgctattccacgaagtgctcctgagaatacatctacggttacctcaattcctgcaaacttatctatcaccttgaaggatgatgaaagcatgagttttcctccacgacgaccatctcctgctattactgaaattggaattggcaggggcatagctcgaggaacaactagtcaggcattaggtacagctcccataactattggtccagtcccaggaaatggatcggttagtgcacttcctggaataaatgacttgtccaaaagaaatatattgaacactgacgagaagattaacagtggtggtctttctcagcagttggttatgcctcttggtagtaaagttcaaccccagcaggttcccaggactaatgatgcaattagctctgaatctgctaacacaaatgaaagccctattctcggtggaagagtattttctcctccagttgtttctggggttcaatggagacctctaggtgctgctgcatttcaaaatcaaagtgaaattagtcattttcgtggaaggcctgagatttctgctgatcacagggagaagtacatacaaagactgcagcaagtacagcagcaaggtggcagccttctgaacgtttctcatataactggcataaatcagaagcaatttccaacacagcagccaaatccccttctacaacagtttaattcacagagttcctctatatcttcccaagtgaatcttggagttcaaggaacagatgctgggcatataaaaagtgaagaagaagaacaacttttggctgaagatggtgtggaatcttctgcaacaacaggagcaaataaacaaacaagtgaagatgacacaaagattccatattcgaatccttcagcacctgcagcagaaagcaatcagctgcctagggatactgatccatcacctgggcagcctttgcaacctggaatgtcatcatctggtgttggtgttatcggccgaagaagtgtatctgatcttggtgcaatcggagataaccttactggaacttctgctagttctggtcatgatcagctttataacctgcaaatgctagaagctgcattccacaagcttccacaaccaaaggactctgagcgtgctaaaacttacatcccgcggcaccctgcagttacccctgctagctatccccaagttcagccatcaattgtatctcatccctccttctgggaaagaattggtagcgacacattagctaccgacatgctattctttgcgttctattaccagcagaacacatatcaacaatacatggctgctagagaattgaagaagcaatcgtggagatttcaccggaggtacaatacctggttccagcggcatgtggagccacaggttacgactgatgagtatgagcggggatcatatgtatactttgatttccatgtcaccgaggatggctcaggatggtgccaaagaatcaagaatgacttcacattcgagtacaacttcttggaggatgagctatcagtacaaacaaactaaagtgggctgtaggtctaatcaaaccattctgtccattgtgaattttgtagttctcatgaggtgactgacttataatctggactcttgtaaaattctccagctgtaaactaatggtgaagttggagagcattccttgtaggttctgatgcaccgaacatgctgaaattagaatcgggttgtgccagtcaaatatatttgactccgctgtatattgtcgttctcatctgctttagcagcaacaattaagtcagcttagttctaaagctacagtggagttaaaacccccaacaaaagcacaaaataagtttcagggcataactgtttttcatttgttcatgtttaaggctaaggcacatgaataactgttttttattccttatttaaggctaaatttttagatatatt

SEQ ID NO: 4877 - DNA, 2711 bp, Zea Mays
ctggttttaattgattgtgatatatgttgacataggttagtgcctcttatgagcaggctctgatggatgcccgaaagcagattgaacgagagatggaacgatttaaagtatgtgagaaggaaacaaaaactaaggccttctcaaaagaagggttaggtcagcaaccaaaaacagatcccaaagaaaaggccaaagctgaaacaagagactggcttaataatgtggttagtgatttggaaagccagattgataacttcgaagcagagattgaaggactttcaattaaaaagggaaaacaaagaccgcctcgattggtacatttagagaagtctattacgagacataaagctcatataaagaaattggagtcaatcttgagacttttggataatgatgagttgagtcctgagcaagtcaatgatgttaaagattttcttgatgattatgttgaacgtaatcaggaagactttgatgaattcagtgatgttgaggacctctatagcacattgcctatggagaaggttgaagcacttgaagacatggtttcacttgctccttctagtcttgtcaagggtgttgcttctgttccgactactgcagtttcgagtacaaagagttcgattgcaacttcacttactcagcctacagtatcaacagctccttcacaaagtacatcacaagatcaaacagaggacacagcttcccaagaaagcaatagtgaatctgtgccacaaacaccacctccaaaaggtggaaattctggaccttcaataccagctgtgccaattgctgtcagtactggtagtgcagctatttctgtacttgcagaaacaattagttcccctgtgcgaccaattgttcccaccacagtggctacaatactttcttctgctattccacgaagtgctcctgagaatacatctacggttacctcaattcctgcaaacttatctatcaccttgaaggatgatgaaagcatgagttttcctccacgacgaccatctcctgctattactgaaattggaattggcaggggcatagctcgaggaacaactagtcaggcattaggtacagctcccataactattggtccagtcccaggaaatggatcgttggttatgcctcttggtagtaaagttcaaccccagcaggttcccaggactaatgatgcaattagctctgaatctgctaacacaaatgaaagccctattctcggtggaagagtattttctcctccagttgtttctggggttcaatggagacctctaggtgctgctgcatttcaaaatcaaagtgaaattagtcattttcgtggaaggcctgagatttctgctgatcacagggagaagtacatacaaagactgcagcaagtacagcagcaaggtggcagccttctgaacgtttctcatataactggcataaatcagaagcaatttccaacacagcagccaaatccccttctacaacagtttaattcacagagttcctctatatcttcccaagtgaatcttggagttcaaggaacagatgctgggcatataaaaagtgaagaagaagaacaacttttggctgaagatggtgtggaatcttctgcaacaacaggagcaaataaacaaacaagtgaagatgacacaaagattccatattcgaatccttcagcacctgcagcagaaagcaatcagctgcctagggatactgatccatcacctgggcagcctttgcaacctggaatgtcatcatctggtgttggtgttatcggccgaagaagtgtatctgatcttggtgcaatcggagataaccttactggaacttctgctagttctggtcatgatcagctttataacctgcaaatgctagaagctgcattccacaagcttccacaaccaaaggactctgagcgtgctaaaacttacatcccgcggcaccctgcagttacccctgctagctatccccaagttcagccatcaattgtatctcatccctccttctgggaaagaattggtagcgacacattagctaccgacatgctattctttgcgttctattaccagcagaacacatatcaacaatacatggctgctagagaattgaagaagcaatcgtggagatttcaccggaggtacaatacctggttccagcggcatgtggagccacaggttacgactgatgagtatgagcggggatcatatgtatactttgatttccatgtcaccgaggatggctcaggatggtgccaaagaatcaagaatgacttcacattcgagtacaacttcttggaggatgagctatcagtacaaacaaactaaagtgggctgtaggtctaatcaaaccattctgtccattgtgaattttgtagttctcatgaggtgactgacttataatctggactcttgtaaaattctccagctgtaaactaatggtgaagttggagagcattccttgtaggttctgatgcaccgaacatgctgaaattagaatcgggttgtgccagtcaaatatatttgactccgctgtatattgtcgttctcatctgctttagcagcaacaattaagtcagcttagttctaaagctacagtggagttaaaacccccaacaaaagcacaaaataagtttcagggcataactgtttttcatttgttcatgtttaaggctaaggcacatgaataactgttttttattccttatttaaggctaaatttttagatatatt

SEQ ID NO: 4878 - DNA, 2191 bp, Zea Mays
ttatttattttgatggtttgtggatttctcatatttgataaataaatgccatctttgcttcttttaatatcaaagtgttagtattcccatcagcatttgcggggggagcctctgacactagcctacagtatcaacagctccttcacaaagtacatcacaagatcaaacagaggacacagcttcccaagaaagcaatagtgaatctgtgccacaaacaccacctccaaaaggtggaaattctggaccttcaataccagctgtgccaattgctgtcagtactggtagtgcagctatttctgtacttgcagaaacaattagttcccctgtgcgaccaattgttcccaccacagtggctacaatactttcttctgctattccacgaagtgctcctgagaatacatctacggttacctcaattcctgcaaacttatctatcaccttgaaggatgatgaaagcatgagttttcctccacgacgaccatctcctgctattactgaaattggaattggcaggggcatagctcgaggaacaactagtcaggcattaggtacagctcccataactattggtccagtcccaggaaatggatcgttggttatgcctcttggtagtaaagttcaaccccagcaggttcccaggactaatgatgcaattagctctgaatctgctaacacaaatgaaagccctattctcggtggaagagtattttctcctccagttgtttctggggttcaatggagacctctaggtgctgctgcatttcaaaatcaaagtgaaattagtcattttcgtggaaggcctgagatttctgctgatcacagggagaagtacatacaaagactgcagcaagtacagcagcaaggtggcagccttctgaacgtttctcatataactggcataaatcagaagcaatttccaacacagcagccaaatccccttctacaacagtttaattcacagagttcctctatatcttcccaagtgaatcttggagttcaaggaacagatgctgggcatataaaaagtgaagaagaagaacaacttttggctgaagatggtgtggaatcttctgcaacaacaggagcaaataaacaaacaagtgaagatgacacaaagattccatattcgaatccttcagcacctgcagcagaaagcaatcagctgcctagggatactgatccatcacctgggcagcctttgcaacctggaatgtcatcatctggtgttggtgttatcggccgaagaagtgtatctgatcttggtgcaatcggagataaccttactggaacttctgctagttctggtcatgatcagctttataacctgcaaatgctagaagctgcattccacaagcttccacaaccaaaggactctgagcgtgctaaaacttacatcccgcggcaccctgcagttacccctgctagctatccccaagttcagccatcaattgtatctcatccctccttctgggaaagaattggtagcgacacattagctaccgacatgctattctttgcgttctattaccagcagaacacatatcaacaatacatggctgctagagaattgaagaagcaatcgtggagatttcaccggaggtacaatacctggttccagcggcatgtggagccacaggttacgactgatgagtatgagcggggatcatatgtatactttgatttccatgtcaccgaggatggctcaggatggtgccaaagaatcaagaatgacttcacattcgagtacaacttcttggaggatgagctatcagtacaaacaaactaaagtgggctgtaggtctaatcaaaccattctgtccattgtgaattttgtagttctcatgaggtgactgacttataatctggactcttgtaaaattctccagctgtaaactaatggtgaagttggagagcattccttgtaggttctgatgcaccgaacatgctgaaattagaatcgggttgtgccagtcaaatatatttgactccgctgtatattgtcgttctcatctgctttagcagcaacaattaagtcagcttagttctaaagctacagtggagttaaaacccccaacaaaagcacaaaataagtttcagggcataactgtttttcatttgttcatgtttaaggctaaggcacatgaataactgttttttattccttatttaaggctaaatttttagatatatt

SEQ ID NO: 4879 - DNA, 2147 bp, Zea Mays
ttatttattttgatggtttgtggatttctcatatttgataaataaatgccatctttgcttcttttaatatcaaagtgttagtattcccatcagcatttgcggggggagcctctgacactagcctacagtatcaacagctccttcacaaagtacatcacaagatcaaacagaggacacagcttcccaagaaagcaatagtgaatctgtgccacaaacaccacctccaaaaggtggaaattctggaccttcaataccagctgtgccaattgctgtcagtactggtagtgcagctatttctgtacttgcagaaacaattagttcccctgtgcgaccaattgttcccaccacagtggctacaatactttcttctgctattccacgaagtgctcctgagaatacatctacggttacctcaattcctgcaaacttatctatcaccttgaaggatgatgaaagcatgagttttcctccacgacgaccatctcctgctattactgaaattggaattggcaggggcatagctcgaggaacaactagtcaggcattagttggttatgcctcttggtagtaaagttcaaccccagcaggttcccaggactaatgatgcaattagctctgaatctgctaacacaaatgaaagccctattctcggtggaagagtattttctcctccagttgtttctggggttcaatggagacctctaggtgctgctgcatttcaaaatcaaagtgaaattagtcattttcgtggaaggcctgagatttctgctgatcacagggagaagtacatacaaagactgcagcaagtacagcagcaaggtggcagccttctgaacgtttctcatataactggcataaatcagaagcaatttccaacacagcagccaaatccccttctacaacagtttaattcacagagttcctctatatcttcccaagtgaatcttggagttcaaggaacagatgctgggcatataaaaagtgaagaagaagaacaacttttggctgaagatggtgtggaatcttctgcaacaacaggagcaaataaacaaacaagtgaagatgacacaaagattccatattcgaatccttcagcacctgcagcagaaagcaatcagctgcctagggatactgatccatcacctgggcagcctttgcaacctggaatgtcatcatctggtgttggtgttatcggccgaagaagtgtatctgatcttggtgcaatcggagataaccttactggaacttctgctagttctggtcatgatcagctttataacctgcaaatgctagaagctgcattccacaagcttccacaaccaaaggactctgagcgtgctaaaacttacatcccgcggcaccctgcagttacccctgctagctatccccaagttcagccatcaattgtatctcatccctccttctgggaaagaattggtagcgacacattagctaccgacatgctattctttgcgttctattaccagcagaacacatatcaacaatacatggctgctagagaattgaagaagcaatcgtggagatttcaccggaggtacaatacctggttccagcggcatgtggagccacaggttacgactgatgagtatgagcggggatcatatgtatactttgatttccatgtcaccgaggatggctcaggatggtgccaaagaatcaagaatgacttcacattcgagtacaacttcttggaggatgagctatcagtacaaacaaactaaagtgggctgtaggtctaatcaaaccattctgtccattgtgaattttgtagttctcatgaggtgactgacttataatctggactcttgtaaaattctccagctgtaaactaatggtgaagttggagagcattccttgtaggttctgatgcaccgaacatgctgaaattagaatcgggttgtgccagtcaaatatatttgactccgctgtatattgtcgttctcatctgctttagcagcaacaattaagtcagcttagttctaaagctacagtggagttaaaacccccaacaaaagcacaaaataagtttcagggcataactgtttttcatttgttcatgtttaaggctaaggcacatgaataactgttttttattccttatttaaggctaaatttttagatatatt

SEQ ID NO: 4880 - DNA, 2127 bp, Zea Mays
cctagtattcccatcagcgttactacttgaatttccattggttttgctactctattgcctacagtatcaacagctccttcacaaagtacatcacaagatcaaacagaggacacagcttcccaagaaagcaatagtgaatctgtgccacaaacaccacctccaaaaggtggaaattctggaccttcaataccagctgtgccaattgctgtcagtactggtagtgcagctatttctgtacttgcagaaacaattagttcccctgtgcgaccaattgttcccaccacagtggctacaatactttcttctgctattccacgaagtgctcctgagaatacatctacggttacctcaattcctgcaaacttatctatcaccttgaaggatgatgaaagcatgagttttcctccacgacgaccatctcctgctattactgaaattggaattggcaggggcatagctcgaggaacaactagtcaggcattaggtacagctcccataactattggtccagtcccaggaaatggatcgttggttatgcctcttggtagtaaagttcaaccccagcaggttcccaggactaatgatgcaattagctctgaatctgctaacacaaatgaaagccctattctcggtggaagagtattttctcctccagttgtttctggggttcaatggagacctctaggtgctgctgcatttcaaaatcaaagtgaaattagtcattttcgtggaaggcctgagatttctgctgatcacagggagaagtacatacaaagactgcagcaagtacagcagcaaggtggcagccttctgaacgtttctcatataactggcataaatcagaagcaatttccaacacagcagccaaatccccttctacaacagtttaattcacagagttcctctatatcttcccaagtgaatcttggagttcaaggaacagatgctgggcatataaaaagtgaagaagaagaacaacttttggctgaagatggtgtggaatcttctgcaacaacaggagcaaataaacaaacaagtgaagatgacacaaagattccatattcgaatccttcagcacctgcagcagaaagcaatcagctgcctagggatactgatccatcacctgggcagcctttgcaacctggaatgtcatcatctggtgttggtgttatcggccgaagaagtgtatctgatcttggtgcaatcggagataaccttactggaacttctgctagttctggtcatgatcagctttataacctgcaaatgctagaagctgcattccacaagcttccacaaccaaaggactctgagcgtgctaaaacttacatcccgcggcaccctgcagttacccctgctagctatccccaagttcagccatcaattgtatctcatccctccttctgggaaagaattggtagcgacacattagctaccgacatgctattctttgcgttctattaccagcagaacacatatcaacaatacatggctgctagagaattgaagaagcaatcgtggagatttcaccggaggtacaatacctggttccagcggcatgtggagccacaggttacgactgatgagtatgagcggggatcatatgtatactttgatttccatgtcaccgaggatggctcaggatggtgccaaagaatcaagaatgacttcacattcgagtacaacttcttggaggatgagctatcagtacaaacaaactaaagtgggctgtaggtctaatcaaaccattctgtccattgtgaattttgtagttctcatgaggtgactgacttataatctggactcttgtaaaattctccagctgtaaactaatggtgaagttggagagcattccttgtaggttctgatgcaccgaacatgctgaaattagaatcgggttgtgccagtcaaatatatttgactccgctgtatattgtcgttctcatctgctttagcagcaacaattaagtcagcttagttctaaagctacagtggagttaaaacccccaacaaaagcacaaaataagtttcagggcataactgtttttcatttgttcatgtttaaggctaaggcacatgaataactgttttttattccttatttaaggctaaatttttagatatatt

SEQ ID NO: 4881 - DNA, 3723 bp, Zea Mays
ctttcgactccagtcatgaattcgtgtagaagatgacacgcggatggttccaacttgtactgtacaggatgttttgccaacaggggcagaaattaagatgctacagcttgcgatctgaatcgaaggggaaggtgcaggaatgaaagtgcgatctcaatggaactggctgagcatctcagtcggtacaagtacaacatctgaagctgttttggattttggaactcggaaagggtgattttcttcccggttcttaccggacatcgatgaggcggccggtttgccagagcaattgcagcatcgttgcatacgctcagatcgcagttcgtcggctcctattcctccgttcgtgctttcagccaagccgttactgagaacaactcaggggacctgcgtcctctttccgagcaccctctgcgtcctggcggctatggcaagttcggcgctgaagaatctcgccaccggacggcccaacggcagagaggacatcatccgcctctgctccactggtcgcgtcaaggaggctctccaccgccgcttccgcgagggcctgtggtcggaacctggcctcttctcccacatcttccgggcatgccaagccctcccgctcctccgccagctgcacgccttcgccgccacgtctggcgccgccgccgaccggttcacggcgaatcacctcctcctagcttacgccgacctgggcgacttccccaccgcgcgcggcctgttcgagaggattcctaagcggaacgtcatgtcctggaacatcctcatcgggggatacgtcaagaacggtgacctggagaccgcgcgtaagctgttcgacgaaatgcccgcgaggaacgtggccacgtggaatgccatggtcgctgggctcaccaactcgggactcaacgaggagagcctggggttcttctttgccatgcggagggagggaatgcagcccgatgagtatggcctcgggagcttgttccggtgctgtgccgggctgagggacgttgtgtccgggcggcaggtccacgcgtacgttgtgcggtctggactagacagggacatgtgcgttgggagctccttggcacacatgtatatgcggtgtggttttcttcgagatggggaggctgctctccgagcattgccttcgcttaacattgtgtcgtgcaataccactatctctggaagaacacagaacggagacgcggaaggggcactcgagtttttctgcttgatgaggggtgctggtgtggaagcaaacgcagtcacattcgtcagcgccgttacttcttgctccgacttggcagctcttgcacaaggtcagcagattcacgcactggctatcaaaactggagttgacaaggttgtgccagtcatgacttctcttgtgcatatgtattctcgatgcgggtgcttaggtgactcagaaagggtttgccttgagtatagtggtacagatcttgtcctttgcagcgcgatgatctcagcttatggattccatgggcatggacaaaaggcagttggcctgttcaaacagatgatggctgcaggagcagaacccaatgaggttaccttcttgaccttgctatatgcatgcagccatagtggtcttaaagatgaaggcatgaattgttttgagcttatgactaagacttatggactgcaaccaagtgttaaacactacacttgtattgtggatctccttggacgttcaggttgcttaaatgaggcggaggaccttatcctgtcaatgcctgtgcaacctgatggggtcatatggaagacactactgtctgcatgtaagacccagaaaaagttcgacatggctgagaggatagcagaacgtgtcattgaattggaccctcatgattctgcctcatatgttcttctatcaaatattcgagctaccagcagcagatgggaggatgtcagtaaggtaagagaaaccatgagggaacagaacgtgaggaaagagcctggagttagctgggtggagctcaagggtcagattcaccaattctgcaccggagatgaatcccattcaaggcaaagggagattgttgaatgcttggaagaaatgatgaccaggatcaggcaatgtgggtatgcaccggacatgagcatggttttccatgacatggaggatgaggagaaagaagttagtttggctcaccacagtgagaaattggctatagcatttgcttttctgagcttacctgaaggagttcctattcgtgttatgaagaatctacgtgtatgtgatgattgccatgttgctattaagttgatgtctaaggttattggacgtgagattgtggtccgagatgttagccgttttcaccatttcaaagatggaaaatgctcctgtggagattattggtgacagtagcggagtgccatggaaatacttttttgcctcagttgagggaacaagacttttaacccctccatagtagtgtacctgagtgtaattgggatgctattctgatggcaggcttctggttgccagaaaaaaacagcagaatcaatgccatacttgagatttgagtcagtttgctagtttggtaacatcttcatcagaaccgaatttcttgatttgtagaagtggtccaaatacctgacgatcatcaactgacaatgctaaacagtagttcactagtactaaaggaagtcaaagatccaatccagcttacctcttgcataattttcattatgtgattaacaatcaccaggacagttgcaggggaaaactgatcaactaaatcttcaccaagattgccaaaggcactttgacaacaatttcggcacatttgtctaaaacatcattaacaagattccgaagtttctcagagtgttctatcatagaatatttgtactaccataatactacccccgttctcgaatatttgtcgcccgctggtttattttttgaactaatcggcgacaaataaaaaagaacggagggagtatatattattatcatggacctggccctaaggtcctcctctgttcctttcctcatcttcctcccccctcaatctcatgtgcttcctcttctctcaataaccttgcttcctctcttggttgctggtacagccctgctcaatctaccctgcttgtattcgtcgcctaggcggtcacctaattattctcaataaagttggggtatgccttaaataataaatctctgagtgttcagtgcaatgaactgttaattcaactaaagcatcagcttttatgttgatggttttccatgtcagctagcctctatttacaactaggctgcactggtctatttggattgtagaaaaatctcttccaccagtgattcgtcggtggattcagctcaattttattggaggcaatagttttagtaaattgtgcaatacctgaagtcaaactagagcaatcttatgaataatcatgttgttgctatcaaaattaaataaatttatctatgcttattggaggttgttgaacagtgaatgagttatcatagttgggcttactcatgatattgtttacattctttcgattcaatacaaacagcaccggaacccacttacgtagttagtgtccatatgagctactaatgtttcattgtcttcaggatgaacacccttttcagttttcaccctatcagagcttgtttaaagtgaagagcgcaagtctgggttttgtgatccccactagaggataatgaaggaacatgtgcctatcaggagcttatgaaag

SEQ ID NO: 4882 - DNA, 1229 bp, Zea Mays
agacacaacacggtcacgagcacagcgcgaagaggaggcaaccaacccctaccggacggtgcccgcacaccccccacgaacccacttcctcctccagttctcccggtcccgccgatatccagagagacggagcagagcaggcgaagcaagcgaaagccacaaccaccgcaaaagcgaaaggcggaggagcacaaggagatgagacgataccactagactaaagcaaagccgtgggcattagagagagacacagagagaaggcgcgtggggcggccggatggcgatgcacttcggcgagatcacgacggccttcccaggcggcggcggcattgccggggcgtccacggccaggacaacgccggcggcgagcccgtaccagtgccggatgatgatcgcatggccgcaagcatgtgtggctgcgtaccatgtcgcatatgcagagaacccgcagaaccctcagctgggcacgctgataccagaacatctgcgcgagctccaagcaatggctgcagatcaagatcgtcccagagttatccatttttctgatgacattgacaattcatagatccttccattctttcagtctttttcccccctgacccaagggggtagacacctcggcagcagacgtagacacgtcgttgcagtcttccagatgcatgatgatgggtgttgactgctcctgggctgcttgctggtgcagatgatagggtgtgctcagttctgtagatattgggcaagtggataactgagcaaaagaagtggttagatgtcgtataggtacagagtttagcaaagtaaacaaaaatgtagaattaaatacattgttttcagaatttcccggaggcgtgttcttgccctcgcactgacactgaacgctgttgcgattcctgtgccttttcatctgcttacgaggtggctctacgtggcaattgacatgcatcaggttcgaggatttttttttgccagtagaaatgtggaatgctcgtggctttgcttgcactaccaatttatcttttcctattcctaatcatgttggagttttttttggcagtaggatgctcgtgcccaattcattttccctattcctaatcaagttggaggagttttttttgccactagaatgcttgtggtaacaaaaagaaacatgtaagggcttgttcgttttgttcttaatccatgtggattgggtggaattggatgagtttcaatcccaaataagtcaaaat

SEQ ID NO: 4883 - DNA, 2213 bp, Zea Mays
tccagagagacggagcagagcaggcgaagcaagcgaaagccacaaccaccgcaaaagcgaaaggcggaggagcacaaggagatgagacgataccactagactaaagcaaagccgtgggcattagagagagacacagagagaaggcgcgtggggcggccggatggcgatgcacttcggcgagatcacgacggccttcccaggcggcggcggcattgccggggcgtccacggccaggacaacgccggcggcgagcccgtaccaggcggctgttgaaagtgaagagcaaatttattccccagcatttggcaacattgaggtccaggatagtcgtggttgctgcagtggtttcacaggcagtgtaacgaagttgctgttcatctttcatctgcttgctttcattgccctcacagcattcctaggcgtccaggcctcttaccaccagaaccctgcctacaagcccttctccaacttcatccctctggtatcctctgtcatagtatccacaattgctgcatgcttctgggttatccttgctgtcacaaacccgccaaaagccatcaagacctctctctgggctgcccctgtttctgcacttgcttgtgatgtagtcatacttcttgttggcaatactgctgcacttggcattggagcgcttgtagttgtattcgcaattgcagcaggattatacagttgttgggccactggcccacgtctcaagcatgcctctgatatgctttccgtttctgtcatcggtgcacatttaccgcctgctacttcatgccttgttgtctatgtccttcttgcaacgtttgggtatatggccttctggacagttgccatcagctgcattgctgctgcagaagggcacttcatggactaccggatggcttatgtggcagcacttctagtgagcatggcctggacaatgcaggtactgagatatattgtctatgtggcagtggcaaaactggcacatggacgtctcacctatggaattcacgtcctgggcggtgctgtcgaagcattctgtgacacgatatttggaccagcctttggggacatatgcatgggtgcagtggctgtgccggtgaactcagcggtgcggggattggctcgagcaatgaaaacagcggctgggggcaacgacgagttcattttgtcaggacagggctgctgctttgctgtatcagagaagatgctgggacgtgctaaccgttggggttttgtgcacgtgggggcgcgggggaaggcattctgtgtggcttcacgggatgtgtggtcgctttttgttctccgtgggattgcagagcttgttgattcagacctcactggttcgttttgcttcctttcttccgttacatcaggcgcattggcctcattggtttctggatcatgggcactagccatggataaggatcagaagaaactagctttgcccatatccatctatgcattcctgatcggttattatatgtgccggatgatgatcgcatggccgcaagcatgtgtggctgcgtaccatgtcgcatatgcagagaacccgcagaaccctcagctgggcacgctgataccagaacatctgcgcgagctccaagcaatggctgcagatcaagatcgtcccagagttatccatttttctgatgacattgacaattcatagatccttccattctttcagtctttttcccccctgacccaagggggtagacacctcggcagcagacgtagacacgtcgttgcagtcttccagatgcatgatgatgggtgttgactgctcctgggctgcttgctggtgcagatgatagggtgtgctcagttctgtagatattgggcaagtggataactgagcaaaagaagtggttagatgtcgtataggtacagagtttagcaaagtaaacaaaaatgtagaattaaatacattgttttcagaatttcccggaggcgtgttcttgccctcgcactgacactgaacgctgttgcgattcctgtgccttttcatctgcttacgaggtggctctacgtggcaattgacatgcatcaggatgctcgtgcccaattcattttccctattcctaatcaagttggaggagttttttttgccactagaatgcttgtggtaacaaaaagaaacatgtaagggcttgttcgttttgttcttaatccatgtggattgggtggaattggatgagtttcaatcccaaataagtcaaaat

SEQ ID NO: 4884 - DNA, 1672 bp, Zea Mays
ttttttttgttctagagagaaattaataaaaaaattatataaatttttattactatacttcataatattttcaataacatgataataaattagcttcaaattctatatatatttatattaaaatatagatttgtcgatattttagaaacatcctctcagagccacccgcaaaagtccgataatccttttccggcacgacagatccaccgtgtttggccctctcgaactcaaccgacagctgccgattcttcacccttacttttcacgtcatgaatgctcgtcagctcgtgagacgtgacgccgtgtcctgaaaaaaaaaagacccgtcccggcgacccccacacccttcaatccggggaaaaaaagcaacagctcgattgcccgggtcttccaaaaccctcgagatctcggttggtggtgtggtggggtggggtgctcttccctctcgcctccgctccgaagcatcgatccgaactcctcggttactcgcggcagcggcgtgtcgagatgcgccccaacattatcacagaggctgggattccaactaggttgaatcagtggtggagcagcattccgtttgttacttctggtgttatcttgatatgtggagtaatttatctgctctgcttgttgattggctatgattcctatgtggagatatgcttcttgccttctgctgtagcatcacattttcaagtatacaggttctacacatctgttctctttcatggttctttgcttcatgtgctattcaacatgcttgccttggtacccttgggcactgagttggagagaatcatgggatcagtccgtctcttattcttgatgctccttcttgcaacaacaaatgcaattctccatctcacaattgctttcttggtggcttacaatcctctgtatcacgttccaaatcttgtgaatgaatgctccattggcttttctggagttatattctcaatgattgtcattgagacaagtctgagtggtgtgcaatcacgaagtgtcttcggcctcttcaatgttcctgcaaaatggtacgcatggattttgctagtgctatttcagtttctcgcaagcaatgtttcattgctgggacacctttgtggcatcttgtcaggatttgcatacacttatgggctgttcaactacttgcttcctgggccatcattttattctaaaatcgaaggcttgtcagcactatctgtttgtgtgaggcgtcctggctttattatgtgtactggaggcactacttatggtcagcttcctacatactctaacacgtctgctgcaccaagtgctctcataaatggaaatttcttgagaaatatatcttcatggatgcctagcagacacacatcaactgctcaggaaggagaagacccaaggtttcctgggagagcacgaacacttggttctgtaggaactgaacccactgcaagggaggcaagtgcgcatttgcatgctaggttgttggataacacaactccaagtgacccactaacgaatacacatgatcaaaagcaagaccaacaacgagtgtggcgaccaagctgacaagcatggcaaggcgaggcagcgttgtcacggggccgaggaatggccgaggtgaacgattgtctggagatgaggtcgtggccagggtggctaagacgacggtgccaagtggagctag

SEQ ID NO: 4885 - DNA, 2382 bp, Zea Mays
ttttttttgttctagagagaaattaataaaaaaattatataaatttttattactatacttcataatattttcaataacatgataataaattagcttcaaattctatatatatttatattaaaatatagatttgtcgatattttagaaacatcctctcagagccacccgcaaaagtccgataatccttttccggcacgacagatccaccgtgtttggccctctcgaactcaaccgacagctgccgattcttcacccttacttttcacgtcatgaatgctcgtcagctcgtgagacgtgacgccgtgtcctgaaaaaaaaaagacccgtcccggcgacccccacacccttcaatccggggaaaaaaagcaacagctcgattgcccgggtcttccaaaaccctcgagatctcggttggtggtgtggtggggtggggtgctcttccctctcgcctccgctccgaagcatcgatccgaactcctcggttactcgcggcagcggcgtgtcgagatgcgccccaacattatcacagaggctgggattccaactaggttgaatcagtggtggagcagcattccgtttgttacttctggtgttatcttgatatgtggagtaatttatctgctctgcttgttgattggctatgattcctatgtggagatatgcttcttgccttctgctgtagcatcacattttcaagtatacaggttctacacatctgttctctttcatggttctttgcttcatgtgctattcaacatgcttgccttggtacccttgggcactgagttggagagaatcatgggatcagtccgtctcttattcttgatgctccttcttgcaacaacaaatgcaattctccatctcacaattgctttcttggtggcttacaatcctctgtatcacgttccaaatcttgtgaatgaatgctccattggcttttctggagttatattctcaatgattgtcattgagacaagtctgagtggtgtgcaatcacgaagtgtcttcggcctcttcaatgttcctgcaaaatggtacgcatggattttgctagtgctatttcagtttctcgcaagcaatgtttcattgctgggacacctttgtggcatcttgtcaggatttgcatacacttatgggctgttcaactacttgcttcctgggccatcattttattctaaaatcgaaggcttgtcagcactatctgtttgtgtgaggcgtcctggctttattatgtgtactggaggcactacttatggtcagcttcctacatactctaacacgtctgctgcaccaagtgctctcataaatggaaatttcttgagaaatatatcttcatggatgcctagcagacacacatcaactgctcaggaaggagaagacccaaggtttcctgggagagcacgaacacttggttctgtaggaactgaacccactgcaagggaggcaagtgcgcatttgcatgctaggttgttggataacacaactccaagtgacccactaacgaatacacagactcatgttttcttctataaaaaactcggccaaggagtgaatgactgccctcccgatataatattaagaagagaccgaaacaaaggtcccgaccggaaaatccccgaaccatagcctcccatcactaacagatcggcgtcaaccgtccactttgcaacggcccaaccggagggtggcacacatgacatcataactcaagagcggatgaggcacaatgaggcatacagctgtgaacacagtcagagctgatgcaacagtgacagctgagcaggttgatacatttgatgaagaacttaagaagctggttggaatgggctttgaaaagactcaggctgaagttgctcttgctgcagctgatggggatccaaatgttgccattgagattctgatgagtcagcagggttgaagtttgaccataaagtacaaattgaaaggaagcacggtatcgagccattttttgttcttacaaaggttcaaaaagtaggctgtggtttggggagtctgaaaaaggatggctgcaatcttgtttataccgggggtgcagaaacaacgtgcagcctaattgcaattctcaaggctttatgtaaggtagaaagtaacgttggatgttctgttaaatacgaacaatcagaaaatgctgaatttagtctgaaaatagccagtgtgtttgttttagcttgcagattattacaatctacaagccaggggaaactagattattgggctgtaacaataagactttgacgttgggactggttcccttttgagattgtggatccgtcctgcgttgagacctttttagcggcctatgaattttcacatgggaaaaatctgcaaaaataatgcataatctttaacctcaaatcaaca

SEQ ID NO: 4886 - DNA, 2002 bp, Zea Mays
ttttttttgttctagagagaaattaataaaaaaattatataaatttttattactatacttcataatattttcaataacatgataataaattagcttcaaattctatatatatttatattaaaatatagatttgtcgatattttagaaacatcctctcagagccacccgcaaaagtccgataatccttttccggcacgacagatccaccgtgtttggccctctcgaactcaaccgacagctgccgattcttcacccttacttttcacgtcatgaatgctcgtcagctcgtgagacgtgacgccgtgtcctgaaaaaaaaaagacccgtcccggcgacccccacacccttcaatccggggaaaaaaagcaacagctcgattgcccgggtcttccaaaaccctcgagatctcggttggtggtgtggtggggtggggtgctcttccctctcgcctccgctccgaagcatcgatccgaactcctcggttactcgcggcagcggcgtgtcgagatgcgccccaacattatcacagaggctgggattccaactaggttgaatcagtggtggagcagcattccgtttgttacttctggtgttatcttgatatgtggagtaatttatctgctctgcttgttgattggctatgattcctatgtggagatatgcttcttgccttctgctgtagcatcacattttcaagtatacaggttctacacatctgttctctttcatggttctttgcttcatgtgctattcaacatgcttgccttggtacccttgggcactgagttggagagaatcatgggatcagtccgtctcttattcttgatgctccttcttgcaacaacaaatgcaattctccatctcacaattgctttcttggtggcttacaatcctctgtatcacgttccaaatcttgtgaatgaatgctccattggcttttctggagttatattctcaatgattgtcattgagacaagtctgagtggtgtgcaatcacgaagtgtcttcggcctcttcaatgttcctgcaaaatgacacttatgggctgttcaactacttgcttcctgggccatcattttattctaaaatcgaaggcttgtcagcactatctgtttgtgtgaggcgtcctggctttattatgtgtactggaggcactacttatggtcagcttcctacatactctaacacgtctgctgcaccaagtgctctcataaatggaaatttcttgagaaatatatcttcatggatgcctagcagacacacatcaactgctcaggaaggagaagacccaaggtttcctgggagagcacgaacacttggttctgtaggaactgaacccactgcaagggaggcatacagctgtgaacacagtcagagctgatgcaacagtgacagctgagcaggttgatacatttgatgaagaacttaagaagctggttggaatgggctttgaaaagactcaggctgaagttgctcttgctgcagctgatggggatccaaatgttgccattgagattctgatgagtcagcagggttgaagtttgaccataaagtacaaattgaaaggaagcacggtatcgagccattttttgttcttacaaaggttcaaaaagtaggctgtggtttggggagtctgaaaaaggatggctgcaatcttgtttataccgggggtgcagaaacaacgtgcagcctaattgcaattctcaaggctttatgtaaggtagaaagtaacgttggatgttctgttaaatacgaacaatcagaaaatgctgaatttagtctgaaaatagccagtgtgtttgttttagcttgcagattattacaatctacaagccaggggaaactagattattgggctgtaacaataagactttgacgttgggactggttcccttttgagattgtggatccgtcctgcgttgagacctttttagcggcctatgaattttcacatgggaaaaatctgcaaaaataatgcataatctttaacctcaaatcaaca

SEQ ID NO: 4887 - DNA, 2425 bp, Zea Mays
ttttttttgttctagagagaaattaataaaaaaattatataaatttttattactatacttcataatattttcaataacatgataataaattagcttcaaattctatatatatttatattaaaatatagatttgtcgatattttagaaacatcctctcagagccacccgcaaaagtccgataatccttttccggcacgacagatccaccgtgtttggccctctcgaactcaaccgacagctgccgattcttcacccttacttttcacgtcatgaatgctcgtcagctcgtgagacgtgacgccgtgtcctgaaaaaaaaaagacccgtcccggcgacccccacacccttcaatccggggaaaaaaagcaacagctcgattgcccgggtcttccaaaaccctcgagatctcggttggtggtgtggtggggtggggtgctcttccctctcgcctccgctccgaagcatcgatccgaactcctcggttactcgcggcagcggcgtgtcgagatgcgccccaacattatcacagaggctgggattccaactaggttgaatcagtggtggagcagcattccgtttgttacttctggtgttatcttgatatgtggagtaatttatctgctctgcttgttgattggctatgattcctatgtggagatatgcttcttgccttctgctgtagcatcacattttcaagtatacaggttctacacatctgttctctttcatggttctttgcttcatgtgctattcaacatgcttgccttggtacccttgggcactgagttggagagaatcatgggatcagtccgtctcttattcttgatgctccttcttgcaacaacaaatgcaattctccatctcacaattgctttcttggtggcttacaatcctctgtatcacgttccaaatcttgtgaatgaatgctccattggcttttctggagttatattctcaatgattgtcattgagacaagtctgagtggtgtgcaatcacgaagtgtcttcggcctcttcaatgttcctgcaaaatggtacgcatggattttgctagtgctatttcagtttctcgcaagcaatgtttcattgctgggacacctttgtggcatcttgtcaggatttgcatacacttatgggctgttcaactacttgcttcctgggccatcattttattctaaaatcgaaggcttgtcagcactatctgtttgtgtgaggcgtcctggctttattatgtgtactggaggcactacttatggtcagcttcctacatactctaacacgtctgctgcaccaagtgctctcataaatggaaatttcttgagaaatatatcttcatggatgcctagcagacacacatcaactgctcaggaaggagaagacccaaggtttcctgggagagcacgaacacttggttctgtaggaactgaacccactgcaagggaggcatacagctgtgaacacagtcagagctgatgcaacagtgacagctgagcaggttgatacatttgatgaagaacttaagaagctggttggaatgggctttgaaaagcgtcgttggagaggacgtcgtccaccagagaagagacggcagctgttgctcgttcacgagtagcacgatcctgagcctgggccacgcgctcacgttcctcctatgcagcacgaagctcctcagcgcgctggagagacgtggcagcagtggcgtgggtgggggaagcgtggggcatcccaaggtgaagaacctcggtgcaggaggtgtctggtgcaggaggtgtcttcggtcggcggcgggggagtgccagccatggagcagcaccgagcagatggggtgcgctgatgcggaaacggagaatggaaaaaggaacctaggtgtctgataccatactcaggctgaagttgctcttgctgcagctgatggggatccaaatgttgccattgagattctgatgagtcagcagggttgaagtttgaccataaagtacaaattgaaaggaagcacggtatcgagccattttttgttcttacaaaggttcaaaaagtaggctgtggtttggggagtctgaaaaaggatggctgcaatcttgtttataccgggggtgcagaaacaacgtgcagcctaattgcaattctcaaggctttatgtaaggtagaaagtaacgttggatgttctgttaaatacgaacaatcagaaaatgctgaatttagtctgaaaatagccagtgtgtttgttttagcttgcagattattacaatctacaagccaggggaaactagattattgggctgtaacaataagactttgacgttgggactggttcccttttgagattgtggatccgtcctgcgttgagacctttttagcggcctatgaattttcacatgggaaaaatctgcaaaaataatgcataatctttaacctcaaatcaaca

SEQ ID NO: 4888 - DNA, 2401 bp, Zea Mays
ttttttttgttctagagagaaattaataaaaaaattatataaatttttattactatacttcataatattttcaataacatgataataaattagcttcaaattctatatatatttatattaaaatatagatttgtcgatattttagaaacatcctctcagagccacccgcaaaagtccgataatccttttccggcacgacagatccaccgtgtttggccctctcgaactcaaccgacagctgccgattcttcacccttacttttcacgtcatgaatgctcgtcagctcgtgagacgtgacgccgtgtcctgaaaaaaaaaagacccgtcccggcgacccccacacccttcaatccggggaaaaaaagcaacagctcgattgcccgggtcttccaaaaccctcgagatctcggttggtggtgtggtggggtggggtgctcttccctctcgcctccgctccgaagcatcgatccgaactcctcggttactcgcggcagcggcgtgtcgagatgcgccccaacattatcacagaggctgggattccaactaggttgaatcagtggtggagcagcattccgtttgttacttctggtgttatcttgatatgtggagtaatttatctgctctgcttgttgattggctatgattcctatgtggagatatgcttcttgccttctgctgtagcatcacattttcaagtatacaggttctacacatctgttctctttcatggttctttgcttcatgtgctattcaacatgcttgccttggtacccttgggcactgagttggagagaatcatgggatcagtccgtctcttattcttgatgctccttcttgcaacaacaaatgcaattctccatctcacaattgctttcttggtggcttacaatcctctgtatcacgttccaaatcttgtgaatgaatgctccattggcttttctggagttatattctcaatgattgtcattgagacaagtctgagtggtgtgcaatcacgaagtgtcttcggcctcttcaatgttcctgcaaaatgacacttatgggctgttcaactacttgcttcctgggccatcattttattctaaaatcgaaggcttgtcagcactatctgtttgtgtgaggcgtcctggctttattatgtgtactggaggcactacttatggtcagcttcctacatactctaacacgtctgctgcaccaagtgctctcataaatggaaatttcttgagaaatatatcttcatggatgcctagcagacacacatcaactgctcaggaaggagaagacccaaggtttcctgggagagcacgaacacttggttctgtaggaactgaacccactgcaagggaggcaagtgcgcatttgcatgctaggttgttggataacacaactccaagtgacccactaacgaatacacagcatacagctgtgaacacagtcagagctgatgcaacagtgacagctgagcaggttgatacatttgatgaagaacttaagaagctggttggaatgggctttgaaaagcgtcgttggagaggacgtcgtccaccagagaagagacggcagctgttgctcgttcacgagtagcacgatcctgagcctgggccacgcgctcacgttcctcctatgcagcacgaagctcctcagcgcgctggagagacgtggcagcagtggcgtgggtgggggaagcgtggggcatcccaaggtgaagaacctcggtgcaggaggtgtctggtgcaggaggtgtcttcggtcggcggcgggggagtgccagccatggagcagcaccgagcagatggggtgcgctgatgcggaaacggagaatggaaaaaggaacctaggtgtctgataccatactcaggctgaagttgctcttgctgcagctgatggggatccaaatgttgccattgagattctgatgagtcagcagggttgaagtttgaccataaagtacaaattgaaaggaagcacggtatcgagccattttttgttcttacaaaggttcaaaaagtaggctgtggtttggggagtctgaaaaaggatggctgcaatcttgtttataccgggggtgcagaaacaacgtgcagcctaattgcaattctcaaggctttatgtaaggtagaaagtaacgttggatgttctgttaaatacgaacaatcagaaaatgctgaatttagtctgaaaatagccagtgtgtttgttttagcttgcagattattacaatctacaagccaggggaaactagattattgggctgtaacaataagactttgacgttgggactggttcccttttgagattgtggatccgtcctgcgttgagacctttttagcggcctatgaattttcacatgggaaaaatctgcaaaaataatgcataatctttaacctcaaatcaaca

SEQ ID NO: 4889 - DNA, 684 bp, Zea Mays
gtcctttcgctgttttcttctattctaaaccaggcatacagctgtgaacacagtcagagctgatgcaacagtgacagctgagcaggttgatacatttgatgaagaacttaagaagctggttggaatgggctttgaaaagactcaggctgaagttgctcttgctgcagctgatggggatccaaatgttgccattgagattctgatgagtcagcagggttgaagtttgaccataaagtacaaattgaaaggaagcacggtatcgagccattttttgttcttacaaaggttcaaaaagtaggctgtggtttggggagtctgaaaaaggatggctgcaatcttgtttataccgggggtgcagaaacaacgtgcagcctaattgcaattctcaaggctttatgtaaggtagaaagtaacgttggatgttctgttaaatacgaacaatcagaaaatgctgaatttagtctgaaaatagccagtgtgtttgttttagcttgcagattattacaatctacaagccaggggaaactagattattgggctgtaacaataagactttgacgttgggactggttcccttttgagattgtggatccgtcctgcgttgagacctttttagcggcctatgaattttcacatgggaaaaatctgcaaaaataatgcataatctttaacctcaaatcaaca

SEQ ID NO: 4890 - DNA, 1930 bp, Zea Mays
cgcaagccgcaacggaacggaaccaagagaaggcggccacagccagactagcagatagagaggcggagccgcggaggccagcatatctccctcgttttggtttgcgcccaagcaagcgcgtcacgcgagcaccgccgctgccgccgttcactttccccctgaacaccagccgccgccgccgccgccgccgtcgccgccgcatgcacgcacgctgcctctgcacgagcggcaagcggcgatccggcgatcctcgtcgatccccgccctaacgcgctgcggtggtccgtgcagacaagatgaagttcggcgccacatatgaggagtatctccgggcagagcgggacaaattcctagggcaatgctcccatgtagaatacaaacgcctcaaaaaggtattgaagaaatgtagagttggtcgctcactgcaagcagatggcacaaatggtgatgagcagcaggaggggagagacgaatcttcaaacatttgtgaatgcaactcatgcacattgtgtgatgagatgttctttacagaactcaacaaggaagcatcagaaatagcaggttgtttcagatctagagtacaacgtctcctccatcttcatgttccttcaggactacaacgctgtatatggcgttttaggcagtgtttcatagatgatcagcaaataatggttcaagaaggcagaatgcttctcaattatgtgaccatgaatgctattgctattcgcaaaattctcaagaaatatgacaagatacatggttctgtgagtggcagagatttcaagagcaagatgcaaactgagcatattgaactgttgcagtcaccttggctgatagagcttgctgctttccatcttaactgcgatgattcagatgctgatgaacctagagctggagagttcttcaagaatggattcttcaagaatttttcctgtgacctgagtggagcacagccactactaacaatgaccatttctgaaactctgaagtatgagtacagcctaacttgtccaatttgcttggacactttgttcaacccttatgcgcttagctgtgggcatctgttctgcaaagcctgtgcatgtggtgctgcttctgtctacatcttccagggtgtcaagtcggcacctccggaggccaagtgccctgtctgccgagcggttggtgtgtttgatcgtgctgtgcgtatgactgaactagaattgctcctcaagagaagggacaaagattactttctgcagagactgcgcgaagagcgaagtgtgatggtgaagcaggccaaagaatactgggactcacaggcaatgctatcgatggggatttgaaagctacaatgttcttaccagttcaattgttgtggctaattacatctgaaggttctctggctaattacatattttagttcctggcaagcgtcaatcaattaagttaactgcgctcacataacagaaattgacatagcagaagctgagcccatcgaagaagcaaacaaaatcagttgcattctatcattctccgcctgattcagatttggaagaatcgaacggatttaactaatttctttgttccttccgttctactacaagcttgaaatgacgaaactcatattgtatttacatatctactgattattgggttatttaccctatttactgattgttggtgtgttatttgcctgtaaaagtgaagtcaaatgttgtccagctgccctgaacctcttaagaccatctccaaagttcaacccccacctcatattcagtgtactatggcgacaacggctccaacagttccctatagtgctccttgtctagggctaaaaaaaagctcgaggctcgcgagccgactcggactccctcagactcagagaggctcatgagcctaaatgaatttgagccatccgagctgaaacagcgagctaagcctaaacaag

SEQ ID NO: 4891 - DNA, 1886 bp, Zea Mays
ctagcagatagagaggcggagccgcggaggccagcatatctccctcgttttggtttgcgcccaagcaagcgcgtcacgcgagcaccgccgctgccgccgttcactttccccctgaacaccagccgccgccgccgccgccgccgtcgccgccgcatgcacgcacgctgcctctgcacgagcggcaagcggcgatccggcgatcctcgtcgatccccgccctaacgcgctgcggtggtccgtgcagcagacaagatgaagttcggcgccacatatgaggagtatctccgggcagagcgggacaaattcctagggcaatgctcccatgtagaatacaaacgcctcaaaaaggtattgaagaaatgtagagttggtcgctcactgcaagcagatggcacaaatggtgatgagcagcaggaggggagagacgaatcttcaaacatttgtgaatgcaactcatgcacattgtgtgatgagatgttctttacagaactcaacaaggaagcatcagaaatagcaggttgtttcagatctagagtacaacgtctcctccatcttcatgttccttcaggactacaacgctgtatatggcgttttaggcagtgtttcatagatgatcagcaaataatggttcaagaaggcagaatgcttctcaattatgtgaccatgaatgctattgctattcgcaaaattctcaagaaatatgacaagatacatggttctgtgagtggcagagatttcaagagcaagatgcaaactgagcatattgaactgttgcagtcaccttggctgatagagcttgctgctttccatcttaactgcgatgattcagatgctgatgaacctagagctggagagttcttcaagaatggattcttcaagaatttttcctgtgacctgagtggagcacagccactactaacaatgaccatttctgaaactctgaagtatgagtacagcctaacttgtccaatttgcttggacactttgttcaacccttatgcgcttagctgtgggcatctgttctgcaaagcctgtgcatgtggtgctgcttctgtctacatcttccagggtgtcaagtcggcacctccggaggccaagtgccctgtctgccgagcggttggtgtgtttgatcgtgctgtgcgtatgactgaactagaattgctcctcaagagaagggacaaagattactttctgcagagactgcgcgaagagcgaagtgtgatggtgaagcaggccaaagaatactgggactcacaggcaatgctatcgatggggatttgaaagctacaatgttcttaccagttcaattgttgtggctaattacatctgaaggttctctggctaattacatattttagttcctggcaagcgtcaatcaattaagttaactgcgctcacataacagaaattgacatagcagaagctgagcccatcgaagaagcaaacaaaatcagttgcattctatcattctccgcctgattcagatttggaagaatcgaacggatttaactaatttctttgttccttccgttctactacaagcttgaaatgacgaaactcatattgtatttacatatctactgattattgggttatttaccctatttactgattgttggtgtgttatttgcctgtaaaagtgaagtcaaatgttgtccagctgccctgaacctcttaagaccatctccaaagttcaacccccacctcatattcagtgtactatggcgacaacggctccaacagttccctatagtgctccttgtctagggctaaaaaaaagctcgaggctcgcgagccgactcggactccctcagactcagagaggctcatgagcctaaatgaatttgagccatccgagctgaaacagcgagctaagcctaaacaag

SEQ ID NO: 4892 - DNA, 1749 bp, Zea Mays
cccgattccaagctagcccccggcgtacggggccagggcggccgggagagtttcaaacctctcctgtcccttcgtcctcgatcaaccgattcgattctttatataggaatacaagatgaagttcggcgccacatatgaggagtatctccgggcagagcgggacaaattcctagggcaatgctcccatgtagaatacaaacgcctcaaaaaggtattgaagaaatgtagagttggtcgctcactgcaagcagatggcacaaatggtgatgagcagcaggaggggagagacgaatcttcaaacatttgtgaatgcaactcatgcacattgtgtgatgagatgttctttacagaactcaacaaggaagcatcagaaatagcaggttgtttcagatctagagtacaacgtctcctccatcttcatgttccttcaggactacaacgctgtatatggcgttttaggcagtgtttcatagatgatcagcaaataatggttcaagaaggcagaatgcttctcaattatgtgaccatgaatgctattgctattcgcaaaattctcaagaaatatgacaagatacatggttctgtgagtggcagagatttcaagagcaagatgcaaactgagcatattgaactgttgcagtcaccttggctgatagagcttgctgctttccatcttaactgcgatgattcagatgctgatgaacctagagctggagagttcttcaagaatggattcttcaagaatttttcctgtgacctgagtggagcacagccactactaacaatgaccatttctgaaactctgaagtatgagtacagcctaacttgtccaatttgcttggacactttgttcaacccttatgcgcttagctgtgggcatctgttctgcaaagcctgtgcatgtggtgctgcttctgtctacatcttccagggtgtcaagtcggcacctccggaggccaagtgccctgtctgccgagcggttggtgtgtttgatcgtgctgtgcgtatgactgaactagaattgctcctcaagagaagggacaaagattactttctgcagagactgcgcgaagagcgaagtgtgatggtgaagcaggccaaagaatactgggactcacaggcaatgctatcgatggggatttgaaagctacaatgttcttaccagttcaattgttgtggctaattacatctgaaggttctctggctaattacatattttagttcctggcaagcgtcaatcaattaagttaactgcgctcacataacagaaattgacatagcagaagctgagcccatcgaagaagcaaacaaaatcagttgcattctatcattctccgcctgattcagatttggaagaatcgaacggatttaactaatttctttgttccttccgttctactacaagcttgaaatgacgaaactcatattgtatttacatatctactgattattgggttatttaccctatttactgattgttggtgtgttatttgcctgtaaaagtgaagtcaaatgttgtccagctgccctgaacctcttaagaccatctccaaagttcaacccccacctcatattcagtgtactatggcgacaacggctccaacagttccctatagtgctccttgtctagggctaaaaaaaagctcgaggctcgcgagccgactcggactccctcagactcagagaggctcatgagcctaaatgaatttgagccatccgagctgaaacagcgagctaagcctaaacaag

SEQ ID NO: 4893 - DNA, 1016 bp, Zea Mays
gtgagatattctttaacttctgttttctttggctcataaatatctaaaaggatagcccttgttggtagggaagattgctgtgaaaactttgcatgttgtctctgcagggacactttgttcaacccttatgcgcttagctgtgggcatctgttctgcaaagcctgtgcatgtggtgctgcttctgtctacatcttccagggtgtcaagtcggcacctccggaggccaagtgccctgtctgccgagcggttggtgtgtttgatcgtgctgtgcgtatgactgaactagaattgctcctcaagagaagggacaaagattactttctgcagagactgcgcgaagagcgaagtgtgatggtgaagcaggccaaagaatactgggactcacaggcaatgctatcgatggggatttgaaagctacaatgttcttaccagttcaattgttgtggctaattacatctgaaggttctctggctaattacatattttagttcctggcaagcgtcaatcaattaagttaactgcgctcacataacagaaattgacatagcagaagctgagcccatcgaagaagcaaacaaaatcagttgcattctatcattctccgcctgattcagatttggaagaatcgaacggatttaactaatttctttgttccttccgttctactacaagcttgaaatgacgaaactcatattgtatttacatatctactgattattgggttatttaccctatttactgattgttggtgtgttatttgcctgtaaaagtgaagtcaaatgttgtccagctgccctgaacctcttaagaccatctccaaagttcaacccccacctcatattcagtgtactatggcgacaacggctccaacagttccctatagtgctccttgtctagggctaaaaaaaagctcgaggctcgcgagccgactcggactccctcagactcagagaggctcatgagcctaaatgaatttgagccatccgagctgaaacagcgagctaagcctaaacaag

SEQ ID NO: 4894 - DNA, 2803 bp, Zea Mays
cgttcaccttcctatttatttcggagctccgcttctctctcctcccgtgcatccgccgcgggcctcctccagtcctcttcctcaccccgacgactccgcctcaaatccaatcccactcccacctagcggtccggctggcctcgcctcctcctcctcgcttctctcagcctcaggacgacgcctgcctaggcttccaccgctgatctgaccccgaaacctcgttcccttgtccgcttcctgccgtctcagtcgtcgatacttgtcccccaaaaccccgggctccggccgatctctgcgcgttgaccggggcgccgctgatggtggcgaggatgatgcggtggccgcggccgccggcggcgcgcaagttccgcgtgcggctgttggtgcggcgtgcggaggggctcccgcctccttcaccttcgccttcgccgtcgccctcgcccgcgacagcggcctcgccggagcgcgagccgccgggcgccgcgcagcccagggccgccgtcgccgcggaggtgaggtggaaggggcccagggcctccgcgctcggctcgctgcggcgtgccgcggtcaggcgcaaccgcacacgggaggacgccggcgcggcgtgggaggaggagttcgagagcgtcgtcaccctcgcggccgcgtcgcagcgggagggcgccgcgttccacccatgggagctcgccttctgcgtcttcagcgatattaacaaaggcccaaagaacaaaccatcaattctgggaactgcttctctcaatctagcagattatgcattgacggctggagagacaattgagataattcttccgttgtctatacctggtggtgcacctgaacgagcctcatcccttcatctcactctgagtatggttgaattaagagcttttcaagaaacatctgatgcatcacagcgatctgctgcaaccttgccattgtccccatcatctggcgattcttttcctggaggaaaagatgaggtttcggttattaaagcagggttgaggaagatgacagagtagaggaagatgaatttggagattcaactatcaggaagtctttcagttatgggtctctgcaatctgtcaactatgttggtggcctagtttatgcccatgcaaagattgatggggagcatgaggactggatatattatagtaaccgaaaaactgatgtcggtttccaagtagagaaagtattgccatcaaccacagagaatgggttgctaactgctaagcgcagtatacttccttggagaaagaggaaactgagtttacggtcgctgaaggctaaaggtgaacctctgttgaaaaaggcatatggggaagagggaggtgatgatattgacaatgatcgacgcttgctaacatcatctgatgaatctgtttcagagggatcaagaggagatggatcagcaaatactatggtgtcagaatttggtgatgacaattttgtcattggaaattgggagttgaaggagataattagccgcgatggccgtatgaagctttcatcccagatgttctttgcatcaatagaccagagaagtgagcgagcagctggggagagtgcatgtacagcacttgtggctgttattgcagactggttccaagcaaatcagaatatcatgcctatccagtcacagtttgacagccttatccgtgaaggatcactagagtggagaaacctttgtgagaatgagacgtatagagagcgttttcctgacaagcactttgatcttgaaactgtccttcatgccaagattcgcccgctgacagtttcccccagcaaatcttttatcggattcttccagcccgaaggcgatgatgacatgagtggttttgacttccttaatggtgccatgtcatttgacaacatctgggatgagattgcccaggcggcagagttctcatccagtgatagccctaacttatacatagtaagttggaatgaccacttttttctactcaaggttgagcatgatgcatattacattatcgatacccttggagaaaggctccatgaagggtgcagccaggcatacattttgaagttcgacaagaatacgacaattcacaaggtacctggggaaaagaaatcttgtagccccgactcaagtggaccaatgaaggattcttcaggttctgagagctctacgactgaccaggacagtgggaatgatactgaagaggaggtgcttgtgtcgaagggcaaagaatcatgtaaagagtacatcaagagtttcttggcagccataccaatccgggaactacaggcggacatcaagaaaggactgatggcatcaaccccattgcaccaccgcctccagattgagttccagtacacccagtcgtccccaaaagagactgcatcagccactcagcttcttaccatggaggccccctttgagttctcatggcctgaggcaccgccaacaatggaagtcacactaacatctgccgtctctgttgtgtagcttgtcaccctggtggcgaagaacccaaagacatgagacaacggcctgccctgatgttcggcatggagaacccttttttccttggttccctgcatggagggggagcctagatgaagattttggttcttctgtttgtactaatttgtttaatatgaactgactactacgggttattcctcctgggcgtaggagcgttctacctgcttttttttagagatgtaacatgataatatggtgccaacaagcaagaagctacgagttatgaatctgctagttacaagcagcatatgtttctcagggcctctgtgtgctgtatatggaagtaac

SEQ ID NO: 4895 - DNA, 2961 bp, Zea Mays
gttcaccttcctatttatttcggagctccgcttctctctcctcccgtgcatccgccgcgggcctcctccagtcctcttcctcaccccgacgactccgcctcaaatccaatcccactcccacctagcggtccggctggcctcgcctcctcctcctcgcttctctcagcctcaggacgacgcctgcctaggcttccaccgctgatctgaccccgaaacctcgttcccttgtccgcttcctgccgtctcagtcgtcgatacttgtcccccaaaaccccgggctccggccgatctctgcgcgttgaccggggcgccgctgatggtggcgaggatgatgcggtggccgcggccgccggcggcgcgcaagttccgcgtgcggctgttggtgcggcgtgcggaggggctcccgcctccttcaccttcgccttcgccgtcgccctcgcccgcgacagcggcctcgccggagcgcgagccgccgggcgccgcgcagcccagggccgccgtcgccgcggaggtgaggtggaaggggcccagggcctccgcgctcggctcgctgcggcgtgccgcggtcaggcgcaaccgcacacgggaggacgccggcgcggcgtgggaggaggagttcgagagcgtcgtcaccctcgcggccgcgtcgcagcgggagggcgccgcgttccacccatgggagctcgccttctgcgtcttcagcgatattaacaaaggcccaaagaacaaaccatcaattctgggaactgcttctctcaatctagcagattatgcattgacggctggagagacaattgagataattcttccgttgtctatacctggtggtgcacctgaacgagcctcatcccttcatctcactctgagtatggttgaattaagagcttttcaagaaacatctgatgcatcacagcgatctgctgcaaccttgccattgtccccatcatctggcgattcttttcctggaggaaaagatgaggtttcggttattaaagcagggttgaggaaggtaaaaattctcacagatctggtgtcgacacgaaggcctaagaagacttgccagatgacagagtagaggaagatgaatttggagattcaactatcaggaagtctttcagttatgggtctctgcaatctgtcaactatgttggtggcctagtttatgcccatgcaaagattgatggggagcatgaggactggatatattatagtaaccgaaaaactgatgtcggtttccaagtagagaaagtattgccatcaaccacagagaatgggttgctaactgctaagcgcagtatacttccttggagaaagaggaaactgagtttacggtcgctgaaggctaaaggtgaacctctgttgaaaaaggcatatggggaagagggaggtgatgatattgacaatgatcgacgcttgctaacatcatctgatgaatctgtttcagagggatcaagaggagatggatcagcaaatactatggtgtcagaatttggtgatgacaattttgtcattggaaattgggagttgaaggagataattagccgcgatggccgtatgaagctttcatcccagatgttctttgcatcaatagaccagagaagtgagcgagcagctggggagagtgcatgtacagcacttgtggctgttattgcagactggttccaagcaaatcagaatatcatgcctatccagtcacagtttgacagccttatccgtgaaggatcactagagtggagaaacctttgtgagaatgagacgtatagagagcgttttcctgacaagcactttgatcttgaaactgtccttcatgccaagattcgcccgctgacagtttcccccagcaaatcttttatcggattcttccagcccgaaggcgatgatgacatgagtggttttgacttccttaatggtgccatgtcatttgacaacatctgggatgagattgcccaggcggcagagttctcatccagtgatagccctaacttatacatagtaagttggaatgaccacttttttctactcaaggttgagcatgatgcatattacattatcgatacccttggagaaaggctccatgaagggtgcagccaggcatacattttgaagttcgacaagaatacgacaattcacaaggtacctggggaaaagaaatcttgtagccccgactcaagtggaccaatgaaggattcttcaggttctgagagctctacgactgaccaggacagtgggaatgatactgaagaggaggtgcttgtgtcgaagggcaaagaatcatgtaaagagtacatcaagagtttcttggcagccataccaatccgggaactacaggcggacatcaagaaaggactgatggcatcaaccccattgcaccaccgcctccagattgagttccagtacacccagtcgtccccaaaagagactgcatcagccactcagcttcttaccatggaggccccctttgagttctcatggcctgaggcaccgccaacaatggaagtcacactaacatctgccgtctctgttgtgtagcttgtcaccctggtggcgaagaacccaaagacatgagacaacggcctgccctgatgttcggcatggagaacccttttttccttggttccctgcatggagggggagcctagatgaagattttggttcttctgtttgtactaatttgtttaatatgaactgactactacgggttattcctcctgggcgtaggagcgttctacctgcttttttttagaggtatcttccctcacctgctcgcttgtaatcttttggaaccctgtatgactaatcgaggaggaattcccctttgttataatgaactagatgccggcttatctgtagatgtaacatgataatatggtgccaacaagcaagaagctacgagttatgaatctgctagttacaagcagcatatgtttctcagggcctctgtgtgctgtatatggaagtaac

SEQ ID NO: 4896 - DNA, 2521 bp, Zea Mays
attactgacaagcgccagagcagagagggagagagagaacacacaaggggaggggtggggaagggaagggaagggaggcgcactcgtcccgtctggtatcgtctcccccggcagtgaaggagtagaaggaaggagagtaggagtaggaggggagaatgcgtgtcggcggcgggcgggacgacgacgacgaggtgtcccggaagctcaagagcatggacgtggacaagctggagaacggcggcggggaggagagcccgcggcccgccgtcaagtaccacggctggaaggccatgccgttcatcatcgggaacgagacgttcgagaagctggggacgctgggcacgtcggcgaacctgctggtgtacctgacgcaggtgttccacatgcggagcgtggacgcggcgacgctgctcaacgggctcaacggcaccaccagcctcgcccccatcatcggcgccttcctctccgacgcctacctcggccgctacctcgcgctcgccatcgcctccgtcgcctccctcatcgagatctggaagctaagccggcctggatcgagtgcagcacgaccctgcgcactactcacagtgactcggcaccaccgtcgccctcgctcagctgagtttccaggccatttaatgattgcgagacttggataccaagtagtaggacagctgtcagctgcaccgtgaacggggcatgttcctgctgacgatgacggccggcgcgaatagcctgcacccgccggagtgcagcgtgggcgagacctgcgagaaggcgacgtcgtaccagttcgcggtgctcttcgtggccttcgcgttcctggtgctgggctcggcggggatccgcccctgcagcatgcccttcggcgccgaccagttcgaccccaacacggagtctggcaagcgcggcatcaacagcttcttcaactggtactacttcaccttcacggccgccatgatgatctccgccaccgtcatcatctacgtgcagagcaacgtgagctggcccatcgggctgggcatccccacggcactcatgttcctggcatgcgtgctcttcttcatgggcacgcgcctatacgtgcgggtgacgcccgaggggagccccttcaccagcgtcgtgcaggtgctatcagccgcgctcaagaagcggtcgctgaagcagcccaaggacccgaagcaggacctcttcgacccgccgcacaccagcgccatcgtcaccaagttggcgcacacggaccagttccgctgcctcgacaaggcggccatcgtggcatccccggacgaggtgcgttccggcggcggcgcgcccgcggacccctggaggctctgcagcgtgcagcaggtggaggaggtcaagtgcctcatccgcatcgtgcccgtctggtccacggggatcatctactacgtcgccgtggtgcagcagtccacgtacgtggtgctctcggcgctgcagtccgaccgccacctcggccgcgccggcttccagatccccgccgcgtccttcaccgtcttcgccatgctcgcgcagacgctgtggatccccttctacgaccgcctcctgctgcccaagctccggaagataacgggcaaggaggaggggttcacgctgctccagcgccagggcatcggcatcgcgctctccactgtcgccatggtcatctcggccatcgtcgaggaccggcgccgtgccatcgcgctcagccagccgacgctcggcaccaccatcactggcggggcgatctcggccatgtccagcctgtggatggtgccacagctcatgatcctggggctgtcggaggccttcaacctcatcagccagatcgagttctactacaaggagatcccggagcacatgcgcagcgtggccggggcgctcgccttctgcaacctggcgctcggcaactacctcagcggcttcctggttaccatcgtgcaccggacgacggggtccgggcagaactggctggcgcaggacctcaacaagggccgcctcgacctattctactggaccatcgccggaatcggcgtctttaacttcatctacttcgtcatctgcgccaggtggtacaggttcaagggggccagcaactgatccgccgaggtaaccgtcgtctcacgatcacgacgagtgcgggcatgaatgggactcagctctatgcggtcctgatggcagtttgcttggtggcttgggtaattatgttatggccttggcagagcaacaggaaaaaaaaggggccttaaaataaggtcatgataattattttgtatctaccatagtagttgtttgatatcgacgcctctctctctctctctctctctctctctctctctctgttattactttatatttttgttactgtcctttcatttgaatctataggatggtcaaagtggctgatgaaagaggagaaagaaacaaaacagttggtttcttgttacttgtaagtggttaaactgaaatacaaatggatgtaagattgaatgaaagctttagctcagttaccagattatgattgcaa

SEQ ID NO: 4897 - DNA, 1858 bp, Zea Mays
cttcgatttcccctacgcaatcaaacaatgggcatgttcctgctgacgatgacggccggcgcgaatagcctgcacccgccggagtgcagcgtgggcgagacctgcgagaaggcgacgtcgtaccagttcgcggtgctcttcgtggccttcgcgttcctggtgctgggctcggcggggatccgcccctgcagcatgcccttcggcgccgaccagttcgaccccaacacggagtctggcaagcgcggcatcaacagcttcttcaactggtactacttcaccttcacggccgccatgatgatctccgccaccgtcatcatctacgtgcagagcaacgtgagctggcccatcgggctgggcatccccacggcactcatgttcctggcatgcgtgctcttcttcatgggcacgcgcctatacgtgcgggtgacgcccgaggggagccccttcaccagcgtcgtgcaggtgctatcagccgcgctcaagaagcggtcgctgaagcagcccaaggacccgaagcaggacctcttcgacccgccgcacaccagcgccatcgtcaccaagttggcgcacacggaccagttccgctgcctcgacaaggcggccatcgtggcatccccggacgaggtgcgttccggcggcggcgcgcccgcggacccctggaggctctgcagcgtgcagcaggtggaggaggtcaagtgcctcatccgcatcgtgcccgtctggtccacggggatcatctactacgtcgccgtggtgcagcagtccacgtacgtggtgctctcggcgctgcagtccgaccgccacctcggccgcgccggcttccagatccccgccgcgtccttcaccgtcttcgccatgctcgcgcagacgctgtggatccccttctacgaccgcctcctgctgcccaagctccggaagataacgggcaaggaggaggggttcacgctgctccagcgccagggcatcggcatcgcgctctccactgtcgccatggtcatctcggccatcgtcgaggaccggcgccgtgccatcgcgctcagccagccgacgctcggcaccaccatcactggcggggcgatctcggccatgtccagcctgtggatggtgccacagctcatgatcctggggctgtcggaggccttcaacctcatcagccagatcgagttctactacaaggagatcccggagcacatgcgcagcgtggccggggcgctcgccttctgcaacctggcgctcggcaactacctcagcggcttcctggttaccatcgtgcaccggacgacggggtccgggcagaactggctggcgcaggacctcaacaagggccgcctcgacctattctactggaccatcgccggaatcggcgtctttaacttcatctacttcgtcatctgcgccaggtggtacaggttcaagggggccagcaactgatccgccgaggtaaccgtcgtctcacgatcacgacgagtgcgggcatgaatgggactcagctctatgcggtcctgatggcagtttgcttggtggcttgggtaattatgttatggccttggcagagcaacaggaaaaaaaaggggccttaaaataaggtcatgataattattttgtatctaccatagtagttgtttgatatcgacgcctctctctctctctctctctctctctctctctctctgttattactttatatttttgttactgtcctttcatttgaatctataggatggtcaaagtggctgatgaaagaggagaaagaaacaaaacagttggtttcttgttacttgtaagtggttaaactgaaatacaaatggatgtaagattgaatgaaagctttagctcagttaccagattatgattgcaa

SEQ ID NO: 4898 - DNA, 1016 bp, Zea Mays
caaacaaacacccacatagtacagagcaaaaccgagcacagaaccacctttggatccacgaccatacatcaaaaactgctgattattggaaacatttcataatacaaagacaacaacttgagaatagaagtacacaacttatacttccatgccaaactggaacaggaaatagggtagtttggtgacaacattttccagacagaagaggatggaaccacaatcagtttgaggggaaagagtttcttattgatgcccaagtagaccttctgggcaaagatctgtaggcaaataaagaaaccataaggccatctggaaattcaaaataaaggaatttgaggagcacacatgtacgtcagattcttgataaaaacatatgttttgcatgttcacgctgacttagggggtgtttaaatgcactagagctaataattagttggctaaaaaattgctagtggaattagctaactagcaaatagttagctaactattagctaatttgctaaaagtagctaatagttcaactattagctagactgtttggatgtcttcaaataattttaacagctaactattagctctagtgcattcaaacatggtctcataagttaataaaaagattgtaggcggcttccagtctgttagggacgataaagagataccatgaatggctgatcaggatattccataattagcctaggaacaacaaggaaaaggtccattttactacttcaaactattcactttgctttttagaccccctatacgaaatataggccccattcaccccatccccccaaggtggtgttcggtttctcttgcaaccaaggagaatgggaggggttgacggggactaaatcccaaacaagtcaaaatcctcctaatcccctccaatccccatcaactccatggtttaggaatgaaacaaaaagttctaaaaaaaactttccaggccagattaaatatggtatctgtctttttttttcccttctactagttctattgagttttaggaacac

SEQ ID NO: 4899 - DNA, 755 bp, Zea Mays
gaaccaaatgtaatccgccccgaatttttaccggccaaatcaaaatcagcagagctctcgaccaacgaccaacagcgagataaataaaccctagatagaaccagcgcacaattcgtctaaatacaactctcagcagaaggctctatctattgtcgccaaataacaagcgtatcctgcaggaacccatccgaccatctcagcaattgagaccaaccaaaccgtcatgtccctaatcaatttgcccaaattcctatgacgacgggacagcatcgaaatctatccagcagaaaaacaggagcgcaccggaacgggtgttcaggaagacggcggcgagccagagtggcgggcgatgaggtcatcgtaggggtcccgacggccggcggcctggctgatctggggatcccaggagagctgcgagttgaagcggtcgaaggtccagaagccgtaggggcgcagagggaggctccacgccgccttagtgcgctcgcaccgctccttcatcttgtagacatgctcccgccgaacctggtcgcgcttgtccgggtcctccatcagacggaggatcatattctccgcgaagtccatgatgaaacccatcgccgccttcggtcgccctcttccccctctccggtgagcttgggatctgccggcgcgtcggtctctctctgtccccggcgagtcggtgccttaggtgggggtcggagtagagatttttgcaaccactctctttagcgggcttcacactgttgtcaccc

SEQ ID NO: 4900 - DNA, 4131 bp, Zea Mays
atgtcggcccccaattccaaccgcgacactgcgcagacccccggctcacgacacagtcgagtgcacggcggagacaatcacgccgacgagcaattactcaggttctacggttcgaacacagcgcggtatgaactcctagtgatcaaatacggtcccgcaagcgcggggaggaacttaccgccaagggtcgccggtgggagttcggttgcggcagtggtcgcctcggacgtcgatggcggcgccctcctcgtaccgcccagggtgatccatacaaagaaacgtaataggttgctgcataagagattgaatgatattgtctatgtttcctacaaccgaaggatgaagaccaggtttcaaataaggcgtgagaagaaagggaaaggttttgaccctttggtcattgaagagttcgattgggataatgagtgggctgattcctcctatgtgcagcctcaaggtgctcgtgggtgtgattgtggtgaggatgagaatggccttacatgggaacttgttgatcaagctgtgggtgcatcaagctcgctgcgaggccgaaatcttccaaggaatgccaacaagcgtgcaagagtttcacactcaaggtttgactttgaagaagattttggttcagccaatgaagaagaggaggaccaagatccacatgatgatgttgatgtgactgattctgaagatgcacatgatgatgttggtggagaaaacactgaggctgctccagatgagttcgaagatggatattgactcactaagagttggctgatttcagatttgcagcttacctatttttgtgcagtgcttcaatgcttcactgcttgagtgcttgtgcacttaatcaactagtcttataatcttttgattgatctatgtcgctaagtcattatggggctggactggaactaattatgtcactaagactagcagtctagcatatgttgctgctgctattttattcccaccaatgtattgtgggtttaatttgatatacctgtctgctgctgctattttatgtcttactgttttaatatgtcaatattcataggttaatgtagcttgcagcttgaaagaaaagaagaggggttggatcttcgataagagagagatggatcatggatgctacaagaacaacaaagagaagtgcagagtacataccaaagcatggacaacaaaaaggcttgtattgtattctctaaccttaccaattttgctattgcaagtgttagattgttaggattttttgcatatcctcgcctaggcgatcctcatatggcgtcgcctcgccacacgcctaactcgcctaggcgtttggaaggggggcggtcgccacgcctcgccttaacaccttaataaccttggaaacttgaactcacaaagtttctcttatttggtctctgtatggtggaattatgtcattttataatctttgttcgttcagtcagtcgttgtgaactctcttctaatcgctcacttgattggccatgttgtatcaagacatattgcatggagtaaaaaataatatcagttagccaaatcaaaaaaaatattatacagagagagcggagacaatcaataaaaaatcttgaatttttttttatgaatagtttacgtgggtattgttgtaagccatcgcaacgcacgggcaaccgactagtgttgcttaatgggactcctggagagcatattagacatcgaagaggcctgcgtcagggggaccctctttccctatgttgactgtgttgattatggatgttcttagcagtctctttaaggctgctgaaagtagggggctgctgcaaaatttggaaggggcaggggtccgtaataggctctccatctatgcggatgatgtggttctttttgttaaacccattgaggaggatctggattgtgttagaatgattttgaattacttggggtctgcttctggattggttacaaatatgcagaagagttatgccattcctataagatgtgtggggcaggtggtacgggagggctgcaatgtgttacagtgcagttctgccacatttgcctacaattatttagggctgccaatttcagataggaagctaaaaaggaatgatcttatgatatggttgataagattgcagatcgccttccaaattggaaggctaggcttctcaatctggctagtaggacggccatggtccgatttgtgctttcggccatcccggtctaccttctaattgctataaattaagtcaattgataaaatgcgaagagtttggaaaggacggaaggaagtgaatagtgggttgtcttgttccttgggatataatcacaaggccgcttagattgggtgggcttggagttcctaatttgcaacttaaaagttgggcattgcagactaaatggatatggttagaaaaaactgatccctctagaccgtgggttgggctaagtgttcatgtgcagaagcaagttaggcaattctttatgtcctccgtggtttctatgataggaaatggcgccaatacgcttttctggtcggacagatggttaaatgggaagacagtacaagatcttgcgcccgaggttatatgtatggtgggcagcaggaccatcacgtccagaactgttgcccaggtgctggctaattggcagtgggtttctgacattgtgcatcctctctccctgattggagactgcagcagttcttgtagttatgggatgctctttagaagggtggtgcttacccaggaagatgatagacatgtgtgggtacatacaacctctggacagttctcttccaggtcttgttataaggcgttttttatgggatccatctcctttgaaccatggaaaaggttgtggaagtcatgggctccccctaaatgcaattttttcctttggttggcagtaagtgctggactgctgataggcttcaaagaaaaggactaccgcacccagtggtatgtcagttatgtgaccaggagtttgaaaccgtccagcacctattgtgtacgtgcagttttgctagacagttttggcatatcatcctttcgcctttgatgttgggacatctcacacctgatagtgatgagacctcctttgctgcgtggtggagcaatgcgcatataaaggtgcacaaaagattgagaaaaggtgtccatactccatagtgtcataatcctgggaacttggtgattatggcttcatcggaacagccgtctttgatggaataaatccttccatgagcataatccaaatagtgtttatggatgaagtggagtgctggagtagggctggtgcaaagcatctgcaaaggcttggtcttcctgctgcttttaatttggtcagggataatcctagtgattagggctgtggtagattgggctggccgctctcttttactcttgttggcagcttctgaagaggaaagagttatatttctggttgctgtcatggtccagttttctttctttgtctgttttttgccttgtttgggcattgtatttggtccattttggacttttctttctcttaatacattgatgtgcagctctcctgcgcgttcagccgttcaagaaaaaaaaagggggctgcccagctcttcaatattcttttccaacttccaaggctcaaaatatttagctccgatgaaaaaaactttgtaggcagataaatgttgacagcatcttaccgcagcaaggggacccatcaaattttgacagcatcagtgagtggtgggttctgacagcctctctcatcgcaaaagaccgaagaagagacttcaacggaatcacaatctacaccatgtggaacatttggaaagagtgtaatagaagaattttcgaccatagctcactgtcggcgttgcaggtggcggggaaaataaaagaggccttacgcttttcaggagtgttgttgctctctagcagcctaacctagtggttttgggcccctgatgttcttttagttttcccggtgggtcttttcaagcacaagatgtgctcctagtgtgtgtgatctgtgatccatgatctttgttctataactcttttccctctttaatgaaaggcagagctactgccatttgcgtttcaaaaaaaagctttgtaggcagatttggagctaaacaaaccattgcagttaaat

SEQ ID NO: 4901 - DNA, 516 bp, Zea Mays
gtgactgtcaatttcctataggctacaggagtgtctcaacaactatggcagcgagatcagcaagtgccagttctacctagacatgctgaacgagtgccgccgtggtggtgtgtctgcctaagctgcctctggggttattcatggattttctttcggtgatgctatctcattaataagataccgtgaaacttttgtctccacagcttgaagctaaacttcctgggattaatacattttgttatcctatgctgttggagcagacttttgtctcttgatcataaatatttaaacgaacctgttatgttggaatatgttgtacatgcgtacgaccatcggctccacagccattgggatgcgatgggttcatctatcagtttacaaaaccgttcggttttggcggtaaatcggtcagtttactgaaaccgccgctgcccggttttggttaaccatcgttttttaaattttgcgctaaattttaaaaaaaattgaaaaaaatcataaaaaacaaaaaaactg

SEQ ID NO: 4902 - DNA, 1875 bp, Zea Mays
ccataaccataagctaaaaaaaccaaagaggctaatcttggttagagtcgagactcgagacttcgagttccctctccgttataaaaccgaacgctcagggcgctccgtgttcaatctccttgcccgttgtgctctctctcttcattcgttcccggcctcaccccgagccagtcgtctcgctagggtttcgccgccgccgccgccatgcctcgccgcagctcaggcggttcagacaggggcataaagaaaatctggatcccgacggggatcgtattcctgactgggaagggttatttccattgaccctttctcgttcggattctgaatcccctcgagggaagggttatttcctttgatccttcctcgttcggattcacatagatttatactactgtgttttcttatgaggcgtatattcttgaaagttattcacctgcgtagtggattgaatcttctgatgttgcatttatgtagctgtattgtcagttgatcagtgcctctttgagtaaccattacagtccctgggtactgtcttggtttagttagggggcgcatagcaatggccatctgataaccactcaggccttttgagggggcgcctctgtcataccaagaattgcccccaagcagccctagacatgtatctacattatcacaatgcaatgctttttttcagttgttttttttgacttactaccatatgccttttgagtagccattatagttgtatatactatcttggtttagttaggaggcacatagagatacgtgacaaagtcaccttggctgatcagagcggcacatcaagcatttgttggatgtgtttttttttttgaaaaaccttacattgtagtgtcatcatctttatttttgcttctctgcttatgaggtttattgaatggtatacatgttatgcaaaacattcgtaagactgcttctgtacttgattaaaatcaaggtttcagggagcaaaggaatttctgaatatatttgttataggactatgattttagttactaacagtattacttagtcgcaaagaatgtgcctcttgaataaccagttgctttgattactatgcttgcatttggttcagacaggggcacataataaatgggatcatttgaggaaggattcttgtctttttttgtcccttcttagattgattcctatagttaattgctattctcgtcatcataattttgctggtggaggatgtggctgttccaggtttatagtatcatggaaggtctgccccacgcccagctccccgtgctgcttcactgaggaacccgccacagccagcacgccaggctcctcctccagctcctgttcgagatggtggtggctccatgtttggaggaattgggtccaccattgctcaaggtatggcgtttggcacgggtagtgccatggcacacagggctgttgactctgtattaggtccccggaccatccagcatgagactcttgccacagaagctcctgctgctgcccctgctgctccagcgatgaatgctgatgcttgcagcttccattctaaggctttccaagattgtctgaacaactatggcagcgagatcagcaagtgccagttctacctagacatgctgaacgagtgccgccgtggtggtgtgtctgtctaagctgcctctgggattattcatggattttcttttcggatgagggtatctcattaataagacaccgtgaaacttcgaccatctccacagcttgaaaccatacttcctgggattaatttattttgttatcctatggtgttggaacagacttttgtctcttgatcataaatatttaaacgaacctgttatgttggaaaaatcttaacaagatagaactcatacaaagaaaaga

SEQ ID NO: 4903 - DNA, 1655 bp, Zea Mays
atgccggaggaggcggtcggcgatgctcatgaggatgtccttgctgtactccgggtggccctggacgcccatggcgcggtcccccaggcggaacatctcgacgcgggtctggtccgaccgcgccagcacctcggcgccggcgggcagctcccacacctcgtcgtggtggaactcgatcaccggcatgtgcaccggcagcttcagcggcgcgaacagccgcgccgccgccgccgtcgggtggatgcagctcaccccgatgtcccagcccttggtcgaccgcccggtgcgcccgcccagcgcccggcacaggatgcggtcaaggcgtgccctgaattcagacgaagtggtgagattgcgtgcgctgggacttgggagggcacacgcagtcgcgcacgccctttgggtgattggtccggccggccccgggccggtacgacgctagcagtagcatcgtcacctcaaaagcaaccgctgcgcgagacgcgccacgccatctgcgttcttccttcctcctccggtccccggggcgggatttggttcaaaatagaacggaattaccggggttccgtttggaggaactgctaagacccaaccctcctctgcgagatcctgcagagcaaagagccaaagacacacacacactgtgacactgtgtgtgcctccaacaacgacagccgaggtgccacggccacgtcacagcacgtgaaccagcgtcttaaacgagattagcgtggagtttatatgcacttccaagcagtagcagtccgcttgctgcggaccccgaactatcgtgctggactggaccggaatggactgaaagaaaacgacgtggtgacagcataaagcaagagcggtgggagtgggacgggggctgggctggtgtctacactctacacttctacagatagccagccagccacccacgcgcgaggtttctagccacaatcacagattcacaggccttctccgtcgcagcgggtgggtcccgcacgcatcggactccgctgggatgcgctgtattttcctctgttttgctgagaatgcgggcgcactaccagtagtaaggcctacattttttattaaaaaaaacgatcttctattaaaaaaaaggtaatggcgtattgcattaacgcaagtatatatattaacaagattgttttgttagcatagcttgatatttgctgtttgagggctcatatttgctggaaaagataggcatctttccgtcccatgttgacactcaccaattacgcaggaggtaccgtttacttgtcaaagcgcacactacattccgtggtataaaatttatggttcgtcgtgaaaaggaagaaaaaaaacaggtccaatttttgaccaagcgccgggtggagggtggaggggaaggcgctaccgcgctagccgctaggctagaagagcggcagccccaccagctggtgccgctgccccctgccccgccccatcgaggcaacgacggagaccccagctacgcgcggaaggaactagacgaccccttcaaacgaggggagagaaaaaaaaaccaaccgcacccgagccgaacagcaagcccgcaggaacgggagacgcgcgcatggaccgggaccggatgggatcatgggattggcacctggtggccgaagcagacgccgaggatgcgc

SEQ ID NO: 4904 - DNA, 2658 bp, Zea Mays
ctttccctctggtcgtccagttaaggcccgcttacatcatcacacggccttgctggttttcttcggtgtcgcgcgccgccggctcagcctttctgtcatcaccggcccatcgaaggaagctgcccacgaagcaacgctgagtcgctgacgccatcttttgcgcgcggcgcgcctcgtccccctggacgcccctgctgcctgctcttttcgcgtcgccggtgtagtgccccacgaccacgatcatcaacaacaaatctctaaccgctgccaccgatccatgccgtcgtcacccccgcggctggcgatggagcatcgccgccgccagcctccagcgccctccgcgcccacctacctcgccgcaacgctcgccttcctcaccctcgccgcggtcgcctacttccgcgccgccttcccccgcttcccgcacccgccggccacccgcgggtgccgccacgacgccgaggggtcctggtccgccggtgtcttccttggggactcccccttctccctcaagcccgtcgatggaggatctctagtggccctggagcggcatggccagtggcgaatccggtggtgacgtgcgccgatgtggcggaggctggattccctagcagctttgtcgccaacccatttctcttcatacagggagactcaatttatatgtttttcgagaccaagaaccccattgcgtcacaaggcgacattgctgctgccgtgagcaaggatgccggcacaacatggcagcagttgggtgtagtgttggatgaggagtggcacctttcttatccatatgtgtttagttatggaaacgagacttacatgatgcctgaaagcagcaagaaaggaaaccttaagttatatcgtgccgttgactttccccttaagtgggagttagaaaaggtccttctggagagaccccttgtagattcggtcatcatacattccaagggttcctattggctcattggatcagatttaagttcttatggtgcaaaacagacaggtgaactctttatttggtacagcagctctcctcttggtccttggagttcacacaagcagaacccaattcgtaatacaggcaacaggccaagtgccagaaatggaggcaggccattcatttacaatgacaatctttatcgcgtaggcaaagatcgtggtggtggatctggctataccatccaagtattcaaagttcaagtcctaacagaagatcattacaaggaagttgcagtcccatttgtgcttgacaaacccctcaagggccgaaacgcatggaatggtgcaaggtcccatcactttgatgtccagcagcttccatcaagtcaacattggattggggtaatggatggtgacagagtgctctcaggtgactcaattcaccatctgactataggctgtatgttttatggtgctgcttgcattttggtccttctacttggtgggcttattggtgcaatcaagtgcaccttaccacttagatggtatttaccacatactgagaaacggagtgacaactttgatatagagaagcaggtattgctgtgccataagcttagttggcttatctgcaatgtgaacaggttgggatctcttattggtgggaaaattaattacagagcttggaaagaccgagtttatatagcttttataatattggtatcggtagtcctaacttttttggggactaactacatctttggtggcgatggtgcagaagagccatatcctattaggggtaggtattcacaattcacattgttgaccatgacctatgacgcccgattttggaatctgaagatgtttgtggagcattactctaaatgtgcatcggtgagggagattgtagtggtctggaacaaaggtcgagccccagtgcaaggtgaattgaagtctatggtgcctgttaggatcagagttgaaaacaataatactctgaacaacagattcaaaattgacaaagaaattaaaacaggagctgttatggagcttgatgatgatatcatgatggcatgtgatgacttagagcgtgggttcaaggtatggagggagcaccctgatagaattgtcggatactatccacgccttgctgagggctggcctctggaataccgcaatgagaggtatgctcggcaacaaggaggttataacatcatactaacaggagcagcatttatggatcatgaactagcctttaagaggtactggagcaaagaggctgagattggcaggcagattgttgatagtttctttaattgtgaggatattctcctaaatttcttatttgcgaatgcaagctcggcaagcacagtggagtatgtaaaaccagcttgggcaattgatatgtctaagttctcaggagtagccattagtcgaaacacgcaggaacattaccatgctaggagcaaatgccttgctatgttttcaggaatctttgggaatttgacttccaagaggttttttagcagccggggtgatggctgggatgtatagtggcatagataattaggtagctttttcttgatccttaaaatgtctctttagtttataaggtagtcaggtgagtattggaccagtgcagtgtcattcatgtaactattaactgtcaccagtttgctgtataagtttagcacatatccactatctgtaagtttttca

SEQ ID NO: 4905 - DNA, 1108 bp, Zea Mays
gttagggcctgtagatccctcaaatccctaaccgacccgcgaccccgacccgattgccgtacctccttccgtgtggcatataaatccgacgcgccgacgcctcgattcctcgcctccccgagagcccccgtttctgtcacaaatcgccactaaaaccctagccttccgccatggccacctcccctgccgcctcgtcctcctccgctccgaccgcctccgcggtggctgcggctacgatggctgttgaggccaccgacgggccggtgctcagcgtagtatcgaagcgtctccgcgcactgcggaagaagtacaaccgaatcacgcagatggaggagtcgctcgccgccggcaagacgctcaaccgagagcaggaggaggttctccgctccaagcccgtcgtcgccgctctgatcgacgagctcgagcgcctccgccctccgctcgcctccgccctcgcggaggagctctcctcccgccccgcccccgccccctccgccgcttcctcctccgactcagattcgtcagtccaggacttgcttgcgctcgtctacttcggctccctctttgacgtcaagcagcaaagcgacttcgtctctttggtttacacgcgcgaactcgagcggagcagctgcctcacttatgactacgtcggggatgatccggaggacagtctcgcggagaccgatctgaacgcggtttctgcccttgcctccctcgccgcgttgcgccctcctgctgcagccggagtctcgcaccgtgacgcccttcaggcttgtgctcatcacgcccgcctctggctctgccgtgcggatgaacccatccatcctgactccaccatcacatatgctggggtgagggcaaagctggataggatcatggcatcgggctacttcacagcgcagctagaaatgaggacaccattggatctggctgctgcagtggcaagttttggagctggaggtgtgcaggtgcaagagagcatggttgtgtcacctcaggcaccggaagcagtggaggagagccaggctgttgaaggacacaaggtctgctggagcttgggaaggggcagggtggagactacagttggtgaaccttaagacattcgccg

SEQ ID NO: 4906 - DNA, 1742 bp, Zea Mays
gttagggcctgtagatccctcaaatccctaaccgacccgcgaccccgacccgattgccgtacctccttccgtgtggcatataaatccgacgcgccgacgcctcgattcctcgcctccccgagagcccccgtttctgtcacaaatcgccactaaaaccctagccttccgccatggccacctcccctgccgcctcgtcctcctccgctccgaccgcctccgcggtggctgcggctacgatggctgttgaggccaccgacgggccggtgctcagcgtagtatcgaagcgtctccgcgcactgcggaagaagtacaaccgaatcacgcagatggaggagtcgctcgccgccggcaagacgctcaaccgagagcaggaggaggttctccgctccaagcccgtcgtcgccgctctgatcgacgagctcgagcgcctccgccctccgctcgcctccgccctcgcggaggagctctcctcccgccccgcccccgccccctccgccgcttcctcctccgactcagattcgtcagtccaggacttgcttgcgctcgtctacttcggctccctctttgacgtcaagcagcaaagcgacttcgtctctttggtttacacgcgcgaactcgagcggagcagctgcctcacttatgactacgtcggggatgatccggaggacagtctcgcggagaccgatctgaacgcggtttctgcccttgcctccctcgccgcgttgcgccctcctgctgcagccggagtctcgcaccgtgacgcccttcaggcttgtgctcatcacgcccgcctctggctctgccgtgcggatgaacccatccatcctgactccaccatcacatatgctggggtgagggcaaagctggataggatcatggcatcgggctacttcacagcgcagctagaaatgaggacaccattggatctggctgctgcagtggcaagttttggagctggaggtgtgcaggtgcaagagagcatggttgtgtcacctcaggcaccggaagcagtggaggagagccaggctgttgaaggacacaaggaggatgaagtcctggtgcatccaactgatgaagttcctccagctgagacagagcaggagcaggagacatttgatgctgatgtgaaggatcaggagcaaaaggaccaacaattcatccagcggcggtcttaccagaaccagcgtggtggtggtcgtggtggcagcaggagaggctatcctaatggtcgtggaggacgtggtggccgaggtggcgggtaccagaatggccgtggtggataccagaatggtcgtggcggtgctggcgggtactactacgaatctggatactaccagccgaggaactacaacagaggccggggtggtcgctccggcggtggcaactcttactacaacagccatggtggaggtgcacaggggcatcatcctgggagtgttgagctgggcgcaaacgcctagcttcgctgactgttctgtttgataatgaggagcgagtgagtcgtgccattttgttattatagaactaacttagcctgttattacgtcaccgttggtcccatccgtgagtctttttgctgctcgagtgactgcatatggtcggtcggtattgaggaaatactctgggaaagtagtttcaggtcatattcgttttctaagttacgtttttttttgtgttaatatgcccttatttcttaattattatatactctgctagaggtgtcgatgccgccaccagatttt

SEQ ID NO: 4907 - DNA, 1618 bp, Zea Mays
gttagggcctgtagatccctcaaatccctaaccgacccgcgaccccgacccgattgccgtacctccttccgtgtggcatataaatccgacgcgccgacgcctcgattcctcgcctccccgagagcccccgtttctgtcacaaatcgccactaaaaccctagccttccgccatggccacctcccctgccgcctcgtcctcctccgctccgaccgcctccgcggtggctgcggctacgatggctgttgaggccaccgacgggccggtgctcagcgtagtatcgaagcgtctccgcgcactgcggaagaagtacaaccgaatcacgcagatggaggagtcgctcgccgccggcaagacgctcaaccgagagcaggaggaggttctccgctccaagcccgtcgtcgccgctctgatcgacgagctcgagcgcctccgccctccgctcgcctccgccctcgcggaggagctctcctcccgccccgcccccgccccctccgccgcttcctcctccgactcagattcgtcagtccaggacttgcttgcgctcgtctacttcggctccctctttgacgtcaagcagcaaagcgacttcgtctctttggtttacacgcgcgaactcgagcggagcagctgcctcacttatgactacgtcggggatgatccggaggacagtctcgcggagaccgatctgaacgcggtttctgcccttgcctccctcgccgcgttgcgccctcctgctgcagccggagtctcgcaccgtgacgcccttcaggcttgtgctcatcacgcccgcctctggctctgccgtgcggatgaacccatccatcctgactccaccatcacatatgctggggtgagggcaaagctggataggatcatggcatcgggctacttcacagcgcagctagaaatgaggacaccattggatctggctgctgcagtggcaagttttggagctggaggtgtgcaggtgcaagagagcatggttgtgtcacctcaggcaccggaagcagtggaggagagccaggctgttgaaggacacaagaatgagaaggaagattctcaggctacagaaatctacaatgatcatcctgttgttgactctgaacatgtggaggatgaagtcctggtgcatccaactgatgaagttcctccagctgagacagagcaggagcaggagacatttgatgctgatgtgaaggatcaggagcaaaaggaccaacaattcatccagcggcggtcttaccagaaccagcgtggtggtggtcgtggtggcagcaggagaggctatcctaatggtcgtggaggacgtggtggccgaggtggcgggtaccagaatggccgtggtggataccagaatggtcgtggcggtgctggcgggtactactacgaatctggatactaccagccgaggaactacaacagaggccggggtggtcgctccggcggtggcaactcttactacaacagccatggtggaggtgcacaggggcatcatcctgggagtgttgagctgggcgcaaacgcctagcttcgctgactgttctgtttgataatgaggagcgacatttggaggtgattgttgacctgttcgttggcctcgaagtgtttttttttgtt

SEQ ID NO: 4908 - DNA, 609 bp, Zea Mays
gccaggacaggggcgggccgcaatggtggtgatggagggtaatggcggcgccggtaggatcaccattggcgtctgtgtcatggagaagaaggcgttctcttctccaatggagcagattctcgagcggctccgcgcgtttggagaattcgagattataatatttggagataaagttattctcgacgatcctattgagatttggccaaactgtgattgcttgattgccttctattcctctggttttcctctgcaaaaggttcaagcatatgctgctttgagaaggtatattttttattctctatttctttatatatctctttcaaatggtaactattcttgtaagcacgtctccattttcttaataatgtcttaatgctgagggagagggatgtaggggcatcaacatttatttgtttgctttgcaagtttctaacaacctcatccttcgagtggcttatttgtattcagtctgcttatctgttttcatataagaagcttaataaaggaataaaagaaagagactcatgttgcttagtgttggggcacaatttgtagtagctttttccttaggaatgcaaccacctctgggaaagcagtactatttaggag

SEQ ID NO: 4909 - DNA, 615 bp, Zea Mays
cgggccgcaatggtggtgatggagggtaatggcggcgccggtaggatcaccattggcgtctgtgtcatggagaagaaggcgttctcttctccaatggagcagattctcgagcggctccgcgcgtttggagaattcgagattataatatttggagataaagttattctcgacgatcctattgagatgtatgtaatgagaactcagttggccaaactgtgattgcttgattgccttctattcctctggttttcctctgcaaaaggttcaagcatatgctgctttgagaaggtatattttttattctctatttctttatatatctctttcaaatggtaactattcttgtaagcacgtctccattttcttaataatgtcttaatgctgagggagagggatgtaggggcatcaacatttatttgtttgctttgcaagtttctaacaacctcatccttcgagtggcttatttgtattcagtctgcttatctgttttcatataagaagcttaataaaggaataaaagaaagagactcatgttgcttagtgttggggcacaatttgtagtagctttttccttaggaatgcaaccacctctgggaaagcagtactatttaggag

SEQ ID NO: 4910 - DNA, 922 bp, Zea Mays
gcgccggtaggatcaccattggcgtctgtgtcatggagaagaagcgcgtgcgtctcgatttccagcgcgcgttctcttctccaatggagcagattctcgagcggctccgcgcgtttggagaattcgaggatacagccacaacgcgaccatggccggtgaggcggacgaatggggcgggtcaatgggtgggcgcgagcggggctagcgtggggcgtggcctgggtaggagtgggctggggcaggtgcagccgatggggccggggcacaaccaaaacacgtggccagacgatgccgggggcagccacggcgtggccatggctggcgaggtggccgaccagggtgggcccggtgtgggggcgcgactgaggcagaagcgggctggggcgggcacaaaggaagaagaaaaggcgatggaggaagaagtaaaaacgaaacgaactggtacacgtgtaataggtgtgaagattataatatttggagataaagttattctcgacgatcctattgagatttggccaaactgtgattgcttgattgccttctattcctctggttttcctctgcaaaaggttcaagcatatgctgctttgagaaggtatattttttattctctatttctttatatatctctttcaaatggtaactattcttgtaagcacgtctccattttcttaataatgtcttaatgctgagggagagggatgtaggggcatcaacatttatttgtttgctttgcaagtttctaacaacctcatccttcgagtggcttatttgtattcagtctgcttatctgttttcatataagaagcttaataaaggaataaaagaaagagactcatgttgcttagtgttggggcacaatttgtagtagctttttccttaggaatgcaaccacctctgggaaagcagtactatttaggag

SEQ ID NO: 4911 - DNA, 542 bp, Zea Mays
cgcgtgcgtctcgatttccagcgcgcgttctcttctccaatggagcagattctcgagcggctccgcgcgtttggagaattcgagattataatatttggagataaagttattctcgacgatcctattgagatttggccaaactgtgattgcttgattgccttctattcctctggttttcctctgcaaaaggttcaagcatatgctgctttgagaaggtatattttttattctctatttctttatatatctctttcaaatggtaactattcttgtaagcacgtctccattttcttaataatgtcttaatgctgagggagagggatgtaggggcatcaacatttatttgtttgctttgcaagtttctaacaacctcatccttcgagtggcttatttgtattcagtctgcttatctgttttcatataagaagcttaataaaggaataaaagaaagagactcatgttgcttagtgttggggcacaatttgtagtagctttttccttaggaatgcaaccacctctgggaaagcagtactatttaggag

SEQ ID NO: 4912 - DNA, 482 bp, Zea Mays
cttggtatattttttggaggactaattataatatttggagataaagttattctcgacgatcctattgagatttggccaaactgtgattgcttgattgccttctattcctctggttttcctctgcaaaaggttcaagcatatgctgctttgagaaggtatattttttattctctatttctttatatatctctttcaaatggtaactattcttgtaagcacgtctccattttcttaataatgtcttaatgctgagggagagggatgtaggggcatcaacatttatttgtttgctttgcaagtttctaacaacctcatccttcgagtggcttatttgtattcagtctgcttatctgttttcatataagaagcttaataaaggaataaaagaaagagactcatgttgcttagtgttggggcacaatttgtagtagctttttccttaggaatgcaaccacctctgggaaagcagtactatttaggag

SEQ ID NO: 4913 - DNA, 3319 bp, Zea Mays
ggtggatccaaacatgaccgggaatggaaccagcataccgacgctcgttatgtgcacgacgcctcctaagatgcagcatctggagaagtatggaattcctgtgcccagttatgctcttgtcaatagagaatatccggaccaagagctagactacttcatcgagcaagaagattttgttgaggtccatgggaagcggtttttgaagccttttgtggagaaacctgtcaatggggatgatcaccgaataatgatatattatcctagttctgctggtggtggaatgaaggaattattcagaaaggtgggtaaccgatctagtgaatttcatcctgatgttaggagagtgagacgtgaaggatcctacatatacgaggaattcatgcctactggtggcactgatgttaaagtttacactgttggcccaggatatgcacatgctgaggcacgtaaatcgcctgttgttgatggtgttgttatgaggaaccctgacggcaaggaagtacgataccctgtacttttgacccctactgagaaacaaatggcaagagatgtctgcaatgcttttagacagatggtttgtggttttgatctcttaagatgtgatgggagatcatatgtctgtgacgttaatggatggagctttgtgaagaactcatataagtattatgatgatgctgcttgcatcttgagaaaaatatttcttgatgcaaaagctcctcatctttcatcaaccatccctccaactcttccttggaagtctgaaccagttcagcccactgaaggtcttacacgacagggaagtggaattattggtacatttgggcagtcagaagaactgcgctgtgtaattgttgtaatacgccatggcgatcggacaccaaagcagaaggtgaaattgaaagtgacagaagaaaagcttctgaatttgatgttgaagtacaatggtggaaaaccaagagttgagacgaaactaaaaagtgctgtacagttacaagacttgctggatgctacaagacaacttgtaccaccaactaggtctggtcgggagagtgatagtgatgctgatgatattgagcatatcgagaaacttcgtcaagtcaaagcagtcctagaggagggtggacatttctctggcatttataggaaagtgcagctaaagccattgaaatggataaaagttccaaagcgtaatggtgatggtgaagaggaacgaccgattgaagccctgatgattctgaaatatggtggtgtgctcacccatgctgggagaaaacaggcagaggagctgggaagatttttcagaaataacatatatccaggtgaaggaactggtttgcttcgtctgcatagcacttatagacatgatttaaaaatatacagctcggacgaaggtcgtgtacagatgtctgcagcagcatttgcaaaaggccttcttgatttggaagggcagttgactccgatactggtatctttagtaagtaaagactcatctatgctagatggactagaagatgcaagcaccgagatggatgaagctaaggctagattgcatgagattattatttcaagtgagaaagcaaagaacacagaagggccagtggaatttccatggatggttgatggtgcaggattgcctgcaaatgcttcccagctcctgcctaagatggccaagttgacgaaagaagtgacttcacaagtaaagctgcttgctgaaggtgaagatgaaagacttgcgttgacgagcacattttcaaaatatgaccaggcaaaagctcttggaaagacaactattgatgtggctcgtattgctgccgggttgccatgtggtagtgaaagcttcctcttgatgtttgccagatggagaaaacttgagagggatttatacaatgaaagaaaggagtaaagtgtttaacctctggatgtttagaaatcaatatagtgttttattctacttttgttaaagtcactcatgatgctttatttcataatgcagccgttttgacattacacagatcccagatgtatatgattcctgcaagtatgaccttttgcataatgctcatctcaatcttaagggtttggaagagctattcaaagttgctcaaatactcgctgatggtgttattccaaatgagtatgggatcaacccaaagcaaaaactgaaaatcggctcaaagcgcgccgtttattgggaaaaatcctaatcgatctacgcaacactcgtgaagaagctatcagtgttgccgaaccaaaatttattgaagacgaagctctattcctaccaacaaaagaagcagagcaccagcagaaggttcatgttagaaatgaggatggaagaagatctagctctacgagtgagaagtcattggaccaagaagatgaagatgatagagaaactaaataccgattagatcccaagtatgccaatgtaaggacacctgagcgccatgtccgcactaggctttacttcacatcggaatctcatatacactcattgatgaatgtccttcgttactgcaatttggacgaaagtctacaaggagaggaaagccttgtctgccagagtgctttggaccgtctacatagaactagggagcttgattacatgagtaatattgtgcttagaatgtttgaaaacatagaggttcctttggaagatgagaagaggttcaggattgaaatgacgttcagtcgtggcgccgatctcagtcccctagaggacaaaaccagtgaaagttcttccttgctccaggagcacaccttgcccataatggggcccgagagactgcaggaagttgggtcctgcctgaccatggacaagttcgagaaaatggtgcggccattcgccatgccgccggaggacttccctcctgccgctccgccacaagccttgggctacttctccaaaggggcaggggtgcttgaaaggttggctagcctctggcctttccacaagagcgctaacgggaagtagctggaagctaacaaatccctgaaaccagttcatgtggttattcttgttctgtaacactttctgcacgccagcccaattttgacgatctgaatcatagtgaaaattttgctggttctttttcatgagcgcgagacataattgtgctatcatgttgcttgcatggatctgagatttaagggtgcgtttggttgctggatagccaaaacaggaatgtcccctggtatcctctcttgtccctccaattttaaggaacaactggggacaatactagaataattctgtctcaatccttgatcctgaactaaacaaacttatttaagtgatcatcccatcatgtcatgtcct

SEQ ID NO: 4914 - DNA, 3690 bp, Zea Mays
ctttgagctgcatgatgtcaattttgtaggtataataatatatatttgagctatcatatacatgattatatatttcttattttttggtttgtcgaacggtttgataactaatattatcgggacaaactatccgacaaatccgttatctacccgagtaatttccgatatatgtttttacccgcccgaatcattacccaatcccatcctgaattttaactatccatactcgattcagtatccgagagaatattagggtaggatacgagatgatctagtatccgcctgtatttcgtcccgttttcactgctacttgggagcctccttcctcactcgcccgcttgtaaccactattacgagcattgagcaacaaaggtgctggtagtgtgagccgtcgaagactggatgtggggacgttctacccgaatcagtataaatatcgcgctcactgagctcaacatccggaccccagaacgtgcacaaacaaatttacttgtcggagtaggttcgaaacaccgacatagtgtttatttaagcgagcatctggagaagtatggaattcctgtgcccagttatgctcttgtcaatagagaatatccggaccaagagctagactacttcatcgagcaagaagattttgttgaggtccatgggaagcggtttttgaagccttttgtggagaaacctgtcaatggggatgatcaccgaataatgatatattatcctagttctgctggtggtggaatgaaggaattattcagaaaggtgggtaaccgatctagtgaatttcatcctgatgttaggagagtgagacgtgaaggatcctacatatacgaggaattcatgcctactggtggcactgatgttaaagtttacactgttggcccaggatatgcacatgctgaggcacgtaaatcgcctgttgttgatggtgttgttatgaggaaccctgacggcaaggaagtacgataccctgtacttttgacccctactgagaaacaaatggcaagagatgtctgcaatgcttttagacagatggtttgtggttttgatctcttaagatgtgatgggagatcatatgtctgtgacgttaatggatggagctttgtgaagaactcatataagtattatgatgatgctgcttgcatcttgagaaaaatatttcttgatgcaaaagctcctcatctttcatcaaccatccctccaactcttccttggaagtctgaaccagttcagcccactgaaggtcttacacgacagggaagtggaattattggtacatttgggcagtcagaagaactgcgctgtgtaattgttgtaatacgccatggcgatcggacaccaaagcagaaggtgaaattgaaagtgacagaagaaaagcttctgaatttgatgttgaagtacaatggtggaaaaccaagagttgagacgaaactaaaaagtgctgtacagttacaagacttgctggatgctacaagacaacttgtaccaccaactaggtctggtcgggagagtgatagtgatgctgatgatattgagcatatcgagaaacttcgtcaagtcaaagcagtcctagaggagggtggacatttctctggcatttataggaaagtgcagctaaagccattgaaatggataaaagttccaaagcgtaatggtgatggtgaagaggaacgaccgattgaagccctgatgattctgaaatatggtggtgtgctcacccatgctgggagaaaacaggcagaggagctgggaagatttttcagaaataacatatatccaggtgaaggaactggtttgcttcgtctgcatagcacttatagacatgatttaaaaatatacagctcggacgaaggtcgtgtacagatgtctgcagcagcatttgcaaaaggccttcttgatttggaagggcagttgactccgatactggtatctttagtaagtaaagactcatctatgctagatggactagaagatgcaagcaccgagatggatgaagctaaggctagattgcatgagattattatttcaagtgagaaagcaaagaacacagaagggccagtggaatttccatggatggttgatggtgcaggattgcctgcaaatgcttcccagctcctgcctaagatggccaagttgacgaaagaagtgacttcacaagtaaagctgcttgctgaaggtgaagatgaaagacttgcgttgacgagcacattttcaaaatatgaccaggcaaaagctcttggaaagacaactattgatgtggctcgtattgctgccgggttgccatgtggtagtgaaagcttcctcttgatgtttgccagatggagaaaacttgagagggatttatacaatgaaagaaaggaccgttttgacattacacagatcccagatgtatatgattcctgcaagtatgaccttttgcataatgctcatctcaatcttaagggtttggaagagctattcaaagttgctcaaatactcgctgatggtgttattccaaatgagtatgggatcaacccaaagcaaaaactgaaaatcggctcaaagatagcgcgccgtttattgggaaaaatcctaatcgatctacgcaacactcgtgaagaagctatcagtgttgccgaaccaaaatttattgaagacgaagctctattcctaccaacaaaagaagcagagcaccagcagaaggttcatgttagaaatgaggatggaagaagatctagctctacgagtgagaagtcattggaccaagaagatgaagatgatagagaaactaaataccgattagatcccaagtatgccaatgtaaggacacctgagcgccatgtccgcactaggctttacttcacatcggaatctcatatacactcattgatgaatgtccttcgttactgcaatttggacgaaagtctacaaggagaggaaagccttgtctgccagagtgctttggaccgtctacatagaactagggagcttgattacatgagtaatattgtgcttagaatgtttgaaaacatagaggttcctttggaagatgagaagaggttcaggattgaaatgacgttcagtcgtggcgccgatctcagtcccctagaggacaaaaccagtgaaagttcttccttgctccaggagcacaccttgcccataatggggcccgagagactgcaggaagttgggtcctgcctgaccatggacaagttcgagaaaatggtgcggccattcgccatgccgccggaggacttccctcctgccgctccgccacaagccttgggctacttctccaaaggggcaggggtgcttgaaaggttggctagcctctggcctttccacaagagcgctaacgggaagtagctggaagctaacaaatccctgaaaccagttcatgtggttattcttgttctgtaacactttctgcacgccagcccaattttgacgatctgaatcatagtgaaaattttgctggttctttttcatgagcgcgagacataattgtgctatcatgttgcttgcatggatctgagatttaagggtgcgtttggttgctggatagccaaaacaggaatgtcccctggtatcctctcttgtccctccaattttaaggaacaactggggacaatactagaataattctgtctcaatccttgatcctgaactaaacaaacttatttaagtgatcatcccatcatgtcatgtcct

SEQ ID NO: 4915 - DNA, 3026 bp, Zea Mays
taagcatctggagaagtatggaattcctgtgcccagttatgctcttgtcaatagagaatatccggaccaagagctagactacttcatcgagcaagaagattttgttgaggtccatgggaagcggtttttgaagccttttgtggagaaacctgtcaatggggatgatcaccgaataatgatatattatcctagttctgctggtggtggaatgaaggaattattcagaaaggtttacactgttggcccaggatatgcacatgctgaggcacgtaaatcgcctgttgttgatggtgttgttatgaggaaccctgacggcaaggaagtacgataccctgtacttttgacccctactgagaaacaaatggcaagagatgtctgcaatgcttttagacagatggtttgtggttttgatctcttaagatgtgatgggagatcatatgtctgtgacgttaatggatggagctttgtgaagaactcatataagtattatgatgatgctgcttgcatcttgagaaaaatatttcttgatgcaaaagctcctcatctttcatcaaccatccctccaactcttccttggaagtctgaaccagttcagcccactgaaggtcttacacgacagggaagtggaattattggtacatttgggcagtcagaagaactgcgctgtgtaattgttgtaatacgccatggcgatcggacaccaaagcagaaggtgaaattgaaagtgacagaagaaaagcttctgaatttgatgttgaagtacaatggtggaaaaccaagagttgagacgaaactaaaaagtgctgtacagttacaagacttgctggatgctacaagacaacttgtaccaccaactaggtctggtcgggagagtgatagtgatgctgatgatattgagcatatcgagaaacttcgtcaagtcaaagcagtcctagaggaggaaagtgcagctaaagccattgaaatggataaaagttccaaagcgtaatggtgatggtgaagaggaacgaccgattgaagccctgatgattctgaaatatggtggtgtgctcacccatgctgggagaaaacaggcagaggagctgggaagatttttcagaaataacatatatccaggtgaaggaactggtttgcttcgtctgcatagcacttatagacatgatttaaaaatatacagctcggacgaaggtcgtgtacagatgtctgcagcagcatttgcaaaaggccttcttgatttggaagggcagttgactccgatactggtatctttagtaagtaaagactcatctatgctagatggactagaagatgcaagcaccgagatggatgaagctaaggctagattgcatgagattattatttcaagtgagaaagcaaagaacacagaagggccagtggaatttccatggatggttgatggtgcaggattgcctgcaaatgcttcccagctcctgcctaagatggccaagttgacgaaagaagtgacttcacaagtaaagctgcttgctgaaggtgaagatgaaagacttgcgttgacgagcacattttcaaaatatgaccaggcaaaagctcttggaaagacaactattgatgtggctcgtattgctgccgggttgccatgtggtagtgaaagcttcctcttgatgtttgccagatggagaaaacttgagagggatttatacaatgaaagaaaggaccgttttgacattacacagatcccagatgtatatgattcctgcaagtatgaccttttgcataatgctcatctcaatcttaagggtttggaagagctattcaaagttgctcaaatactcgctgatggtgttattccaaatgagtatgggatcaacccaaagcaaaaactgaaaatcggctcaaagatagcgcgccgtttattgggaaaaatcctaatcgatctacgcaacactcgtgaagaagctatcagtgttgccgaaccaaaatttattgaagacgaagctctattcctaccaacaaaagaagcagagcaccagcagaaggttcatgttagaaatgaggatggaagaagatctagctctacgagtgagaagtcattggaccaagaagatgaagatgatagagaaactaaataccgattagatcccaagtatgccaatgtaaggacacctgagcgccatgtccgcactaggctttacttcacatcggaatctcatatacactcattgatgaatgtccttcgttactgcaatttggacgaaagtctacaaggagaggaaagccttgtctgccagagtgctttggaccgtctacatagaactagggagcttgattacatgagtaatattgtgcttagaatgtttgaaaacatagaggttcctttggaagatgagaagaggttcaggattgaaatgacgttcagtcgtggcgccgatctcagtcccctagaggacaaaaccagtgaaagttcttccttgctccaggagcacaccttgcccataatggggcccgagagactgcaggaagttgggtcctgcctgaccatggacaagttcgagaaaatggtgcggccattcgccatgccgccggaggacttccctcctgccgctccgccacaagccttgggctacttctccaaaggggcaggggtgcttgaaaggttggctagcctctggcctttccacaagagcgctaacgggaagtagctggaagctaacaaatccctgaaaccagttcatgtggttattcttgttctgtaacactttctgcacgccagcccaattttgacgatctgaatcatagtgaaaattttgctggttctttttcatgagcgcgagacataattgtgctatcatgttgcttgcatggatctgagatttaagggtgcgtttggttgctggatagccaaaacaggaatgtcccctggtatcctctcttgtccctccaattttaaggaacaactggggacaatactagaataattctgtctcaatccttgatcctgaactaaacaaacttatttaagtgatcatcccatcatgtcatgtcct

SEQ ID NO: 4916 - DNA, 3168 bp, Zea Mays
taagcatctggagaagtatggaattcctgtgcccagttatgctcttgtcaatagagaatatccggaccaagagctagactacttcatcgagcaagaagattttgttgaggtccatgggaagcggtttttgaagccttttgtggagaaacctgtcaatggggatgatcaccgaataatgatatattatcctagttctgctggtggtggaatgaaggaattattcagaaaggtgggtaaccgatctagtgaatttcatcctgatgttaggagagtgagacgtgaaggatcctacatatacgaggaattcatgcctactggtggcactgatgttaaagtttacactgttggcccaggatatgcacatgctgaggcacgtaaatcgcctgttgttgatggtgttgttatgaggaaccctgacggcaaggaagtgtacgataccctgtacttttgacccctactgagaaacaaatggcaagagatgtctgcaatgcttttagacagatggtttgtggttttgatctcttaagatgtgatgggagatcatatgtctgtgacgttaatggatggagctttgtgaagaactcatataagtattatgatgatgctgcttgcatcttgagaaaaatatttcttgatgcaaaagctcctcatctttcatcaaccatccctccaactcttccttggaagtctgaaccagttcagcccactgaaggtcttacacgacagggaagtggaattattggtacatttgggcagtcagaagaactgcgctgtgtaattgttgtaatacgccatggcgatcggacaccaaagcagaaggtgaaattgaaagtgacagaagaaaagcttctgaatttgatgttgaagtacaatggtggaaaaccaagagttgagttttgggctcttcatgcagacgaaactaaaaagtgctgtacagttacaagacttgctggatgctacaagacaacttgtaccaccaactaggtctggtcgggagagtgatagtgatgctgatgatattgagcatatcgagaaacttcgtcaagtcaaagcagtcctagaggagggtggacatttctctggcatttataggaaagtgcagctaaagccattgaaatggataaaagttccaaagcgtaatggtgatggtgaagaggaacgaccgattgaagccctgatgattctgaaatatggtggtgtgctcacccatgctgggagaaaacaggcagaggagctgggaagatttttcagaaataacatatatccaggtgaaggaactggtttgcttcgtctgcatagcacttatagacatgatttaaaaatatacagctcggacgaaggtcgtgtacagatgtctgcagcagcatttgcaaaaggccttcttgatttggaagggcagttgactccgatactgtaagtaaagactcatctatgctagatggactagaagatgcaagcaccgagatggatgaagctaaggctagattgcatgagattattatttcaagtgagaaagcaaagaacacagaagggccagtggaatttccatggatggttgatggtgcaggattgcctgcaaatgcttcccagctcctgcctaagatggccaagttgacgaaagaagtgacttcacaagtaaagctgcttgctgaaggtgaagatgaaagacttgcgttgacgagcacattttcaaaatatgaccaggcaaaagctcttggaaagacaactattgatgtggctcgtattgctgccgggttgccatgtggtagtgaaagcttcctcttgatgtttgccagatggagaaaacttgagagggatttatacaatgaaagaaaggaccgttttgacattacacagatcccagatgtatatgattcctgcaagtatgaccttttgcataatgctcatctcaatcttaagggtttggaagagctattcaaagttgctcaaatactcgctgatggtgttattccaaatgagtatgggatcaacccaaagcaaaaactgaaaatcggctcaaagatagcgcgccgtttattgggaaaaatcctaatcgatctacgcaacactcgtgaagaagctatcagtgttgccgaaccaaaatttattgaagacgaagctctattcctaccaacaaaagaagcagagcaccagcagaaggttcatgttagaaatgaggatggaagaagatctagctctacgagtgagaagtcattggaccaagaagatgaagatgatagagaaactaaataccgattagatcccaagtatgccaatgtaaggacacctgagcgccatgtccgcactaggctttacttcacatcggaatctcatatacactcattgatgaatgtccttcgttactgcaatttggacgaaagtctacaaggagaggaaagccttgtctgccagagtgctttggaccgtctacatagaactagggagcttgattacatgagtaatattgtgcttagaatgtttgaaaacatagaggttcctttggaagatgagaagaggttcaggattgaaatgacgttcagtcgtggcgccgatctcagtcccctagaggacaaaaccagtgaaagttcttccttgctccaggagcacaccttgcccataatggggcccgagagactgcaggaagttgggtcctgcctgaccatggacaagttcgagaaaatggtgcggccattcgccatgccgccggaggacttccctcctgccgctccgccacaagccttgggctacttctccaaaggggcaggggtgcttgaaaggttggctagcctctggcctttccacaagagcgctaacgggaagtagctggaagctaacaaatccctgaaaccagttcatgtggttattcttgttctgtaacactttctgcacgccagcccaattttgacgatctgaatcatagtgaaaattttgctggttctttttcatgagcgcgagacataattgtgctatcatgttgcttgcatggatctgagatttaagggtgcgtttggttgctggatagccaaaacaggaatgtcccctggtatcctctcttgtccctccaattttaaggaacaactggggacaatactagaataattctgtctcaatccttgatcctgaactaaacaaacttatttaagtgatcatcccatcatgtcatgtcct

SEQ ID NO: 4917 - DNA, 3114 bp, Zea Mays
taagcatctggagaagtatggaattcctgtgcccagttatgctcttgtcaatagagaatatccggaccaagagctagactacttcatcgagcaagaagattttgttgaggtccatgggaagcggtttttgaagccttttgtggagaaacctgtcaatggggatgatcaccgaataatgatatattatcctagttctgctggtggtggaatgaaggaattattcagaaaggtgggtaaccgatctagtgaatttcatcctgatgttaggagagtgagacgtgaaggatcctacatatacgaggaattcatgcctactggtggcactgatgttaaagatatgcacatgctgaggcacgtaaatcgcctgttgttgatggtgttgttatgaggaaccctgacggcaaggaagtacgataccctgtacttttgacccctactgagaaacaaatggcaagagatgtctgcaatgcttttagacagatggtttgtggttttgatctcttaagatgtgatgggagatcatatgtctgtgacgttaatggatggagctttgtgaagaactcatataagtattatgatgatgctgcttgcatcttgagaaaaatatttcttgatgcaaaagctcctcatctttcatcaaccatccctccaactcttccttggaagtctgaaccagttcagcccactgaaggtcttacacgacagggaagtggaattattggtacatttgggcagtcagaagaactgcgctgtgtaattgttgtaatacgccatggcgatcggacaccaaagcagaaggtgaaattgaaagtgacagaagaaaagcttctgaatttgatgttgaagtacaatggtggaaaaccaagagttgagacgaaactaaaaagtgctgtacagttacaagacttgctggatgctacaagacaacttgtaccaccaactaggtctggtcgggagagtgatagtgatgctgatgatattgagcatatcgagaaacttcgtcaagtcaaagcagtcctagaggaggaaagtgcagctaaagccattgaaatggataaaagttccaaagcgtaatggtgatggtgaagaggaacgaccgattgaagccctgatgattctgaaatatggtggtgtgctcacccatgctgggagaaaacagaggcagaggagctgggaagatttttcagaaataacatatatccaggtgaaggaactggtttgcttcgtctgcatagcacttatagacatgatttaaaaatatacagctcggacgaaggtcgtgtacagatgtctgcagcagcatttgcaaaaggccttcttgatttggaagggcagttgactccgatactggtatctttagtaagtaaagactcatctatgctagatggactagaagatgcaagcaccgagatggatgaagctaaggctagattgcatgagattattatttcaagtgagaaagcaaagaacacagaagggccagtggaatttccatggatggttgatggtgcaggattgcctgcaaatgcttcccagctcctgcctaagatggccaagttgacgaaagaagtgacttcacaagtaaagctgcttgctgaaggtgaagatgaaagacttgcgttgacgagcacattttcaaaatatgaccaggcaaaagctcttggaaagacaactattgatgtggctcgtattgctgccgggttgccatgtggtagtgaaagcttcctcttgatgtttgccagatggagaaaacttgagagggatttatacaatgaaagaaaggaccgttttgacattacacagatcccagatgtatatgattcctgcaagtatgaccttttgcataatgctcatctcaatcttaagggtttggaagagctattcaaagttgctcaaatactcgctgatggtgttattccaaatgagtatgggatcaacccaaagcaaaaactgaaaatcggctcaaagatagcgcgccgtttattgggaaaaatcctaatcgatctacgcaacactcgtgaagaagctatcagtgttgccgaaccaaaatttattgaagacgaagctctattcctaccaacaaaagaagcagagcaccagcagaaggttcatgttagaaatgaggatggaagaagatctagctctacgagtgagaagtcattggaccaagaagatgaagatgatagagaaactaaataccgattagatcccaagtatgccaatgtaaggacacctgagcgccatgtccgcactaggctttacttcacatcggaatctcatatacactcattgatgaatgtccttcgttactgcaatttggacgaaagtctacaaggagaggaaagccttgtctgccagagtgctttggaccgtctacatagaactagggagcttgattacatgagtaatattgtgcttagaatgtttgaaaacatagaggttcctttggaagatgagaagaggttcaggattgaaatgacgttcagtcgtggcgccgatctcagtcccctagaggacaaaaccagtgaaagttcttccttgctccaggagcacaccttgcccataatggggcccgagagactgcaggaagttgggtcctgcctgaccatggacaagttcgagaaaatggtgcggccattcgccatgccgccggaggacttccctcctgccgctccgccacaagccttgggctacttctccaaaggggcaggggtgcttgaaaggttggctagcctctggcctttccacaagagcgctaacgggaagtagctggaagctaacaaatccctgaaaccagttcatgtggttattcttgttctgtaacactttctgcacgccagcccaattttgacgatctgaatcatagtgaaaattttgctggttctttttcatgagcgcgagacataattgtgctatcatgttgcttgcatggatctgagatttaagggtgcgtttggttgctggatagccaaaacaggaatgtcccctggtatcctctcttgtccctccaattttaaggaacaactggggacaatactagaataattctgtctcaatccttgatcctgaactaaacaaacttatttaagtgatcatcccatcatgtcatgtcct

SEQ ID NO: 4918 - DNA, 3102 bp, Zea Mays
taagcatctggagaagtatggaattcctgtgcccagttatgctcttgtcaatagagaatatccggaccaagagctagactacttcatcgagcaagaagattttgttgaggtccatgggaagcggtttttgaagccttttgtggagaaacctgtcaatggggatgatcaccgaataatgatatattatcctagttctgctggtggtggaatgaaggaattattcagaaaggtgggtaaccgatctagtgaatttcatcctgatgttaggagagtgagacgtgaaggatcctacatatacgaggaattcatgcctactggtggcactgatgttaaagtttacactgttggcccaggatatgcacatgctgaggcacgtaaatcgcctgttgttgatggtgttgttatgaggaaccctgacggcaaggaagtacgataccctgtacttttgacccctactgagaaacaaatggcaagagatgtctgcaatgcttttagacagatggtttgtggttttgatctcttaagatgtgatgggagatcatatgtctgtgacgttaatggatggagctttgtgaagaactcatataagtattatgatgatgctgcttgcatcttgagaaaaatatttcttgatgcaaaagctcctcatctttcatcaaccatccctccaactcttccttggaagtctgaaccagttcagcccactgaaggtcttacacgacagggaagtggaattattggtacatttgggcagtcagaagaactgcgctgtgtaattgttgtaatacgccatggcgatcggacaccaaagcagaaggtgaaattgaaagtgacagaagaaaagcttctgaatttgatgttgaagtacaatggtggaaaaccaagagttgagacgaaactaaaaagtgctgtacagttacaagacttgctggatgctacaagacaacttgtaccaccaactaggtctggtcgggagagtgatagtgatgctgatgatattgagcatatcgagaaacttcgtcaagtcaaagcagtcctagaggagggtggacatttctctggcatttataggaaagtgcagctaaagccattgaaatggataaaagttccaaagcgtaatggtgatggtgaagaggaacgaccgattgaagccctgatgattctgaaatatggtggtgtgctcacccatgctgggagaaaacaggcagaggagctgggaagatttttcagaaataacatatatccaggtgaaggaactggtttgcttcgtctgcatagcacttatagacatgatttaaaaatatacagctcggacgaaggtcgtgtacagatgtctgcagcagcatttgcaaaaggccttcttgatttggaagggcagttgactccgatactggtatctttagtaagtaaagactcatctatgctagatggactagaagatgcaagcaccgagatggatgaagctaaggctagattgcatgagattattatttcaagtgagaaagcaaagaacacagaagggccagtggaatttccatggatggttgatggtgcaggattgcctgcaaatgcttcccagctcctgcctaagatggccaagttgacgaaagaagtgacttcacaagtaaagctgcttgctgaaggtgaagatgaaagacttgcgttgacgagcacattttcaaaatatgaccaggcaaaagctcttggaaagacaactattgatgtggctcgtattgctgccgggttgccatgtggtagtgaaagcttcctcttgatgtttgccagatggagaaaacttgagagggatttatacaatgaaagaaaggaccgttttgacattacacagatcccagatgtatatgattcctgcaagtatgaccttttgcataatgctcatctcaatcttaagggtttggaagagctattcaaagttgctcaaatactcgctgatggtgttattccaaatgagtatgggatcaacccaaagcaaaaactgaaaatcggctcaaagaagctatcagtgttgccgaaccaaaatttattgaagacgaagctctattcctaccaacaaaagaagcagagcaccagcagaaggttcatgttagaaatgaggatggaagaagatctagctctacgagtgagaagtcattggaccaagaagatgaagatgatagagaaactaaataccgattagatcccaagtatgccaatgtaaggacacctgagcgccatgtccgcactaggctttacttcacatcggaatctcatatacactcattgatgaatgtccttcgttactgcaatttggacgaaagtctacaaggagaggaaagccttgtctgccagagtgctttggaccgtctacatagaactagggagcttgattacatgagtaatattgtgcttagaatgtttgaaaacatagaggttcctttggaagatgagaagaggttcaggattgaaatgacgttcagtcgtggcgccgatctcagtcccctagaggacaaaaccagtgaaagttcttccttgctccaggagcacaccttgcccataatggggcccgagagactgcaggaagttgggtcctgcctgaccatggacaagttcgagaaaatggtgcggccattcgccatgccgccggaggacttccctcctgccgctccgccacaagccttgggctacttctccaaaggggcaggggtgcttgaaaggttggctagcctctggcctttccacaagagcgctaacgggaagtagctggaagctaacaaatccctgaaaccagttcatgtggttattcttgttctgtaacactttctgcacgccagcccaattttgacgatctgaatcatagtgaaaattttgctggttctttttcatgagcgcgagacataattgtgctatcatgttgcttgcatggatctgagatttaagggtgcgtttggttgctggatagccaaaacaggaatgtcccctggtatcctctcttgtccctccaattttaaggaacaactggggacaatactagaataattctgtctcaatccttgatcctgaactaaacaaacttatttaagtgatcatcccatcatgtcatgtcct

SEQ ID NO: 4919 - DNA, 3176 bp, Zea Mays
taagcatctggagaagtatggaattcctgtgcccagttatgctcttgtcaatagagaatatccggaccaagagctagactacttcatcgagcaagaagattttgttgaggtccatgggaagcggtttttgaagccttttgtggagaaacctgtcaatggggatgatcaccgaataatgatatattatcctagttctgctggtggtggaatgaaggaattattcagaaaggtgggtaaccgatctagtgaatttcatcctgatgttaggagagtgagacgtgaaggatcctacatatacgaggaattcatgcctactggtggcactgatgttaaagtttacactgttggcccaggatatgcacatgctgaggcacgtaaatcgcctgttgttgatggtgttgttatgaggaaccctgacggcaaggaagtacgataccctgtacttttgacccctactgagaaacaaatggcaagagatgtctgcaatgcttttagacagatggtttgtggttttgatctcttaagatgtgatgggagatcatatgtctgtgacgttaatggatggagctttgtgaagaactcatataagtattatgatgatgctgcttgcatcttgagaaaaatatttcttgatgcaaaagctcctcatctttcatcaaccatccctccaactcttccttggaagtctgaaccagttcagcccactgaaggtcttacacgacagggaagtggaattattggtacatttgggcagtcagaagaactgcgctgtgtaattgttgtaatacgccatggcgatcggacaccaaagcagaaggtgaaattgaaagtgacagaagaaaagcttctgaatttgatgttgaagtacaatggtggaaaaccaagagttgagttttgggctcttcatgcagacgaaactaaaaagtgctgtacagttacaagacttgctggatgctacaagacaacttgtaccaccaactaggtctggtcgggagagtgatagtgatgctgatgatattgagcatatcgagaaacttcgtcaagtcaaagcagtcctagaggagggtggacatttctctggcatttataggaaagtgcagctaaagccattgaaatggataaaagttccaaagcgtaatggtgatggtgaagaggaacgaccgattgaagccctgatgattctgaaatatggtggtgtgctcacccatgctgggagaaaacaggcagaggagctgggaagatttttcagaaataacatatatccaggtgaaggaactggtttgcttcgtctgcatagcacttatagacatgatttaaaaatatacagctcggacgaaggtcgtgtacagatgtctgcagcagcatttgcaaaaggccttcttgatttggaagggcagttgactccgatactggtatctttagtaagtaaagactcatctatgctagatggactagaagatgcaagcaccgagatggatgaagctaaggctagattgcatgagattattatttcaagtgagaaagcaaagaacacagaagggccagtggaatttccatggatggttgatggtgcaggattgcctgcaaatgcttcccagctcctgcctaagatggccaagttgacgaaagaagtgacttcacaagtaaagctgcttgctgaaggtgaagatgaaagacttgcgttgacgagcacattttcaaaatatgaccaggcaaaagctcttggaaagacaactattgatgtggctcgtattgctgccgggttgccatgtggtagtgaaagcttcctcttgatgtttgccagatggagaaaacttgagagggatttatacaatgaaagaaaggaccgttttgacattacacagatcccagatgtatatgattcctgcaagtatgaccttttgcataatgctcatctcaatcttaagggtttggaagagctattcaaagttgctcaaatactcgctgatggtgttattccaaatgagtatgggatcaacccaaagcaaaaactgaaaatcggctcaaagatagcgcgccgtttattgggaaaaatcctaatcgatctacgcaacactcgtgaagaagctatcagtgttgccgaaccaaaatttattgaagacgaagctctattcctaccaacaaaagaagcagagcaccagcagaaggttcatgttagaaatgaggatggaagaagatctagctctacgagtgagaagtcattggaccaagaagatgaagatgatagagaaactaaataccgattagatcccaagtatgccaatgtaaggacacctgagcgccatgtccgcactaggctttacttcacatcggaatctcatatacactcattgatgaatgtccttcgttactgcaatttggacgaaagtctacaaggagaggaaagccttgtctgccagagtgctttggaccgtctacatagaactagggagcttgattacatgagtaatattgtgcttagaatgtttgaaaacatagaggttcctttggaagatgagaagaggttcaggattgaaatgacgttcagtcgtggcgccgatctcagtcccctagaggacaaaaccagtgaaagttcttccttgctccaggagcacaccttgcccataatggggcccgagagactgcaggaagttgggtcctgcctgaccatggacaagttcgagaaaatggtgcggccattcgccatgccgccggaggacttccctcctgccgctccgccacaagccttgggctacttctccaaaggggcaggggtgcttgaaaggttggctagcctctggcctttccacaagagcgctaacgggaagtagctggaagctaacaaatccctgaaaccagttcatgtggttattcttgttctgtaacactttctgcacgccagcccaattttgacgatctgaatcatagtgaaaattttgctggttctttttcatgagcgcgagacataattgtgctatcatgttgcttgcatggatctgagatttaagggtgcgtttggttgctggatagccaaaacaggaatgtcccctggtatcctctcttgtccctccaattttaaggaacaactggggacaatactagaataattctgtctcaatccttgatcctgaactaaacaaacttatttaagtgatcatcccatcatgtcatgtcct

SEQ ID NO: 4920 - DNA, 3132 bp, Zea Mays
taagcatctggagaagtatggaattcctgtgcccagttatgctcttgtcaatagagaatatccggaccaagagctagactacttcatcgagcaagaagattttgttgaggtccatgggaagcggtttttgaagccttttgtggagaaacctgtcaatggggatgatcaccgaataatgatatattatcctagttctgctggtggtggaatgaaggaattattcagaaaggtgggtaaccgatctagtgaatttcatcctgatgttaggagagtgagacgtgaaggatcctacatatacgaggaattcatgcctactggtggcactgatgttaaagtttacactgttggcccaggatatgcacatgctgaggcacgtaaatcgcctgttgttgatggtgttgttatgaggaaccctgacggcaaggaagtacgataccctgtacttttgacccctactgagaaacaaatggcaagagatgtctgcaatgcttttagacagatggtttgtggttttgatctcttaagatgtgatgggagatcatatgtctgtgacgttaatggatggagctttgtgaagaactcatataaggtattatgatgatgctgcttgcatcttgagaaaaatatttcttgatgcaaaagctcctcatctttcatcaaccatccctccaactcttccttggaagtctgaaccagttcagcccactgaaggtcttacacgacagggaagtggaattattggtacatttgggcagtcagaagaactgcgctgtgtaattgttgtaatacgccatggcgatcggacaccaaagcagaaggtgaaattgaaagtgacagaagaaaagcttctgaatttgatgttgaagtacaatggtggaaaaccaagagttgagacgaaactaaaaagtgctgtacagttacaagacttgctggatgctacaagacaacttgtaccaccaactaggtctggtcgggagagtgatagtgatgctgatgatattgagcatatcgagaaacttcgtcaagtcaaagcagtcctagaggaggaaagtgcagctaaagccattgaaatggataaaagttccaaagcgtaatggtgatggtgaagaggaacgaccgattgaagccctgatgattctgaaatatggtggtgtgctcacccatgctgggagaaaacaggcagaggagctgggaagatttttcagaaataacatatatccaggtgaaggaactggtttgcttcgtctgcatagcacttatagacatgatttaaaaatatacagctcggacgaaggtcgtgtacagatgtctgcagcagcatttgcaaaaggccttcttgatttggaagggcagttgactccgatactggtatctttagtaagtaaagactcatctatgctagatggactagaagatgcaagcaccgagatggatgaagctaaggctagattgcatgagattattatttcaagtgagaaagcaaagaacacagaagggccagtggaatttccatggatggttgatggtgcaggattgcctgcaaatgcttcccagctcctgcctaagatggccaagttgacgaaagaagtgacttcacaagtaaagctgcttgctgaaggtgaagatgaaagacttgcgttgacgagcacattttcaaaatatgaccaggcaaaagctcttggaaagacaactattgatgtggctcgtattgctgccgggttgccatgtggtagtgaaagcttcctcttgatgtttgccagatggagaaaacttgagagggatttatacaatgaaagaaaggaccgttttgacattacacagatcccagatgtatatgattcctgcaagtatgaccttttgcataatgctcatctcaatcttaagggtttggaagagctattcaaagttgctcaaatactcgctgatggtgttattccaaatgagtatgggatcaacccaaagcaaaaactgaaaatcggctcaaagatagcgcgccgtttattgggaaaaatcctaatcgatctacgcaacactcgtgaagaagctatcagtgttgccgaaccaaaatttattgaagacgaagctctattcctaccaacaaaagaagcagagcaccagcagaaggttcatgttagaaatgaggatggaagaagatctagctctacgagtgagaagtcattggaccaagaagatgaagatgatagagaaactaaataccgattagatcccaagtatgccaatgtaaggacacctgagcgccatgtccgcactaggctttacttcacatcggaatctcatatacactcattgatgaatgtccttcgttactgcaatttggacgaaagtctacaaggagaggaaagccttgtctgccagagtgctttggaccgtctacatagaactagggagcttgattacatgagtaatattgtgcttagaatgtttgaaaacatagaggttcctttggaagatgagaagaggttcaggattgaaatgacgttcagtcgtggcgccgatctcagtcccctagaggacaaaaccagtgaaagttcttccttgctccaggagcacaccttgcccataatggggcccgagagactgcaggaagttgggtcctgcctgaccatggacaagttcgagaaaatggtgcggccattcgccatgccgccggaggacttccctcctgccgctccgccacaagccttgggctacttctccaaaggggcaggggtgcttgaaaggttggctagcctctggcctttccacaagagcgctaacgggaagtagctggaagctaacaaatccctgaaaccagttcatgtggttattcttgttctgtaacactttctgcacgccagcccaattttgacgatctgaatcatagtgaaaattttgctggttctttttcatgagcgcgagacataattgtgctatcatgttgcttgcatggatctgagatttaagggtgcgtttggttgctggatagccaaaacaggaatgtcccctggtatcctctcttgtccctccaattttaaggaacaactggggacaatactagaataattctgtctcaatccttgatcctgaactaaacaaacttatttaagtgatcatcccatcatgtcatgtcct

SEQ ID NO: 4921 - DNA, 3147 bp, Zea Mays
taagcatctggagaagtatggaattcctgtgcccagttatgctcttgtcaatagagaatatccggaccaagagctagactacttcatcgagcaagaagattttgttgaggtccatgggaagcggtttttgaagccttttgtggagaaacctgtcaatggggatgatcaccgaataatgatatattatcctagttctgctggtggtggaatgaaggaattattcagaaaggtttacactgttggcccaggatatgcacatgctgaggcacgtaaatcgcctgttgttgatggtgttgttatgaggaaccctgacggcaaggaagtacgataccctgtacttttgacccctactgagaaacaaatggcaagagatgtctgcaatgcttttagacagatggtttgtggttttgatctcttaagatgtgatgggagatcatatgtctgtgacgttaatggatggagctttgtgaagaactcatataagtattatgatgatgctgcttgcatcttgagaaaaatatttcttgatgcaaaagctcctcatctttcatcaaccatccctccaactcttccttggaagtctgaaccagttcagcccactgaaggtcttacacgacagggaagtggaattattggtacatttgggcagtcagaagaactgcgctgtgtaattgttgtaatacgccatggcgatcggacaccaaagcagaaggtgaaattgaaagtgacagaagaaaagcttctgaatttgatgttgaagtacaatggtggaaaaccaagagttgagacgaaactaaaaagtgctgtacagttacaagacttgctggatgctacaagacaacttgtaccaccaactaggtctggtcgggagagtgatagtgatgctgatgatattgagcatatcgagaaacttcgtcaagtcaaagcagtcctagaggagggtggacatttctctggcatttataggaaagtgcagctaaagccattgaaatggataaaagttccaaagcgtaatggtgatggtgaagaggaacgaccgattgaagccctgatgattctgaaatatggtggtgtgctcacccatgctgggagaaaacaggcagaggagctgggaagatttttcagaaataacatatatccaggtgaaggaactggtttgcttcgtctgcatagcacttatagacatgatttaaaaatatacagctcggacgaaggtcgtgtacagatgtctgcagcagcatttgcaaaaggccttcttgatttggaagggcagttgactccgatactgggtatctttagtaagtaaagactcatctatgctagatggactagaagatgcaagcaccgagatggatgaagctaaggctagattgcatgagattattatttcaagtgagaaagcaaagaacacagaagggccagtggaatttccatggatggttgatggtgcaggattgcctgcaaatgcttcccagctcctgcctaagatggccaagttgacgaaagaagtgacttcacaagtaaagctgcttgctgaaggtgaagatgaaagacttgcgttgacgagcacattttcaaaatatgaccaggcaaaagctcttggaaagacaactattgatgtggctcgtattgctgccgggttgccatgtggtagtgaaagcttcctcttgatgtttgccagatggagaaaacttgagagggatttatacaatgaaagaaaggagtaaagtgtttaacctctggatgtttagaaatcaatatagtgttttattctacttttgttaaagtcactcatgatgctttatttcataatgcagccgttttgacattacacagatcccagatgtatatgattcctgcaagtatgaccttttgcataatgctcatctcaatcttaagggtttggaagagctattcaaagttgctcaaatactcgctgatggtgttattccaaatgagtatgggatcaacccaaagcaaaaactgaaaatcggctcaaagatagcgcgccgtttattgggaaaaatcctaatcgatctacgcaacactcgtgaagaagctatcagtgttgccgaaccaaaatttattgaagacgaagctctattcctaccaacaaaagaagcagagcaccagcagaaggttcatgttagaaatgaggatggaagaagatctagctctacgagtgagaagtcattggaccaagaagatgaagatgatagagaaactaaataccgattagatcccaagtatgccaatgtaaggacacctgagcgccatgtccgcactaggctttacttcacatcggaatctcatatacactcattgatgaatgtccttcgttactgcaatttggacgaaagtctacaaggagaggaaagccttgtctgccagagtgctttggaccgtctacatagaactagggagcttgattacatgagtaatattgtgcttagaatgtttgaaaacatagaggttcctttggaagatgagaagaggttcaggattgaaatgacgttcagtcgtggcgccgatctcagtcccctagaggacaaaaccagtgaaagttcttccttgctccaggagcacaccttgcccataatggggcccgagagactgcaggaagttgggtcctgcctgaccatggacaagttcgagaaaatggtgcggccattcgccatgccgccggaggacttccctcctgccgctccgccacaagccttgggctacttctccaaaggggcaggggtgcttgaaaggttggctagcctctggcctttccacaagagcgctaacgggaagtagctggaagctaacaaatccctgaaaccagttcatgtggttattcttgttctgtaacactttctgcacgccagcccaattttgacgatctgaatcatagtgaaaattttgctggttctttttcatgagcgcgagacataattgtgctatcatgttgcttgcatggatctgagatttaagggtgcgtttggttgctggatagccaaaacaggaatgtcccctggtatcctctcttgtccctccaattttaaggaacaactggggacaatactagaataattctgtctcaatccttgatcctgaactaaacaaacttatttaagtgatcatcccatcatgtcatgtcct

SEQ ID NO: 4922 - DNA, 3239 bp, Zea Mays
gaagtatggaattcctgtgcccagttatgctcttgtcaatagagaatatccggaccaagagctagactacttcatcgagcaagaagattttgttgaggtccatgggaagcggtttttgaagccttttgtggagaaacctgtcaatggggatgatcaccgaataatgatatattatcctagttctgctggtggtggaatgaaggaattattcagaaaggcgggaagaaagaaggttttgccgccaaacatgcaaaagcagcgcacacggcgcgcaacaacgcgtcgattcacgctaggaaattttacatgaggtgggtaaccgatctagtgaatttcatcctgatgttaggagagtgagacgtgaaggatcctacatatacgaggaattcatgcctactggtggcactgatgttaaagtttacactgttggcccaggatatgcacatgctgaggcacgtaaatcgcctgttgttgatggtgttgttatgaggaaccctgacggcaaggaagtacgataccctgtacttttgacccctactgagaaacaaatggcaagagatgtctgcaatgcttttagacagatggtttgtggttttgatctcttaagatgtgatgggagatcatatgtctgtgacgttaatggatggagctttgtgaagaactcatataagtattatgatgatgctgcttgcatcttgagaaaaatatttcttgatgcaaaagctcctcatctttcatcaaccatccctccaactcttccttggaagtctgaaccagttcagcccactgaaggtcttacacgacagggaagtggaattattggtacatttgggcagtcagaagaactgcgctgtgtaattgttgtaatacgccatggcgatcggacaccaaagcagaaggtgaaattgaaagtgacagaagaaaagcttctgaatttgatgttgaagtacaatggtggaaaaccaagagttgagacgaaactaaaaagtgctgtacagttacaagacttgctggatgctacaagacaacttgtaccaccaactaggtctggtcgggagagtgatagtgatgctgatgatattgagcatatcgagaaacttcgtcaagtcaaagcagtcctagaggagggtggacatttctctggcatttataggaaagtgcagctaaagccattgaaatggataaaagttccaaagcgtaatggtgatggtgaagaggaacgaccgattgaagccctgatgattctgaaatatggtggtgtgctcacccatgctgggagaaaacaggcagaggagctgggaagatttttcagaaataacatatatccaggtgaaggaactggtttgcttcgtctgcatagcacttatagacatgatttaaaaatatacagctcggacgaaggtcgtgtacagatgtctgcagcagcatttgcaaaaggccttcttgatttggaagggcagttgactccgatactggtatctttagtaagtaaagactcatctatgctagatggactagaagatgcaagcaccgagatggatgaagctaaggctagattgcatgagattattatttcaagtgagaaagcaaagaacacagaagggccagtggaatttccatggatggttgatggtgcaggattgcctgcaaatgcttcccagctcctgcctaagatggccaagttgacgaaagaagtgacttcacaagtaaagctgcttgctgaaggtgaagatgaaagacttgcgttgacgagcacattttcaaaatatgaccaggcaaaagctcttggaaagacaactattgatgtggctcgtattgctgccgggttgccatgtggtagtgaaagcttcctcttgatgtttgccagatggagaaaacttgagagggatttatacaatgaaagaaaggaccgttttgacattacacagatcccagatgtatatgattcctgcaagtatgaccttttgcataatgctcatctcaatcttaagggtttggaagagctattcaaagttgctcaaatactcgctgatggtgttattccaaatgagtatgggatcaacccaaagcaaaaactgaaaatcggctcaaagatagcgcgccgtttattgggaaaaatcctaatcgatctacgcaacactcgtgaagaagctatcagtgttgccgaaccaaaatttattgaagacgaagctctattcctaccaacaaaagaagcagagcaccagcagaaggttcatgttagaaatgaggatggaagaagatctagctctacgagtgagaagtcattggaccaagaagatgaagatgatagagaaactaaataccgattagatcccaagtatgccaatgtaaggacacctgagcgccatgtccgcactaggctttacttcacatcggaatctcatatacactcattgatgaatgtccttcgttactgcaatttggacgaaagtctacaaggagaggaaagccttgtctgccagagtgctttggaccgtctacatagaactagggagcttgattacatgagtaatattgtgcttagaatgtttgaaaacatagaggttcctttggaagatgagaagaggttcaggattgaaatgacgttcagtcgtggcgccgatctcagtcccctagaggacaaaaccagtgaaagttcttccttgctccaggagcacaccttgcccataatggggcccgagagactgcaggaagttgggtcctgcctgaccatggacaagttcgagaaaatggtgcggccattcgccatgccgccggaggacttccctcctgccgctccgccacaagccttgggctacttctccaaaggggcaggggtgcttgaaaggttggctagcctctggcctttccacaagagcgctaacgggaagtagctggaagctaacaaatccctgaaaccagttcatgtggttattcttgttctgtaacactttctgcacgccagcccaattttgacgatctgaatcatagtgaaaattttgctggttctttttcatgagcgcgagacataattgtgctatcatgttgcttgcatggatctgagatttaagggtgcgtttggttgctggatagccaaaacaggaatgtcccctggtatcctctcttgtccctccaattttaaggaacaactggggacaatactagaataattctgtctcaatccttgatcctgaactaaacaaacttatttaagtgatcatcccatcatgtcatgtcct

SEQ ID NO: 4923 - DNA, 3233 bp, Zea Mays
gtatggaattcctgtgcccagttatgctcttgtcaatagagaatatccggaccaagagctagactacttcatcgagcaagaagattttgttgaggtccatgggaagcggtttttgaagccttttgtggagaaacctgtcaatggggatgatcaccgaataatgatatattatcctagttctgctggtggtggaatgaaggaattattcagaaagggtgggtaaccgatctagtgaatttcatcctgatgttaggagagtgagacgtgaaggatcctacatatacgaggaattcatgcctactggtggcactgatgttaaagtttacactgttggcccaggatatgcacatgctgaggcacgtaaatcgcctgttgttgatggtgttgttatgaggaaccctgacggcaaggaagtacgataccctgtacttttgacccctactgagaaacaaatggcaagagatgtctgcaatgcttttagacagatggtttgtggttttgatctcttaagatgtgatgggagatcatatgtctgtgacgttaatggatggagctttgtgaagaactcatataagtattatgatgatgctgcttgcatcttgagaaaaatatttcttgatgcaaaagctcctcatctttcatcaaccatccctccaactcttccttggaagtctgaaccagttcagcccactgaaggtcttacacgacagggaagtggaattattggtacatttgggcagtcagaagaactgcgctgtgtaattgttgtaatacgccatggcgatcggacaccaaagcagaaggtgaaattgaaagtgacagaagaaaagcttctgaatttgatgttgaagtacaatggtggaaaaccaagagttgagacgaaactaaaaagtgctgtacagttacaagacttgctggatgctacaagacaacttgtaccaccaactaggtctggtcgggagagtgatagtgatgctgatgatattgagcatatcgagaaacttcgtcaagtcaaagcagtcctagaggagggtggacatttctctggcatttataggaaagtgcagctaaagccattgaaatggataaaagttccaaagcgtaatggtgatggtgaagaggaacgaccgattgaagccctgatgattctgaaatatggtggtgtgctcacccatgctgggagaaaacaggcagaggagctgggaagatttttcagaaataacatatatccaggtgaaggaactggtttgcttcgtctgcatagcacttatagacatgatttaaaaatatacagctcggacgaaggtcgtgtacagatgtctgcagcagcatttgcaaaaggccttcttgatttggaagggcagttgactccgatactggtatctttagtaagtaaagactcatctatgctagatggactagaagatgcaagcaccgagatggatgaagctaaggctagattgcatgagattattatttcaagtgagaaagcaaagaacacagaagggccagtggaatttccatggatggttgatggtgcaggattgcctgcaaatgcttcccagctcctgcctaagatggccaagttgacgaaagaagtgacttcacaagtaaagctgcttgctgaaggtgaagatgaaagacttgcgttgacgagcacattttcaaaatatgaccaggcaaaagctcttggaaagacaactattgatgtggctcgtattgctgccgggttgccatgtggtagtgaaagcttcctcttgatgtttgccagatggagaaaacttgagagggatttatacaatgaaagaaaggagtaaagtgtttaacctctggatgtttagaaatcaatatagtgttttattctacttttgttaaagtcactcatgatgctttatttcataatgcagccgttttgacattacacagatcccagatgtatatgattcctgcaagtatgaccttttgcataatgctcatctcaatcttaagggtttggaagagctattcaaagttgctcaaatactcgctgatggtgttattccaaatgagtatgggatcaacccaaagcaaaaactgaaaatcggctcaaagcgcgccgtttattgggaaaaatcctaatcgatctacgcaacactcgtgaagaagctatcagtgttgccgaaccaaaatttattgaagacgaagctctattcctaccaacaaaagaagcagagcaccagcagaaggttcatgttagaaatgaggatggaagaagatctagctctacgagtgagaagtcattggaccaagaagatgaagatgatagagaaactaaataccgattagatcccaagtatgccaatgtaaggacacctgagcgccatgtccgcactaggctttacttcacatcggaatctcatatacactcattgatgaatgtccttcgttactgcaatttggacgaaagtctacaaggagaggaaagccttgtctgccagagtgctttggaccgtctacatagaactagggagcttgattacatgagtaatattgtgcttagaatgtttgaaaacatagaggttcctttggaagatgagaagaggttcaggattgaaatgacgttcagtcgtggcgccgatctcagtcccctagaggacaaaaccagtgaaagttcttccttgctccaggagcacaccttgcccataatggggcccgagagactgcaggaagttgggtcctgcctgaccatggacaagttcgagaaaatggtgcggccattcgccatgccgccggaggacttccctcctgccgctccgccacaagccttgggctacttctccaaaggggcaggggtgcttgaaaggttggctagcctctggcctttccacaagagcgctaacgggaagtagctggaagctaacaaatccctgaaaccagttcatgtggttattcttgttctgtaacactttctgcacgccagcccaattttgacgatctgaatcatagtgaaaattttgctggttctttttcatgagcgcgagacataattgtgctatcatgttgcttgcatggatctgagatttaagggtgcgtttggttgctggatagccaaaacaggaatgtcccctggtatcctctcttgtccctccaattttaaggaacaactggggacaatactagaataattctgtctcaatccttgatcctgaactaaacaaacttatttaagtgatcatcccatcatgtcatgtcct

SEQ ID NO: 4924 - DNA, 3090 bp, Zea Mays
tttattggatctgaatgctgttcctcttggtaccgtaatggttggtttgactgcatgcaagatgcaactaatggttttttgtgtggccgaggggatgatcaccgaataatgatatattatcctagttctgctggtggtggaatgaaggaattattcagaaaggtgggtaaccgatctagtgaatttcatcctgatgttaggagagtgagacgtgaaggatcctacatatacgaggaattcatgcctactggtggcactgatgttaaagtttacactgttggcccaggatatgcacatgctgaggcacgtaaatcgcctgttgttgatggtgttgttatgaggaaccctgacggcaaggaagtacgataccctgtacttttgacccctactgagaaacaaatggcaagagatgtctgcaatgcttttagacagatggtttgtggttttgatctcttaagatgtgatgggagatcatatgtctgtgacgttaatggatggagctttgtgaagaactcatataagtattatgatgatgctgcttgcatcttgagaaaaatatttcttgatgcaaaagctcctcatctttcatcaaccatccctccaactcttccttggaagtctgaaccagttcagcccactgaaggtcttacacgacagggaagtggaattattggtacatttgggcagtcagaagaactgcgctgtgtaattgttgtaatacgccatggcgatcggacaccaaagcagaaggtgaaattgaaagtgacagaagaaaagcttctgaatttgatgttgaagtacaatggtggaaaaccaagagttgagacgaaactaaaaagtgctgtacagttacaagacttgctggatgctacaagacaacttgtaccaccaactaggtctggtcgggagagtgatagtgatgctgatgatattgagcatatcgagaaacttcgtcaagtcaaagcagtcctagaggagggtggacatttctctggcatttataggaaagtgcagctaaagccattgaaatggataaaagttccaaagcgtaatggtgatggtgaagaggaacgaccgattgaagccctgatgattctgaaatatggtggtgtgctcacccatgctgggagaaaacaggcagaggagctgggaagatttttcagaaataacatatatccaggtgaaggaactggtttgcttcgtctgcatagcacttatagacatgatttaaaaatatacagctcggacgaaggtcgtgtacagatgtctgcagcagcatttgcaaaaggccttcttgatttggaagggcagttgactccgatactggtatctttagtaagtaaagactcatctatgctagatggactagaagatgcaagcaccgagatggatgaagctaaggctagattgcatgagattattatttcaagtgagaaagcaaagaacacagaagggccagtggaatttccatggatggttgatggtgcaggattgcctgcaaatgcttcccagctcctgcctaagatggccaagttgacgaaagaagtgacttcacaagtaaagctgcttgctgaaggtgaagatgaaagacttgcgttgacgagcacattttcaaaatatgaccaggcaaaagctcttggaaagacaactattgatgtggctcgtattgctgccgggttgccatgtggtagtgaaagcttcctcttgatgtttgccagatggagaaaacttgagagggatttatacaatgaaagaaaggaccgttttgacattacacagatcccagatgtatatgattcctgcaagtatgaccttttgcataatgctcatctcaatcttaagggtttggaagagctattcaaagttgctcaaatactcgctgatggtgttattccaaatgagtatgggatcaacccaaagcaaaaactgaaaatcggctcaaagatagcgcgccgtttattgggaaaaatcctaatcgatctacgcaacactcgtgaagaagctatcagtgttgccgaaccaaaatttattgaagacgaagctctattcctaccaacaaaagaagcagagcaccagcagaaggttcatgttagaaatgaggatggaagaagatctagctctacgagtgagaagtcattggaccaagaagatgaagatgatagagaaactaaataccgattagatcccaagtatgccaatgtaaggacacctgagcgccatgtccgcactaggctttacttcacatcggaatctcatatacactcattgatgaatgtccttcgttactgcaatttggacgaaagtctacaaggagaggaaagccttgtctgccagagtgctttggaccgtctacatagaactagggagcttgattacatgagtaatattgtgcttagaatgtttgaaaacatagaggttcctttggaagatgagaagaggttcaggattgaaatgacgttcagtcgtggcgccgatctcagtcccctagaggacaaaaccagtgaaagttcttccttgctccaggagcacaccttgcccataatggggcccgagagactgcaggaagttgggtcctgcctgaccatggacaagttcgagaaaatggtgcggccattcgccatgccgccggaggacttccctcctgccgctccgccacaagccttgggctacttctccaaaggggcaggggtgcttgaaaggttggctagcctctggcctttccacaagagcgctaacgggaagtagctggaagctaacaaatccctgaaaccagttcatgtggttattcttgttctgtaacactttctgcacgccagcccaattttgacgatctgaatcatagtgaaaattttgctggttctttttcatgagcgcgagacataattgtgctatcatgttgcttgcatggatctgagatttaagggtgcgtttggttgctggatagccaaaacaggaatgtcccctggtatcctctcttgtccctccaattttaaggaacaactggggacaatactagaataattctgtctcaatccttgatcctgaactaaacaaacttatttaagtgatcatcccatcatgtcatgtcct

SEQ ID NO: 4925 - DNA, 3045 bp, Zea Mays
gttcctcttggtaccgtaatggttggtttgactgcatgcaagatgcaactaatggttttttgtgtggccgaggggatgatcaccgaataatgatatattatcctagttctgctggtggtggaatgaaggaattattcagaaaggtgggtaaccgatctagtgaatttcatcctgatgttaggagagtgagacgtgaaggatcctacatatacgaggaattcatgcctactggtggcactgatgttaaagtttacactgttggcccaggatatgcacatgctgaggcacgtaaatcgcctgttgttgatggtgttgttatgaggaaccctgacggcaaggaagtacgataccctgtacttttgacccctactgagaaacaaatggcaagagatgtctgcaatgcttttagacagatggtttgtggttttgatctcttaagatgtgatgggagatcatatgtctgtgacgttaatggatggagctttgtgaagaactcatataagtattatgatgatgctgcttgcatcttgagaaaaatatttcttgatgcaaaagctcctcatctttcatcaaccatccctccaactcttccttggaagtctgaaccagttcagcccactgaaggtcttacacgacagggaagtggaattattggtacatttgggcagtcagaagaactgcgctgtgtaattgttgtaatacgccatggcgatcggacaccaaagcagaaggtgaaattgaaagtgacagaagaaaagcttctgaatttgatgttgaagtacaatggtggaaaaccaagagttgagacgaaactaaaaagtgctgtacagttacaagacttgctggatgctacaagacaacttgtaccaccaactaggtctggtcgggagagtgatagtgatgctgatgatattgagcatatcgagaaacttcgtcaagtcaaagcagtcctagaggaggaaagtgcagctaaagccattgaaatggataaaagttccaaagcgtaatggtgatggtgaagaggaacgaccgattgaagccctgatgattctgaaatatggtggtgtgctcacccatgctgggagaaaacaggcagaggagctgggaagatttttcagaaataacatatatccaggtgaaggaactggtttgcttcgtctgcatagcacttatagacatgatttaaaaatatacagctcggacgaaggtcgtgtacagatgtctgcagcagcatttgcaaaaggccttcttgatttggaagggcagttgactccgatactggtatctttagtaagtaaagactcatctatgctagatggactagaagatgcaagcaccgagatggatgaagctaaggctagattgcatgagattattatttcaagtgagaaagcaaagaacacagaagggccagtggaatttccatggatggttgatggtgcaggattgcctgcaaatgcttcccagctcctgcctaagatggccaagttgacgaaagaagtgacttcacaagtaaagctgcttgctgaaggtgaagatgaaagacttgcgttgacgagcacattttcaaaatatgaccaggcaaaagctcttggaaagacaactattgatgtggctcgtattgctgccgggttgccatgtggtagtgaaagcttcctcttgatgtttgccagatggagaaaacttgagagggatttatacaatgaaagaaaggaccgttttgacattacacagatcccagatgtatatgattcctgcaagtatgaccttttgcataatgctcatctcaatcttaagggtttggaagagctattcaaagttgctcaaatactcgctgatggtgttattccaaatgagtatgggatcaacccaaagcaaaaactgaaaatcggctcaaagatagcgcgccgtttattgggaaaaatcctaatcgatctacgcaacactcgtgaagaagctatcagtgttgccgaaccaaaatttattgaagacgaagctctattcctaccaacaaaagaagcagagcaccagcagaaggttcatgttagaaatgaggatggaagaagatctagctctacgagtgagaagtcattggaccaagaagatgaagatgatagagaaactaaataccgattagatcccaagtatgccaatgtaaggacacctgagcgccatgtccgcactaggctttacttcacatcggaatctcatatacactcattgatgaatgtccttcgttactgcaatttggacgaaagtctacaaggagaggaaagccttgtctgccagagtgctttggaccgtctacatagaactagggagcttgattacatgagtaatattgtgcttagaatgtttgaaaacatagaggttcctttggaagatgagaagaggttcaggattgaaatgacgttcagtcgtggcgccgatctcagtcccctagaggacaaaaccagtgaaagttcttccttgctccaggagcacaccttgcccataatggggcccgagagactgcaggaagttgggtcctgcctgaccatggacaagttcgagaaaatggtgcggccattcgccatgccgccggaggacttccctcctgccgctccgccacaagccttgggctacttctccaaaggggcaggggtgcttgaaaggttggctagcctctggcctttccacaagagcgctaacgggaagtagctggaagctaacaaatccctgaaaccagttcatgtggttattcttgttctgtaacactttctgcacgccagcccaattttgacgatctgaatcatagtgaaaattttgctggttctttttcatgagcgcgagacataattgtgctatcatgttgcttgcatggatctgagatttaagggtgcgtttggttgctggatagccaaaacaggaatgtcccctggtatcctctcttgtccctccaattttaaggaacaactggggacaatactagaataattctgtctcaatccttgatcctgaactaaacaaacttatttaagtgatcatcccatcatgtcatgtcct

SEQ ID NO: 4926 - DNA, 3153 bp, Zea Mays
tggtaccgtaatggttggtttgactgcatgcaagatgcaactaatggttttttgtgtggccgaggggatgatcaccgaataatgatatattatcctagttctgctggtggtggaatgaaggaattattcagaaaggtgggtaaccgatctagtgaatttcatcctgatgttaggagagtgagacgtgaaggatcctacatatacgaggaattcatgcctactggtggcactgatgttaaagtttacactgttggcccaggatatgcacatgctgaggcacgtaaatcgcctgttgttgatggtgttgttatgaggaaccctgacggcaaggaagtacgataccctgtacttttgacccctactgagaaacaaatggcaagagatgtctgcaatgcttttagacagatggtttgtggttttgatctcttaagatgtgatgggagatcatatgtctgtgacgttaatggatggagctttgtgaagaactcatataagtatttttcttaatgttcagtttttaattgggaaacctgtcagtttgatttaataagtgctgaaatgtttgaacaaacttgtcatccaggtattatgatgatgctgcttgcatcttgagaaaaatatttcttgatgcaaaagctcctcatctttcatcaaccatccctccaactcttccttggaagtctgaaccagttcagcccactgaaggtcttacacgacagggaagtggaattattggtacatttgggcagtcagaagaactgcgctgtgtaattgttgtaatacgccatggcgatcggacaccaaagcagaaggtgaaattgaaagtgacagaagaaaagcttctgaatttgatgttgaagtacaatggtggaaaaccaagagttgagacgaaactaaaaagtgctgtacagttacaagacttgctggatgctacaagacaacttgtaccaccaactagggtctggtcgggagagtgatagtgatgctgatgatattgagcatatcgagaaacttcgtcaagtcaaagcagtcctagaggagggtggacatttctctggcatttataggaaagtgcagctaaagccattgaaatggataaaagttccaaagcgtaatggtgatggtgaagaggaacgaccgattgaagccctgatgattctgaaatatggtggtgtgctcacccatgctgggagaaaacaggcagaggagctgggaagatttttcagaaataacatatatccaggtgaaggaactggtttgcttcgtctgcatagcacttatagacatgatttaaaaatatacagctcggacgaaggtcgtgtacagatgtctgcagcagcatttgcaaaaggccttcttgatttggaagggcagttgactccgatactggtatctttagtaagtaaagactcatctatgctagatggactagaagatgcaagcaccgagatggatgaagctaaggctagattgcatgagattattatttcaagtgagaaagcaaagaacacagaagggccagtggaatttccatggatggttgatggtgcaggattgcctgcaaatgcttcccagctcctgcctaagatggccaagttgacgaaagaagtgacttcacaagtaaagctgcttgctgaaggtgaagatgaaagacttgcgttgacgagcacattttcaaaatatgaccaggcaaaagctcttggaaagacaactattgatgtggctcgtattgctgccgggttgccatgtggtagtgaaagcttcctcttgatgtttgccagatggagaaaacttgagagggatttatacaatgaaagaaaggaccgttttgacattacacagatcccagatgtatatgattcctgcaagtatgaccttttgcataatgctcatctcaatcttaagggtttggaagagctattcaaagttgctcaaatactcgctgatggtgttattccaaatgagtatgggatcaacccaaagcaaaaactgaaaatcggctcaaagatagcgcgccgtttattgggaaaaatcctaatcgatctacgcaacactcgtgaagaagctatcagtgttgccgaaccaaaatttattgaagacgaagctctattcctaccaacaaaagaagcagagcaccagcagaaggttcatgttagaaatgaggatggaagaagatctagctctacgagtgagaagtcattggaccaagaagatgaagatgatagagaaactaaataccgattagatcccaagtatgccaatgtaaggacacctgagcgccatgtccgcactaggctttacttcacatcggaatctcatatacactcattgatgaatgtccttcgttactgcaatttggacgaaagtctacaaggagaggaaagccttgtctgccagagtgctttggaccgtctacatagaactagggagcttgattacatgagtaatattgtgcttagaatgtttgaaaacatagaggttcctttggaagatgagaagaggttcaggattgaaatgacgttcagtcgtggcgccgatctcagtcccctagaggacaaaaccagtgaaagttcttccttgctccaggagcacaccttgcccataatggggcccgagagactgcaggaagttgggtcctgcctgaccatggacaagttcgagaaaatggtgcggccattcgccatgccgccggaggacttccctcctgccgctccgccacaagccttgggctacttctccaaaggggcaggggtgcttgaaaggttggctagcctctggcctttccacaagagcgctaacgggaagtagctggaagctaacaaatccctgaaaccagttcatgtggttattcttgttctgtaacactttctgcacgccagcccaattttgacgatctgaatcatagtgaaaattttgctggttctttttcatgagcgcgagacataattgtgctatcatgttgcttgcatggatctgagatttaagggtgcgtttggttgctggatagccaaaacaggaatgtcccctggtatcctctcttgtccctccaattttaaggaacaactggggacaatactagaataattctgtctcaatccttgatcctgaactaaacaaacttatttaagtgatcatcccatcatgtcatgtcct

SEQ ID NO: 4927 - DNA, 2951 bp, Zea Mays
gtcgattcacgctaggaaattttacatgaggtgggtaaccgatctagtgaatttcatcctgatgttaggagagtgagacgtgaaggatcctacatatacgaggaattcatgcctactggtggcactgatgttaaagtttacactgttggcccaggatatgcacatgctgaggcacgtaaatcgcctgttgttgatggtgttgttatgaggaaccctgacggcaaggaagtacgataccctgtacttttgacccctactgagaaacaaatggcaagagatgtctgcaatgcttttagacagatggtttgtggttttgatctcttaagatgtgatgggagatcatatgtctgtgacgttaatggatggagctttgtgaagaactcatataagtattatgatgatgctgcttgcatcttgagaaaaatatttcttgatgcaaaagctcctcatctttcatcaaccatccctccaactcttccttggaagtctgaaccagttcagcccactgaaggtcttacacgacagggaagtggaattattggtacatttgggcagtcagaagaactgcgctgtgtaattgttgtaatacgccatggcgatcggacaccaaagcagaaggtgaaattgaaagtgacagaagaaaagcttctgaatttgatgttgaagtacaatggtggaaaaccaagagttgagttttgggctcttcatgcagacgaaactaaaaagtgctgtacagttacaagacttgctggatgctacaagacaacttgtaccaccaactaggtctggtcgggagagtgatagtgatgctgatgatattgagcatatcgagaaacttcgtcaagtcaaagcagtcctagaggaggaaagtgcagctaaagccattgaaatggataaaagttccaaagcgtaatggtgatggtgaagaggaacgaccgattgaagccctgatgattctgaaatatggtggtgtgctcacccatgctgggagaaaacaggcagaggagctgggaagatttttcagaaataacatatatccaggtgaaggaactggtttgcttcgtctgcatagcacttatagacatgatttaaaaatatacagctcggacgaaggtcgtgtacagatgtctgcagcagcatttgcaaaaggccttcttgatttggaagggcagttgactccgatactggtatctttagtaagtaaagactcatctatgctagatggactagaagatgcaagcaccgagatggatgaagctaaggctagattgcatgagattattatttcaagtgagaaagcaaagaacacagaagggccagtggaatttccatggatggttgatggtgcaggattgcctgcaaatgcttcccagctcctgcctaagatggccaagttgacgaaagaagtgacttcacaagtaaagctgcttgctgaaggtgaagatgaaagacttgcgttgacgagcacattttcaaaatatgaccaggcaaaagctcttggaaagacaactattgatgtggctcgtattgctgccgggttgccatgtggtagtgaaagcttcctcttgatgtttgccagatggagaaaacttgagagggatttatacaatgaaagaaaggaccgttttgacattacacagatcccagatgtatatgattcctgcaagtatgaccttttgcataatgctcatctcaatcttaagggtttggaagagctattcaaagttgctcaaatactcgctgatggtgttattccaaatgagtatgggatcaacccaaagcaaaaactgaaaatcggctcaaagatagcgcgccgtttattgggaaaaatcctaatcgatctacgcaacactcgtgaagaagctatcagtgttgccgaaccaaaatttattgaagacgaagctctattcctaccaacaaaagaagcagagcaccagcagaaggttcatgttagaaatgaggatggaagaagatctagctctacgagtgagaagtcattggaccaagaagatgaagatgatagagaaactaaataccgattagatcccaagtatgccaatgtaaggacacctgagcgccatgtccgcactaggctttacttcacatcggaatctcatatacactcattgatgaatgtccttcgttactgcaatttggacgaaagtctacaaggagaggaaagccttgtctgccagagtgctttggaccgtctacatagaactagggagcttgattacatgagtaatattgtgcttagaatgtttgaaaacatagaggttcctttggaagatgagaagaggttcaggattgaaatgacgttcagtcgtggcgccgatctcagtcccctagaggacaaaaccagtgaaagttcttccttgctccaggagcacaccttgcccataatggggcccgagagactgcaggaagttgggtcctgcctgaccatggacaagttcgagaaaatggtgcggccattcgccatgccgccggaggacttccctcctgccgctccgccacaagccttgggctacttctccaaaggggcaggggtgcttgaaaggttggctagcctctggcctttccacaagagcgctaacgggaagtagctggaagctaacaaatccctgaaaccagttcatgtggttattcttgttctgtaacactttctgcacgccagcccaattttgacgatctgaatcatagtgaaaattttgctggttctttttcatgagcgcgagacataattgtgctatcatgttgcttgcatggatctgagatttaagggtgcgtttggttgctggatagccaaaacaggaatgtcccctggtatcctctcttgtccctccaattttaaggaacaactggggacaatactagaataattctgtctcaatccttgatcctgaactaaacaaacttatttaagtgatcatcccatcatgtcatgtcct

SEQ ID NO: 4928 - DNA, 5455 bp, Zea Mays
atgggccttggttgtccaatatctcagatctggactcgtcatcgccaagataacttaagcatggcaggcgtcatcgtgtcctcctcggcggcacgtacagagaagagccaggagcaagaccgactcacccgtacccgcgtcgacgagcgtcagtcggctcgcggctgcgaccgcgggcgggggcagcaagttggggaggaagaatacggcgaaggtcgggaagacgaacgagacgtccgacgatggcgaaatcgatggtgcgtgcatgatgtgaaacgtcctcgtggacgtgcaatagccactgtgcgagtcggtccggggctggtgtcggacgaatacgggaagggggcacatgctcctacgccctctgccgagaatggggtcgtacggagttggaggcataagggaagagagaaaataagtagaatggcgaccgagatggtggcaactgaggcgaggaccatcattattgtgcggagggggactgggggagctaccgagcacagtgcagaggtcagaccgtcagagggagttgctggtgcagtggtgcgggggagatcatcagatcagaggggtgtctccatggccgacaatgaggggaccctggacgccgtcctcaaggaggccgtcgacttggagaacatcccacttgaggaagtttttgagaatctgagatgcagtcgtggggggctcacttccgagcaggcgcagcaacgcctgcaattatttggccccaacaagctcgaagagaaggaggagagcaaatttctcaagtttctgggattcatgtggaacccactgtcatgggtcatggaggctgcagctatcatggccatcgcactggccaatggtgggggaaagccaccagactggcaggatttcgttggtatcatcacactgctgcttatcaactcaactatcagtttcatagaggaaaataatgctgggaatgctgctgctgcgcttatggcccgccttgcgccgaaagccaaggtgcttcgtgatggccgttgggccgaggaagaggcagccgtccttgtgcctggggatgtaatcagcattaaacttggagatatcatccctgcagatgctcggctccttgatggagatcccttgaagatcgatcagtcttcgctaactggagaatcgttgccagtcaccaaaggtcctggtgatggtgcctactctggttcgactgtcaagcagggtgaaattgaggctgttgtgatagcaactggtgtccacactttctttgggaaggctgcgcatcttgttgactccacgaatcaagtattgacagccattgggaacttttgtatttgttcaattgctgtggggatgtttgttgagataattgtcatgtaccctatccagcatagggcgtatcgtcctgggattgacaatcttttggtgctacttattggaggcattcccatagcaatgcctacagttttgtctgtgaccatggcaattgggtcccatcgcttggctcaacagggagctataacaaaaagaatgactgcaattgaagagatggctggtatggatgtactttgtagtgacaaaactggaactctgactctgaataaactcacagtggacaagaacctcattgaggtttttgaaagggaagtgactcaagaccaagtaattctgatggctgctagagcctcccgaatagaaaatcaagatgctattgatactgctatagttggcatgctagctgatccaaaagaggcccgtgctggtattcaagaggttcatttccttccatttaatcctaccgacaaaagaactgccttgacatacattgatagtgatgggaagatgtaccgtgttagtaaaggtgcgccagagcagattctcaacctcgtctacaataagttggagatagaacgaagagttcatgctgtaattgacaagtttgctgagcgtggacttagatcacttgctgtagcgtatcaggtagtgccagatggaaggaaagagagtcccggtgggccatggcattttgttgctcttatgccactctttgatcctccaaggcatgacagtgcagaaacaatacgaagggcattgaaccttggtgttagtgtaaaaatgatcacaggtgatcagctagcaattgggaaggaaacaggacgtcgcttaggcatgggtactaacatgtacccttcctctgctttgctgggacagaataaggatgagtctattgctgttttacctgttgacgatttaattgagaaagcggatggttttgctggcgtattccctgagcacaaatatgagattgtaaaacgtctgcaagcacgaaaacacatttgtggaatgactggcgatggagtaaatgatgcccctgccctaaagaaagctgatattggtatagcagttgctgatgccactgatgcagccaggagtgcttctgacattgtcctgacagaacctggcttgagtgtgataattagtgccgttcttaccagccgggcgattttccagaggatgaagaactacactatctatgctgtttccattacaatacgtattgtgctaggatttatgctacttgccctcatatgggagttcgatttcccaccatttatggtacttattattgcaattctaaatgacggtaccataatgaccatatcgaaggatcgagtgaagccttcgcctctaccggacagctggaagctggccgagattttcacaactggaattgtgcttggtggatacctggcagtgatgactgtcatcttcttctgggctgcatataagacaaactttttccctaggatcttccacgttgaaagccttgagaagacagctcaagatgattaccagaaactcgcctctgccgtatatctccaagttagcaccatcagccaagctctcatcttcgtgacgaggtctcgcagctggtcattcgctgagcgcccgggctttctactagtgtttgccttcctggtcgcgcagctgatagctacactggtagctgtatacgcggactgggggttcacttcgatcgaaggcattggatggggctgggctggtgtggtgtggctctacaacctcgtcttctacttcccgctcgacctcctcaagttcctcatccgatacgctctgagtggcaaagcgtgggatcttgtcattgagcaaaggattgcgtttacaaggaagaaggacttcgggaaggaggagagggcgctcaagtgggcacacgcgcagaggacgctccacgggctgcagccaccggatgccaagctgttccctgacagggtgaacgagctgaatcagatggccgaagaggccaaacggagggccgagattgcaaggctgagggagcttcacacgctgaaggggcatgtggagtcggttgtgaagctcaagggcctagacatcgacaccatccagcagtcgtacacagtctgatgaccctggattaagtacatacatgtatatctagttctggcaggtggcagtcgcctgcttgtttgtatttgccatataccataacacatcatgagaactggtagttggtgccgtcggttgtcttcgcgtgctccttgcgatgttattgtgttacgccggtttcaagcaacataggtcacggatcataaatcagatatccgacggatatcaaatccgtgtgtcatctccccgcgtcctggttgccccgcgtcgggcgactcggacgctccccataatccctagtagccgccgccgccccttcgtgggcctctccctgccgcgccgctgcctgagctggccgccggaaggttcggctgcttgcggggagggcggcggcggggcatctccgtctccctctggtggatctgggcgggcacagccgccaaggtcaccgtgagttgctcgtcggcgtggtcggccccggcttcgccccctcgcgactcgggtggctgccaactcccctccctccccatctctttgccttgccgccgccggagctagctggtgggttgctcgcacggctaggggtgaaggcgtcgggcgggtgcttgctgccttgtcgtgcgtccaacccacggtggcggcgtccgcccactcaggcaacgggcctgtggctgggtgcgcgcccgcgaggctagcccggtggcggcgcctgcgtgccgcgacggcaatcgctgctgctcgggggttggaggtgtgcctggactgtgtgctcgcgtacctgatgcgcggagggctggatctggcgcccccagggggagcggcgttggcgcgcggaaggctggatctggcgcgcgaggttggcggcctccgcatgccatccgtcggaggcggcggcaggctggtcccgggctagcgcatgagccggggtggaggtcggcgttggtgcgccggcaggcctgcgcagtcggccggaattgcagtggcgggacctcctctcgtctggggcagcatcggctagtcgatcgggctagcgcagggtggtggtggcggcaggcccaaaatcttcatcatttgtgtggtacgtcggggtaccggcgacggcggaggcagcttgctgtgtctcgaggtttcggccagacgttgtgctgggggctcttgggcgaaagtctcggcgacggtgacgcccatgggcgtcgcttcccctgttaagggcgtcacaccccagtgctatcttccttgggtgaaagctcggtccatcacggacaggtgacggtggcgtcacagtgacgtcactcccttcctgaaggcgtcgcttctgaagttcgtctcggccaggactttgccttcggctgttgcttcgcttctcggtgcctggtatgcgagtggaggtgggggttttgcaacgtgaagtcggagctgctacatcagtggatgtggctcggcaacgataacacgaggcgaacctcccttcttcgtggtccagaatgtttcgaaggtcgggcaaaaaccggaggcagggcagagggtcaagattggaagtcgaagctgctttgtgcctgagcccggcaacgatgacttgttgagacctttcgcttcgggttgtctatctgctttttgtttggttcgcctgttggctgctttggaaagtcggagttgttggatgctctgcatctttgcttgataacgatgacctttagcagttttgtgctctcgtgtggggttgccgctgcctgtgttgtttgggcactctatgtcgacggtgagtgtggtgtcgtgttgatgtcctaatccaaccgacgagttgagttgtatggtgttggcgtgttgatgtctcaatccaaccgcatgttgtttgttgtttagtccggtccggaccacttcttaattaatataatcggcagctctcatgtctggttcgtttcaaaaaaaaaaagtgtgtcaaattgtcatccctagctagacagagtagccatgggctgctatttggagctggtctggcccttttgcagatgactccctggatgactctcgtggtggctgagtg

SEQ ID NO: 4929 - DNA, 5473 bp, Zea Mays
atgggccttggttgtccaatatctcagatctggactcgtcatcgccaagataacttaagcatggcaggcgtcatcgtgtcctcctcggcggcacgtacagagaagagccaggagcaagaccgactcacccgtacccgcgtcgacgagcgtcagtcggctcgcggctgcgaccgcgggcgggggcagcaagttggggaggaagaatacggcgaaggtcgggaagacgaacgagacgtccgacgatggcgaaatcgatggtgcgtgcatgatgtgaaacgtcctcgtggacgtgcaatagccactgtgcgagtcggtccggggctggtgtcggacgaatacgggaagggggcacatgctcctacgccctctgccgagaatggggtcgtacggagttggaggcataagggaagagagaaaataagtagaatggcgaccgagatggtggcaactgaggcgaggaccatcattattgtgcggagggggactgggggagctaccgagcacagtgcagaggtcagaccgtcagagggagttgctggtgcagtggtgcgggggagatcatcagatcagaggggtgtctccatggccgacaatgaggggaccctggacgccgtcctcaaggaggccgtcgacttggagaacatcccacttgaggaagtttttgagaatctgagatgcagtcgtggggggctcacttccgagcaggcgcagcaacgcctgcaattatttggccccaacaagctcgaagagaaggaggagagcaaatttctcaagtttctgggattcatgtggaacccactgtcatgggtcatggaggctgcagctatcatggccatcgcactggccaatggtgggggaaagccaccagactggcaggatttcgttggtatcatcacactgctgcttatcaactcaactatcagtttcatagaggaaaataatgctgggaatgctgctgctgcgcttatggcccgccttgcgccgaaagccaaggtgcttcgtgatggccgttgggccgaggaagaggcagccgtccttgtgcctggggatgtaatcagcattaaacttggagatatcatccctgcagatgctcggctccttgatggagatcccttgaagatcgatcagtcttcgctaactggagaatcgttgccagtcaccaaaggtcctggtgatggtgcctactctggttcgactgtcaagcagggtgaaattgaggctgttgtgatagcaactggtgtccacactttctttgggaaggctgcgcatcttgttgactccacgaatcaagttggccatttccagaaggtattgacagccattgggaacttttgtatttgttcaattgctgtggggatgtttgttgagataattgtcatgtaccctatccagcatagggcgtatcgtcctgggattgacaatcttttggtgctacttattggaggcattcccatagcaatgcctacagttttgtctgtgaccatggcaattgggtcccatcgcttggctcaacagggagctataacaaaaagaatgactgcaattgaagagatggctggtatggatgtactttgtagtgacaaaactggaactctgactctgaataaactcacagtggacaagaacctcattgaggtttttgaaagggaagtgactcaagaccaagtaattctgatggctgctagagcctcccgaatagaaaatcaagatgctattgatactgctatagttggcatgctagctgatccaaaagaggcccgtgctggtattcaagaggttcatttccttccatttaatcctaccgacaaaagaactgccttgacatacattgatagtgatgggaagatgtaccgtgttagtaaaggtgcgccagagcagattctcaacctcgtctacaataagttggagatagaacgaagagttcatgctgtaattgacaagtttgctgagcgtggacttagatcacttgctgtagcgtatcaggtagtgccagatggaaggaaagagagtcccggtgggccatggcattttgttgctcttatgccactctttgatcctccaaggcatgacagtgcagaaacaatacgaagggcattgaaccttggtgttagtgtaaaaatgatcacaggtgatcagctagcaattgggaaggaaacaggacgtcgcttaggcatgggtactaacatgtacccttcctctgctttgctgggacagaataaggatgagtctattgctgttttacctgttgacgatttaattgagaaagcggatggttttgctggcgtattccctgagcacaaatatgagattgtaaaacgtctgcaagcacgaaaacacatttgtggaatgactggcgatggagtaaatgatgcccctgccctaaagaaagctgatattggtatagcagttgctgatgccactgatgcagccaggagtgcttctgacattgtcctgacagaacctggcttgagtgtgataattagtgccgttcttaccagccgggcgattttccagaggatgaagaactacactatctatgctgtttccattacaatacgtattgtgctaggatttatgctacttgccctcatatgggagttcgatttcccaccatttatggtacttattattgcaattctaaatgacggtaccataatgaccatatcgaaggatcgagtgaagccttcgcctctaccggacagctggaagctggccgagattttcacaactggaattgtgcttggtggatacctggcagtgatgactgtcatcttcttctgggctgcatataagacaaactttttccctaggatcttccacgttgaaagccttgagaagacagctcaagatgattaccagaaactcgcctctgccgtatatctccaagttagcaccatcagccaagctctcatcttcgtgacgaggtctcgcagctggtcattcgctgagcgcccgggctttctactagtgtttgccttcctggtcgcgcagctgatagctacactggtagctgtatacgcggactgggggttcacttcgatcgaaggcattggatggggctgggctggtgtggtgtggctctacaacctcgtcttctacttcccgctcgacctcctcaagttcctcatccgatacgctctgagtggcaaagcgtgggatcttgtcattgagcaaaggattgcgtttacaaggaagaaggacttcgggaaggaggagagggcgctcaagtgggcacacgcgcagaggacgctccacgggctgcagccaccggatgccaagctgttccctgacagggtgaacgagctgaatcagatggccgaagaggccaaacggagggccgagattgcaaggctgagggagcttcacacgctgaaggggcatgtggagtcggttgtgaagctcaagggcctagacatcgacaccatccagcagtcgtacacagtctgatgaccctggattaagtacatacatgtatatctagttctggcaggtggcagtcgcctgcttgtttgtatttgccatataccataacacatcatgagaactggtagttggtgccgtcggttgtcttcgcgtgctccttgcgatgttattgtgttacgccggtttcaagcaacataggtcacggatcataaatcagatatccgacggatatcaaatccgtgtgtcatctccccgcgtcctggttgccccgcgtcgggcgactcggacgctccccataatccctagtagccgccgccgccccttcgtgggcctctccctgccgcgccgctgcctgagctggccgccggaaggttcggctgcttgcggggagggcggcggcggggcatctccgtctccctctggtggatctgggcgggcacagccgccaaggtcaccgtgagttgctcgtcggcgtggtcggccccggcttcgccccctcgcgactcgggtggctgccaactcccctccctccccatctctttgccttgccgccgccggagctagctggtgggttgctcgcacggctaggggtgaaggcgtcgggcgggtgcttgctgccttgtcgtgcgtccaacccacggtggcggcgtccgcccactcaggcaacgggcctgtggctgggtgcgcgcccgcgaggctagcccggtggcggcgcctgcgtgccgcgacggcaatcgctgctgctcgggggttggaggtgtgcctggactgtgtgctcgcgtacctgatgcgcggagggctggatctggcgcccccagggggagcggcgttggcgcgcggaaggctggatctggcgcgcgaggttggcggcctccgcatgccatccgtcggaggcggcggcaggctggtcccgggctagcgcatgagccggggtggaggtcggcgttggtgcgccggcaggcctgcgcagtcggccggaattgcagtggcgggacctcctctcgtctggggcagcatcggctagtcgatcgggctagcgcagggtggtggtggcggcaggcccaaaatcttcatcatttgtgtggtacgtcggggtaccggcgacggcggaggcagcttgctgtgtctcgaggtttcggccagacgttgtgctgggggctcttgggcgaaagtctcggcgacggtgacgcccatgggcgtcgcttcccctgttaagggcgtcacaccccagtgctatcttccttgggtgaaagctcggtccatcacggacaggtgacggtggcgtcacagtgacgtcactcccttcctgaaggcgtcgcttctgaagttcgtctcggccaggactttgccttcggctgttgcttcgcttctcggtgcctggtatgcgagtggaggtgggggttttgcaacgtgaagtcggagctgctacatcagtggatgtggctcggcaacgataacacgaggcgaacctcccttcttcgtggtccagaatgtttcgaaggtcgggcaaaaaccggaggcagggcagagggtcaagattggaagtcgaagctgctttgtgcctgagcccggcaacgatgacttgttgagacctttcgcttcgggttgtctatctgctttttgtttggttcgcctgttggctgctttggaaagtcggagttgttggatgctctgcatctttgcttgataacgatgacctttagcagttttgtgctctcgtgtggggttgccgctgcctgtgttgtttgggcactctatgtcgacggtgagtgtggtgtcgtgttgatgtcctaatccaaccgacgagttgagttgtatggtgttggcgtgttgatgtctcaatccaaccgcatgttgtttgttgtttagtccggtccggaccacttcttaattaatataatcggcagctctcatgtctggttcgtttcaaaaaaaaaaagtgtgtcaaattgtcatccctagctagacagagtagccatgggctgctatttggagctggtctggcccttttgcagatgactccctggatgactctcgtggtggctgagtg

SEQ ID NO: 4930 - DNA, 5422 bp, Zea Mays
atgggccttggttgtccaatatctcagatctggactcgtcatcgccaagataacttaagcatggcaggcgtcatcgtgtcctcctcggcggcacgtacagagaagagccaggagcaagaccgactcacccgtacccgcgtcgacgagcgtcagtcggctcgcggctgcgaccgcgggcgggggcagcaagttggggaggaagaatacggcgaaggtcgggaagacgaacgagacgtccgacgatggcgaaatcgatggtgcgtgcatgatgtgaaacgtcctcgtggacgtgcaatagccactgtgcgagtcggtccggggctggtgtcggacgaatacgggaagggggcacatgctcctacgccctctgccgagaatggggtcgtacggagttggaggcataagggaagagagaaaataagtagaatggcgaccgagatggtggcaactgaggcgaggaccatcattattgtgcggagggggactgggggagctaccgagcacagtgcagaggtcagaccgtcagagggagttgctggtgcagtggtgcgggggagatcatcagatcagaggggtgtctccatggccgacaatgaggggaccctggacgccgtcctcaaggaggccgtcgacttggagaacatcccacttgaggaagtttttgagaatctgagatgcagtcgtggggggctcacttccgagcaggcgcagcaacgcctgcaattatttggccccaacaagctcgaagagaaggaggagagcaaatttctcaagtttctgggattcatgtggaacccactgtcatgggtcatggaggctgcagctatcatggccatcgcactggccaatggtgggggaaagccaccagactggcaggatttcgttggtatcatcacactgctgcttatcaactcaactatcagtttcatagaggaaaataatgctgggaatgctgctgctgcgcttatggcccgccttgcgccgaaagccaaggtgcttcgtgatggccgttgggccgaggaagaggcagccgtccttgtgcctggggatgtaatcagcattaaacttggagatatcatccctgcagatgctcggctccttgatggagatcccttgaagatcgatcagtcttcgctaactggagaatcgttgccagtcaccaaaggtcctggtgatggtgcctactctggttcgactgtcaagcagggtgaaattgaggctgttgtgatagcaactggtgtccacactttctttgggaaggctgcgcatcttgttgactccacgaatcaagtattgacagccattgggaacttttgtatttgttcaattgctgtggggatgtttgttgagataattgtcatgtaccctatccagcatagggcgtatcgtcctgggattgacaatcttttggtgctacttattggaggcattcccatagcaatgcctacagttttgtctgtgaccatggcaattgggtcccatcgcttggctcaacagggagctataacaaaaagaatgactgcaattgaagagatggctggtatggatgtactttgtagtgacaaaactggaactctgactctgaataaactcacagtggacaagaacctcattgaggtttttgaaagggaagtgactcaagaccaagtaattctgatggctgctagagcctcccgaatagaaaatcaagatgctattgatactgctatagttggcatgctagctgatccaaaagaggcccgtgctggtattcaagaggttcatttccttccatttaatcctaccgacaaaagaactgccttgacatacattgatagtgatgggaagatgtaccgtgttagtaaaggtgcgccagagcagattctcaacctcgtctacaataagttggagatagaacgaagagttcatgctgtaattgacaagtttgctgagcgtggacttagatcacttgctgtagcgtatcaggtagtgccagatggaaggaaagagagtcccggtgggccatggcattttgttgctcttatgccactctttgatcctccaaggcatgacagtgcagaaacaatacgaagggcattgaaccttggtgttagtgtaaaaatgatcacaggtgatcagctagcaattgggaaggaaacaggacgtcgcttaggcatgggtactaacatgtacccttcctctgctttgctgggacagaataaggatgagtctattgctgttttacctgttgacgatttaattgagaaagcggatggttttgctggcgtattccctgagcacaaatatgagattgtaaaacgtctgcaagcacgaaaacacatttgtggaatgactggcgatggagtaaatgatgcccctgccctaaagaaagctgatattggtatagcagttgctgatgccactgatgcagccaggagtgcttctgacattgtcctgacagaacctggcttgagtgtgataattagtgccgttcttaccagccgggcgattttccagaggatgaagaactacactctaggatttatgctacttgccctcatatgggagttcgatttcccaccatttatggtacttattattgcaattctaaatgacggtaccataatgaccatatcgaaggatcgagtgaagccttcgcctctaccggacagctggaagctggccgagattttcacaactggaattgtgcttggtggatacctggcagtgatgactgtcatcttcttctgggctgcatataagacaaactttttccctaggatcttccacgttgaaagccttgagaagacagctcaagatgattaccagaaactcgcctctgccgtatatctccaagttagcaccatcagccaagctctcatcttcgtgacgaggtctcgcagctggtcattcgctgagcgcccgggctttctactagtgtttgccttcctggtcgcgcagctgatagctacactggtagctgtatacgcggactgggggttcacttcgatcgaaggcattggatggggctgggctggtgtggtgtggctctacaacctcgtcttctacttcccgctcgacctcctcaagttcctcatccgatacgctctgagtggcaaagcgtgggatcttgtcattgagcaaaggattgcgtttacaaggaagaaggacttcgggaaggaggagagggcgctcaagtgggcacacgcgcagaggacgctccacgggctgcagccaccggatgccaagctgttccctgacagggtgaacgagctgaatcagatggccgaagaggccaaacggagggccgagattgcaaggctgagggagcttcacacgctgaaggggcatgtggagtcggttgtgaagctcaagggcctagacatcgacaccatccagcagtcgtacacagtctgatgaccctggattaagtacatacatgtatatctagttctggcaggtggcagtcgcctgcttgtttgtatttgccatataccataacacatcatgagaactggtagttggtgccgtcggttgtcttcgcgtgctccttgcgatgttattgtgttacgccggtttcaagcaacataggtcacggatcataaatcagatatccgacggatatcaaatccgtgtgtcatctccccgcgtcctggttgccccgcgtcgggcgactcggacgctccccataatccctagtagccgccgccgccccttcgtgggcctctccctgccgcgccgctgcctgagctggccgccggaaggttcggctgcttgcggggagggcggcggcggggcatctccgtctccctctggtggatctgggcgggcacagccgccaaggtcaccgtgagttgctcgtcggcgtggtcggccccggcttcgccccctcgcgactcgggtggctgccaactcccctccctccccatctctttgccttgccgccgccggagctagctggtgggttgctcgcacggctaggggtgaaggcgtcgggcgggtgcttgctgccttgtcgtgcgtccaacccacggtggcggcgtccgcccactcaggcaacgggcctgtggctgggtgcgcgcccgcgaggctagcccggtggcggcgcctgcgtgccgcgacggcaatcgctgctgctcgggggttggaggtgtgcctggactgtgtgctcgcgtacctgatgcgcggagggctggatctggcgcccccagggggagcggcgttggcgcgcggaaggctggatctggcgcgcgaggttggcggcctccgcatgccatccgtcggaggcggcggcaggctggtcccgggctagcgcatgagccggggtggaggtcggcgttggtgcgccggcaggcctgcgcagtcggccggaattgcagtggcgggacctcctctcgtctggggcagcatcggctagtcgatcgggctagcgcagggtggtggtggcggcaggcccaaaatcttcatcatttgtgtggtacgtcggggtaccggcgacggcggaggcagcttgctgtgtctcgaggtttcggccagacgttgtgctgggggctcttgggcgaaagtctcggcgacggtgacgcccatgggcgtcgcttcccctgttaagggcgtcacaccccagtgctatcttccttgggtgaaagctcggtccatcacggacaggtgacggtggcgtcacagtgacgtcactcccttcctgaaggcgtcgcttctgaagttcgtctcggccaggactttgccttcggctgttgcttcgcttctcggtgcctggtatgcgagtggaggtgggggttttgcaacgtgaagtcggagctgctacatcagtggatgtggctcggcaacgataacacgaggcgaacctcccttcttcgtggtccagaatgtttcgaaggtcgggcaaaaaccggaggcagggcagagggtcaagattggaagtcgaagctgctttgtgcctgagcccggcaacgatgacttgttgagacctttcgcttcgggttgtctatctgctttttgtttggttcgcctgttggctgctttggaaagtcggagttgttggatgctctgcatctttgcttgataacgatgacctttagcagttttgtgctctcgtgtggggttgccgctgcctgtgttgtttgggcactctatgtcgacggtgagtgtggtgtcgtgttgatgtcctaatccaaccgacgagttgagttgtatggtgttggcgtgttgatgtctcaatccaaccgcatgttgtttgttgtttagtccggtccggaccacttcttaattaatataatcggcagctctcatgtctggttcgtttcaaaaaaaaaaagtgtgtcaaattgtcatccctagctagacagagtagccatgggctgctatttggagctggtctggcccttttgcagatgactccctggatgactctcgtggtggctgagtg

SEQ ID NO: 4931 - DNA, 5528 bp, Zea Mays
atgggccttggttgtccaatatctcagatctggactcgtcatcgccaagataacttaagcatggcaggcgtcatcgtgtcctcctcggcggcacgtacagagaagagccaggagcaagaccgactcacccgtacccgcgtcgacgagcgtcagtcggctcgcggctgcgaccgcgggcgggggcagcaagttggggaggaagaatacggcgaaggtcgggaagacgaacgagacgtccgacgatggcgaaatcgatggtgcgtgcatgatgtgaaacgtcctcgtggacgtgcaatagccactgtgcgagtcggtccggggctggtgtcggacgaatacgggaagggggcacatgctcctacgccctctgccgagaatggggtcgtacggagttggaggcataagggaagagagaaaataagtagaatggcgaccgagatggtggcaactgaggcgaggaccatcattattgtgcggagggggactgggggagctaccgagcacagtgcagaggtcagaccgtcagagggagttgctggtgcagtggtgcgggggagatcatcagatcagaggggtgtctccatggccgacaatgaggggaccctggacgccgtcctcaaggaggccgtcgacttggagaacatcccacttgaggaagtttttgagaatctgagatgcagtcgtggggggctcacttccgagcaggcgcagcaacgcctgcaattatttggccccaacaagctcgaagagaaggaggagagcaaatttctcaagtttctgggattcatgtggaacccactgtcatgggtcatggaggctgcagctatcatggccatcgcactggccaatggtgggggaaagccaccagactggcaggatttcgttggtatcatcacactgctgcttatcaactcaactatcagtttcatagaggaaaataatgctgggaatgctgctgctgcgcttatggcccgccttgcgccgaaagccaaggtgcttcgtgatggccgttgggccgaggaagaggcagccgtccttgtgcctggggatgtaatcagcattaaacttggagatatcatccctgcagatgctcggctccttgatggagatcccttgaagatcgatcagtcttcgctaactggagaatcgttgccagtcaccaaaggtcctggtgatggtgcctactctggttcgactgtcaagcagggtgaaattgaggctgttgtgatagcaactggtgtccacactttctttgggaaggctgcgcatcttgttgactccacgaatcaagttggccatttccagaaggtattgacagccattgggaacttttgtatttgttcaattgctgtggggatgtttgttgagataattgtcatgtaccctatccagcatagggcgtatcgtcctgggattgacaatcttttggtgctacttattggaggcattcccatagcaatgcctacagttttgtctgtgaccatggcaattgggtcccatcgcttggctcaacagggagctataacaaaaagaatgactgcaattgaagagatggctggtatggatgtactttgtagtgacaaaactggaactctgactctgaataaactcacagtggacaagaacctcattgaggttagacttgaacaaccatcattggtcctttaaatctgaccttaaaacacttatatatgcttggttcaggtttttgaaagggaagtgactcaagaccaagtaattctgatggctgctagagcctcccgaatagaaaatcaagatgctattgatactgctatagttggcatgctagctgatccaaaagaggcccgtgctggtattcaagaggttcatttccttccatttaatcctaccgacaaaagaactgccttgacatacattgatagtgatgggaagatgtaccgtgttagtaaagattctcaacctcgtctacaataagttggagatagaacgaagagttcatgctgtaattgacaagtttgctgagcgtggacttagatcacttgctgtagcgtatcaggtagtgccagatggaaggaaagagagtcccggtgggccatggcattttgttgctcttatgccactctttgatcctccaaggcatgacagtgcagaaacaatacgaagggcattgaaccttggtgttagtgtaaaaatgatcacaggtgatcagctagcaattgggaaggaaacaggacgtcgcttaggcatgggtactaacatgtacccttcctctgctttgctgggacagaataaggatgagtctattgctgttttacctgttgacgatttaattgagaaagcggatggttttgctggcgtattccctgagcacaaatatgagattgtaaaacgtctgcaagcacgaaaacacatttgtggaatgactggcgatggagtaaatgatgcccctgccctaaagaaagctgatattggtatagcagttgctgatgccactgatgcagccaggagtgcttctgacattgtcctgacagaacctggcttgagtgtgataattagtgccgttcttaccagccgggcgattttccagaggatgaagaactacactatctatgctgtttccattacaatacgtattgtgctaggatttatgctacttgccctcatatgggagttcgatttcccaccatttatggtacttattattgcaattctaaatgacggtaccataatgaccatatcgaaggatcgagtgaagccttcgcctctaccggacagctggaagctggccgagattttcacaactggaattgtgcttggtggatacctggcagtgatgactgtcatcttcttctgggctgcatataagacaaactttttccctaggatcttccacgttgaaagccttgagaagacagctcaagatgattaccagaaactcgcctctgccgtatatctccaagttagcaccatcagccaagctctcatcttcgtgacgaggtctcgcagctggtcattcgctgagcgcccgggctttctactagtgtttgccttcctggtcgcgcagctgatagctacactggtagctgtatacgcggactgggggttcacttcgatcgaaggcattggatggggctgggctggtgtggtgtggctctacaacctcgtcttctacttcccgctcgacctcctcaagttcctcatccgatacgctctgagtggcaaagcgtgggatcttgtcattgagcaaaggattgcgtttacaaggaagaaggacttcgggaaggaggagagggcgctcaagtgggcacacgcgcagaggacgctccacgggctgcagccaccggatgccaagctgttccctgacagggtgaacgagctgaatcagatggccgaagaggccaaacggagggccgagattgcaaggctgagggagcttcacacgctgaaggggcatgtggagtcggttgtgaagctcaagggcctagacatcgacaccatccagcagtcgtacacagtctgatgaccctggattaagtacatacatgtatatctagttctggcaggtggcagtcgcctgcttgtttgtatttgccatataccataacacatcatgagaactggtagttggtgccgtcggttgtcttcgcgtgctccttgcgatgttattgtgttacgccggtttcaagcaacataggtcacggatcataaatcagatatccgacggatatcaaatccgtgtgtcatctccccgcgtcctggttgccccgcgtcgggcgactcggacgctccccataatccctagtagccgccgccgccccttcgtgggcctctccctgccgcgccgctgcctgagctggccgccggaaggttcggctgcttgcggggagggcggcggcggggcatctccgtctccctctggtggatctgggcgggcacagccgccaaggtcaccgtgagttgctcgtcggcgtggtcggccccggcttcgccccctcgcgactcgggtggctgccaactcccctccctccccatctctttgccttgccgccgccggagctagctggtgggttgctcgcacggctaggggtgaaggcgtcgggcgggtgcttgctgccttgtcgtgcgtccaacccacggtggcggcgtccgcccactcaggcaacgggcctgtggctgggtgcgcgcccgcgaggctagcccggtggcggcgcctgcgtgccgcgacggcaatcgctgctgctcgggggttggaggtgtgcctggactgtgtgctcgcgtacctgatgcgcggagggctggatctggcgcccccagggggagcggcgttggcgcgcggaaggctggatctggcgcgcgaggttggcggcctccgcatgccatccgtcggaggcggcggcaggctggtcccgggctagcgcatgagccggggtggaggtcggcgttggtgcgccggcaggcctgcgcagtcggccggaattgcagtggcgggacctcctctcgtctggggcagcatcggctagtcgatcgggctagcgcagggtggtggtggcggcaggcccaaaatcttcatcatttgtgtggtacgtcggggtaccggcgacggcggaggcagcttgctgtgtctcgaggtttcggccagacgttgtgctgggggctcttgggcgaaagtctcggcgacggtgacgcccatgggcgtcgcttcccctgttaagggcgtcacaccccagtgctatcttccttgggtgaaagctcggtccatcacggacaggtgacggtggcgtcacagtgacgtcactcccttcctgaaggcgtcgcttctgaagttcgtctcggccaggactttgccttcggctgttgcttcgcttctcggtgcctggtatgcgagtggaggtgggggttttgcaacgtgaagtcggagctgctacatcagtggatgtggctcggcaacgataacacgaggcgaacctcccttcttcgtggtccagaatgtttcgaaggtcgggcaaaaaccggaggcagggcagagggtcaagattggaagtcgaagctgctttgtgcctgagcccggcaacgatgacttgttgagacctttcgcttcgggttgtctatctgctttttgtttggttcgcctgttggctgctttggaaagtcggagttgttggatgctctgcatctttgcttgataacgatgacctttagcagttttgtgctctcgtgtggggttgccgctgcctgtgttgtttgggcactctatgtcgacggtgagtgtggtgtcgtgttgatgtcctaatccaaccgacgagttgagttgtatggtgttggcgtgttgatgtctcaatccaaccgcatgttgtttgttgtttagtccggtccggaccacttcttaattaatataatcggcagctctcatgtctggttcgtttcaaaaaaaaaaagtgtgtcaaattgtcatccctagctagacagagtagccatgggctgctatttggagctggtctggcccttttgcagatgactccctggatgactctcgtggtggctgagtg

SEQ ID NO: 4932 - DNA, 5761 bp, Zea Mays
atgggccttggttgtccaatatctcagatctggactcgtcatcgccaagataacttaagcatggcaggcgtcatcgtgtcctcctcggcggcacgtacagagaagagccaggagcaagaccgactcacccgtacccgcgtcgacgagcgtcagtcggctcgcggctgcgaccgcgggcgggggcagcaagttggggaggaagaatacggcgaaggtcgggaagacgaacgagacgtccgacgatggcgaaatcgatggtgcgtgcatgatgtgaaacgtcctcgtggacgtgcaatagccactgtgcgagtcggtccggggctggtgtcggacgaatacgggaagggggcacatgctcctacgccctctgccgagaatggggtcgtacggagttggaggcataagggaagagagaaaataagtagaatggcgaccgagatggtggcaactgaggcgaggaccatcattattgtgcggagggggactgggggagctaccgagcacagtgcagaggtcagaccgtcagagggagttgctggtgcagtggtgcgggggagatcatcagatcagaggggtgtctccatggccgacaatgaggggaccctggacgccgtcctcaaggaggccgtcgacttggagaacatcccacttgaggaagtttttgagaatctgagatgcagtcgtggggggctcacttccgagcaggcgcagcaacgcctgcaattatttggccccaacaagctcgaagagaaggagttaaactggccatggctgcaggagagcaaatttctcaagtttctgggattcatgtggaacccactgtcatgggtcatggaggctgcagctatcatggccatcgcactggccaatggtgggggaaagccaccagactggcaggatttcgttggtatcatcacactgctgcttatcaactcaactatcagtttcatagaggaaaataatgctgggaatgctgctgctgcgcttatggcccgccttgcgccgaaagccaaggtgcttcgtgatggccgttgggccgaggaagaggcagccgtccttgtgcctggggatgtaatcagcattaaacttggagatatcatccctgcagatgctcggctccttgatggagatcccttgaagatcgatcagtcttcgctaactggagaatcgttgccagtcaccaaaggtcctggtgatggtgcctactctggttcgactgtcaagcagggtgaaattgaggctgttgtgatagcaactggtgtccacactttctttgggaaggctgcgcatcttgttgactccacgaatcaagtattgacagccattgggaacttttgtatttgttcaattgctgtggggatgtttgttgagataattgtcatgtaccctatccagcatagggcgtatcgtcctgggattgacaatcttttggtgctacttattggaggcattcccatagcaatgcctacagttttgtctgtgaccatggcaattgggtcccatcgcttggctcaacagggagctataacaaaaagaatgactgcaattgaagagatggctggtatggatgtactttgtagtgacaaaactggaactctgactctgaataaactcacagtggacaagaacctcattgaggtttttgaaagggaagtgactcaagaccaagtaattctgatggctgctagagcctcccgaatagaaaatcaagatgctattgatactgctatagttggcatgctagctgatccaaaagaggcccgtgctggtattcaagaggttcatttccttccatttaatcctaccgacaaaagaactgccttgacatacattgatagtgatgggaagatgtaccgtgttagtaaaggtgcgccagagcagattctcaacctcgtctacaataagttggagatagaacgaagagttcatgctgtaattgacaagtttgctgagcgtggacttagatcacttgctgtagcgtatcaggtagtgccagatggaaggaaagagagtcccggtgggccatggcattttgttgctcttatgccactctttgatcctccaaggcatgacagtgcagaaacaatacgaagggcattgaaccttggtgttagtgtaaaaatgatcacaggtgatcagctagcaattgggaaggaaacaggacgtcgcttaggcatgggtactaacatgtacccttcctctgctttgctgggacagaataaggatgagtctattgctgttttacctgttgacgatttaattgagaaagcggatggttttgctggcgtattccctgagcacaaatatgagattgtaaaacgtctgcaagcacgaaaacacatttgtggaatgactggcgatggagtaaatgatgcccctgccctaaagaaagctgatattggtatagcagttgctgatgccactgatgcagccaggagtgcttctgacattgtcctgacagaacctggcttgagtgtgataattagtgccgttcttaccagccgggcgattttccagaggatgaagaactacactatctatgctgtttccattacaatacgtattgtggtatgttttcttggcttgtgctttagaactagaagttgtgcaactttattatattggcctcctttggctacagtggttgtgtatctttctgttgcatacttgtgtgaaatatgtttgtgcatttatttgagtacttattttggttgttaattttttaatcgggtttagctgtttatgttatgcagcaaattaattagaaccacatatttaattagattcgtcttgatccttgaaattttgtgaataatctggaattaacacatttggttgctcaatgtttaacagctaggatttatgctacttgccctcatatgggagttcgatttcccaccatttatggtacttattattgcaattctaaatgacggtaccataatgaccatatcgaaggatcgagtgaagccttcgcctctaccggacagctggaagctggccgagattttcacaactggaattgtgcttggtggatacctggcagtgatgactgtcatcttcttctgggctgcatataagacaaactttttccctaggatcttccacgttgaaagccttgagaagacagctcaagatgattaccagaaactcgcctctgccgtatatctccaagttagcaccatcagccaagctctcatcttcgtgacgaggtctcgcagctggtcattcgctgagcgcccgggctttctactagtgtttgccttcctggtcgcgcagctgatagctacactggtagctgtatacgcggactgggggttcacttcgatcgaaggcattggatggggctgggctggtgtggtgtggctctacaacctcgtcttctacttcccgctcgacctcctcaagttcctcatccgatacgctctgagtggcaaagcgtgggatcttgtcattgagcaaaggattgcgtttacaaggaagaaggacttcgggaaggaggagagggcgctcaagtgggcacacgcgcagaggacgctccacgggctgcagccaccggatgccaagctgttccctgacagggtgaacgagctgaatcagatggccgaagaggccaaacggagggccgagattgcaaggctgagggagcttcacacgctgaaggggcatgtggagtcggttgtgaagctcaagggcctagacatcgacaccatccagcagtcgtacacagtctgatgaccctggattaagtacatacatgtatatctagttctggcaggtggcagtcgcctgcttgtttgtatttgccatataccataacacatcatgagaactggtagttggtgccgtcggttgtcttcgcgtgctccttgcgatgttattgtgttacgccggtttcaagcaacataggtcacggatcataaatcagatatccgacggatatcaaatccgtgtgtcatctccccgcgtcctggttgccccgcgtcgggcgactcggacgctccccataatccctagtagccgccgccgccccttcgtgggcctctccctgccgcgccgctgcctgagctggccgccggaaggttcggctgcttgcggggagggcggcggcggggcatctccgtctccctctggtggatctgggcgggcacagccgccaaggtcaccgtgagttgctcgtcggcgtggtcggccccggcttcgccccctcgcgactcgggtggctgccaactcccctccctccccatctctttgccttgccgccgccggagctagctggtgggttgctcgcacggctaggggtgaaggcgtcgggcgggtgcttgctgccttgtcgtgcgtccaacccacggtggcggcgtccgcccactcaggcaacgggcctgtggctgggtgcgcgcccgcgaggctagcccggtggcggcgcctgcgtgccgcgacggcaatcgctgctgctcgggggttggaggtgtgcctggactgtgtgctcgcgtacctgatgcgcggagggctggatctggcgcccccagggggagcggcgttggcgcgcggaaggctggatctggcgcgcgaggttggcggcctccgcatgccatccgtcggaggcggcggcaggctggtcccgggctagcgcatgagccggggtggaggtcggcgttggtgcgccggcaggcctgcgcagtcggccggaattgcagtggcgggacctcctctcgtctggggcagcatcggctagtcgatcgggctagcgcagggtggtggtggcggcaggcccaaaatcttcatcatttgtgtggtacgtcggggtaccggcgacggcggaggcagcttgctgtgtctcgaggtttcggccagacgttgtgctgggggctcttgggcgaaagtctcggcgacggtgacgcccatgggcgtcgcttcccctgttaagggcgtcacaccccagtgctatcttccttgggtgaaagctcggtccatcacggacaggtgacggtggcgtcacagtgacgtcactcccttcctgaaggcgtcgcttctgaagttcgtctcggccaggactttgccttcggctgttgcttcgcttctcggtgcctggtatgcgagtggaggtgggggttttgcaacgtgaagtcggagctgctacatcagtggatgtggctcggcaacgataacacgaggcgaacctcccttcttcgtggtccagaatgtttcgaaggtcgggcaaaaaccggaggcagggcagagggtcaagattggaagtcgaagctgctttgtgcctgagcccggcaacgatgacttgttgagacctttcgcttcgggttgtctatctgctttttgtttggttcgcctgttggctgctttggaaagtcggagttgttggatgctctgcatctttgcttgataacgatgacctttagcagttttgtgctctcgtgtggggttgccgctgcctgtgttgtttgggcactctatgtcgacggtgagtgtggtgtcgtgttgatgtcctaatccaaccgacgagttgagttgtatggtgttggcgtgttgatgtctcaatccaaccgcatgttgtttgttgtttagtccggtccggaccacttcttaattaatataatcggcagctctcatgtctggttcgtttcaaaaaaaaaaagtgtgtcaaattgtcatccctagctagacagagtagccatgggctgctatttggagctggtctggcccttttgcagatgactccctggatgactctcgtggtggctgagtg

SEQ ID NO: 4933 - DNA, 5817 bp, Zea Mays
atgggccttggttgtccaatatctcagatctggactcgtcatcgccaagataacttaagcatggcaggcgtcatcgtgtcctcctcggcggcacgtacagagaagagccaggagcaagaccgactcacccgtacccgcgtcgacgagcgtcagtcggctcgcggctgcgaccgcgggcgggggcagcaagttggggaggaagaatacggcgaaggtcgggaagacgaacgagacgtccgacgatggcgaaatcgatggtgcgtgcatgatgtgaaacgtcctcgtggacgtgcaatagccactgtgcgagtcggtccggggctggtgtcggacgaatacgggaagggggcacatgctcctacgccctctgccgagaatggggtcgtacggagttggaggcataagggaagagagaaaataagtagaatggcgaccgagatggtggcaactgaggcgaggaccatcattattgtgcggagggggactgggggagctaccgagcacagtgcagaggtcagaccgtcagagggagttgctggtgcagtggtgcgggggagatcatcagatcagaggggtgtctccatggccgacaatgaggggaccctggacgccgtcctcaaggaggccgtcgacttggagaacatcccacttgaggaagtttttgagaatctgagatgcagtcgtggggggctcacttccgagcaggcgcagcaacgcctgcaattatttggccccaacaagctcgaagagaaggaggagagcaaatttctcaagtttctgggattcatgtggaacccactgtcatgggtcatggaggctgcagctatcatggccatcgcactggccaatggtgggggaaagccaccagactggcaggatttcgttggtatcatcacactgctgcttatcaactcaactatcagtttcatagaggaaaataatgctgggaatgctgctgctgcgcttatggcccgccttgcgccgaaagccaaggtgcttcgtgatggccgttgggccgaggaagaggcagccgtccttgtgcctggggatgtaatcagcattaaacttggagatatcatccctgcagatgctcggctccttgatggagatcccttgaagatcgatcaggtccttatgcctgacatttagtcactttcacactttatctcttgatctcacattttttgtctcgtctcttattgtagtcttcgctaactggagaatcgttgccagtcaccaaaggtcctggtgatggtgcctactctggttcgactgtcaagcagggtgaaattgaggctgttgtgatagcaactggtgtccacactttctttgggaaggctgcgcatcttgttgactccacgaatcaagtattgacagccattgggaacttttgtatttgttcaattgctgtggggatgtttgttgagataattgtcatgtaccctatccagcatagggcgtatcgtcctgggattgacaatcttttggtgctacttattggaggcattcccatagcaatgcctacagttttgtctgtgaccatggcaattgggtcccatcgcttggctcaacagggagctataacaaaaagaatgactgcaattgaagagatggctggtatggatgtactttgtagtgacaaaactggaactctgactctgaataaactcacagtggacaagaacctcattgaggtttttgaaagggaagtgactcaagaccaagtaattctgatggctgctagagcctcccgaatagaaaatcaagatgctattgatactgctatagttggcatgctagctgatccaaaagaggcccgtgctggtattcaagaggttcatttccttccatttaatcctaccgacaaaagaactgccttgacatacattgatagtgatgggaagatgtaccgtgttagtaaaggtgcgccagagcagattctcaacctcgtctacaataagttggagatagaacgaagagttcatgctgtaattgacaagtttgctgagcgtggacttagatcacttgctgtagcgtatcaggtagtgccagatggaaggaaagagagtcccggtgggccatggcattttgttgctcttatgccactctttgatcctccaaggcatgacagtgcagaaacaatacgaagggcattgaaccttggtgttagtgtaaaaatgatcacaggtgatcagctagcaattgggaaggaaacaggacgtcgcttaggcatgggtactaacatgtacccttcctctgctttgctgggacagaataaggatgagtctattgctgttttacctgttgacgatttaattgagaaagcggatggttttgctggcgtattccctgagcacaaatatgagattgtaaaacgtctgcaagcacgaaaacacatttgtggaatgactggcgatggagtaaatgatgcccctgccctaaagaaagctgatattggtatagcagttgctgatgccactgatgcagccaggagtgcttctgacattgtcctgacagaacctggcttgagtgtgataattagtgccgttcttaccagccgggcgattttccagaggatgaagaactacactatctatgctgtttccattacaatacgtattgtggtatgttttcttggcttgtgctttagaactagaagttgtgcaactttattatattggcctcctttggctacagtggttgtgtatctttctgttgcatacttgtgtgaaatatgtttgtgcatttatttgagtacttattttggttgttaattttttaatcgggtttagctgtttatgttatgcagcaaattaattagaaccacatatttaattagattcgtcttgatccttgaaattttgtgaataatctggaattaacacatttggttgctcaatgtttaacagctaggatttatgctacttgccctcatatgggagttcgatttcccaccatttatggtacttattattgcaattctaaatgacggtaccataatgaccatatcgaaggatcgagtgaagccttcgcctctaccggacagctggaagctggccgagattttcacaactggaattgtgcttggtggatacctggcagtgatgactgtcatcttcttctgggctgcatataagacaaactttttccctaggatcttccacgttgaaagccttgagaagacagctcaagatgattaccagaaactcgcctctgccgtatatctccaagttagcaccatcagccaagctctcatcttcgtgacgaggtctcgcagctggtcattcgctgagcgcccgggctttctactagtgtttgccttcctggtcgcgcagctgatagctacactggtagctgtatacgcggactgggggttcacttcgatcgaaggcattggatggggctgggctggtgtggtgtggctctacaacctcgtcttctacttcccgctcgacctcctcaagttcctcatccgatacgctctgagtggcaaagcgtgggatcttgtcattgagcaaaggattgcgtttacaaggaagaaggacttcgggaaggaggagagggcgctcaagtgggcacacgcgcagaggacgctccacgggctgcagccaccggatgccaagctgttccctgacagggtgaacgagctgaatcagatggccgaagaggccaaacggagggccgagattgcaaggctgagggagcttcacacgctgaaggggcatgtggagtcggttgtgaagctcaagggcctagacatcgacaccatccagcagtcgtacacagtctgatgaccctggattaagtacatacatgtatatctagttctggcaggtggcagtcgcctgcttgtttgtatttgccatataccataacacatcatgagaactggtagttggtgccgtcggttgtcttcgcgtgctccttgcgatgttattgtgttacgccggtttcaagcaacataggtcacggatcataaatcagatatccgacggatatcaaatccgtgtgtcatctccccgcgtcctggttgccccgcgtcgggcgactcggacgctccccataatccctagtagccgccgccgccccttcgtgggcctctccctgccgcgccgctgcctgagctggccgccggaaggttcggctgcttgcggggagggcggcggcggggcatctccgtctccctctggtggatctgggcgggcacagccgccaaggtcaccgtgagttgctcgtcggcgtggtcggccccggcttcgccccctcgcgactcgggtggctgccaactcccctccctccccatctctttgccttgccgccgccggagctagctggtgggttgctcgcacggctaggggtgaaggcgtcgggcgggtgcttgctgccttgtcgtgcgtccaacccacggtggcggcgtccgcccactcaggcaacgggcctgtggctgggtgcgcgcccgcgaggctagcccggtggcggcgcctgcgtgccgcgacggcaatcgctgctgctcgggggttggaggtgtgcctggactgtgtgctcgcgtacctgatgcgcggagggctggatctggcgcccccagggggagcggcgttggcgcgcggaaggctggatctggcgcgcgaggttggcggcctccgcatgccatccgtcggaggcggcggcaggctggtcccgggctagcgcatgagccggggtggaggtcggcgttggtgcgccggcaggcctgcgcagtcggccggaattgcagtggcgggacctcctctcgtctggggcagcatcggctagtcgatcgggctagcgcagggtggtggtggcggcaggcccaaaatcttcatcatttgtgtggtacgtcggggtaccggcgacggcggaggcagcttgctgtgtctcgaggtttcggccagacgttgtgctgggggctcttgggcgaaagtctcggcgacggtgacgcccatgggcgtcgcttcccctgttaagggcgtcacaccccagtgctatcttccttgggtgaaagctcggtccatcacggacaggtgacggtggcgtcacagtgacgtcactcccttcctgaaggcgtcgcttctgaagttcgtctcggccaggactttgccttcggctgttgcttcgcttctcggtgcctggtatgcgagtggaggtgggggttttgcaacgtgaagtcggagctgctacatcagtggatgtggctcggcaacgataacacgaggcgaacctcccttcttcgtggtccagaatgtttcgaaggtcgggcaaaaaccggaggcagggcagagggtcaagattggaagtcgaagctgctttgtgcctgagcccggcaacgatgacttgttgagacctttcgcttcgggttgtctatctgctttttgtttggttcgcctgttggctgctttggaaagtcggagttgttggatgctctgcatctttgcttgataacgatgacctttagcagttttgtgctctcgtgtggggttgccgctgcctgtgttgtttgggcactctatgtcgacggtgagtgtggtgtcgtgttgatgtcctaatccaaccgacgagttgagttgtatggtgttggcgtgttgatgtctcaatccaaccgcatgttgtttgttgtttagtccggtccggaccacttcttaattaatataatcggcagctctcatgtctggttcgtttcaaaaaaaaaaagtgtgtcaaattgtcatccctagctagacagagtagccatgggctgctatttggagctggtctggcccttttgcagatgactccctggatgactctcgtggtggctgagtg

SEQ ID NO: 4934 - DNA, 4714 bp, Zea Mays
agcaaatttctcaagtttctgggattcatgtggaacccactgtcatgggtcatggaggctgcagctatcatggccatcgcactggccaatggtgggggaaagccaccagactggcaggatttcgttggtatcatcacactgctgcttatcaactcaactatcagtttcatagaggaaaataatgctgggaatgctgctgctgcgcttatggcccgccttgcgccgaaagccaaggtgcttcgtgatggccgttgggccgaggaagaggcagccgtccttgtgcctggggatgtaatcagcattaaacttggagatatcatccctgcagatgctcggctccttgatggagatcccttgaagatcgatcagtcttcgctaactggagaatcgttgccagtcaccaaaggtcctggtgatggtgcctactctggttcgactgtcaagcagggtgaaattgaggctgttgtgatagcaactggtgtccacactttctttgggaaggctgcgcatcttgttgactccacgaatcaagttggccatttccagaaggtattgacagccattgggaacttttgtatttgttcaattgctgtggggatgtttgttgagataattgtcatgtaccctatccagcatagggcgtatcgtcctgggattgacaatcttttggtgctacttattggaggcattcccatagcaatgcctacagttttgtctgtgaccatggcaattgggtcccatcgcttggctcaacagggagctataacaaaaagaatgactgcaattgaagagatggctggtatggatgtactttgtagtgacaaaactggaactctgactctgaataaactcacagtggacaagaacctcattgaggtttttgaaagggaagtgactcaagaccaagtaattctgatggctgctagagcctcccgaatagaaaatcaagatgctattgatactgctatagttggcatgctagctgatccaaaagaggcccgtgctggtattcaagaggttcatttccttccatttaatcctaccgacaaaagaactgccttgacatacattgatagtgatgggaagatgtaccgtgttagtaaaggtgcgccagagcagattctcaacctcgtctacaataagttggagatagaacgaagagttcatgctgtaattgacaagtttgctgagcgtggacttagatcacttgctgtagcgtatcaggtagtgccagatggaaggaaagagagtcccggtgggccatggcattttgttgctcttatgccactctttgatcctccaaggcatgacagtgcagaaacaatacgaagggcattgaaccttggtgttagtgtaaaaatgatcacaggtgatcagctagcaattgggaaggaaacaggacgtcgcttaggcatgggtactaacatgtacccttcctctgctttgctgggacagaataaggatgagtctattgctgttttacctgttgacgatttaattgagaaagcggatggttttgctggcgtattccctgagcacaaatatgagattgtaaaacgtctgcaagcacgaaaacacatttgtggaatgactggcgatggagtaaatgatgcccctgccctaaagaaagctgatattggtatagcagttgctgatgccactgatgcagccaggagtgcttctgacattgtcctgacagaacctggcttgagtgtgataattagtgccgttcttaccagccgggcgattttccagaggatgaagaactacactatctatgctgtttccattacaatacgtattgtgctaggatttatgctacttgccctcatatgggagttcgatttcccaccatttatggtacttattattgcaattctaaatgacggtaccataatgaccatatcgaaggatcgagtgaagccttcgcctctaccggacagctggaagctggccgagattttcacaactggaattgtgcttggtggatacctggcagtgatgactgtcatcttcttctgggctgcatataagacaaactttttccctaggatcttccacgttgaaagccttgagaagacagctcaagatgattaccagaaactcgcctctgccgtatatctccaagttagcaccatcagccaagctctcatcttcgtgacgaggtctcgcagctggtcattcgctgagcgcccgggctttctactagtgtttgccttcctggtcgcgcagctgatagctacactggtagctgtatacgcggactgggggttcacttcgatcgaaggcattggatggggctgggctggtgtggtgtggctctacaacctcgtcttctacttcccgctcgacctcctcaagttcctcatccgatacgctctgagtggcaaagcgtgggatcttgtcattgagcaaaggattgcgtttacaaggaagaaggacttcgggaaggaggagagggcgctcaagtgggcacacgcgcagaggacgctccacgggctgcagccaccggatgccaagctgttccctgacagggtgaacgagctgaatcagatggccgaagaggccaaacggagggccgagattgcaaggctgagggagcttcacacgctgaaggggcatgtggagtcggttgtgaagctcaagggcctagacatcgacaccatccagcagtcgtacacagtctgatgaccctggattaagtacatacatgtatatctagttctggcaggtggcagtcgcctgcttgtttgtatttgccatataccataacacatcatgagaactggtagttggtgccgtcggttgtcttcgcgtgctccttgcgatgttattgtgttacgccggtttcaagcaacataggtcacggatcataaatcagatatccgacggatatcaaatccgtgtgtcatctccccgcgtcctggttgccccgcgtcgggcgactcggacgctccccataatccctagtagccgccgccgccccttcgtgggcctctccctgccgcgccgctgcctgagctggccgccggaaggttcggctgcttgcggggagggcggcggcggggcatctccgtctccctctggtggatctgggcgggcacagccgccaaggtcaccgtgagttgctcgtcggcgtggtcggccccggcttcgccccctcgcgactcgggtggctgccaactcccctccctccccatctctttgccttgccgccgccggagctagctggtgggttgctcgcacggctaggggtgaaggcgtcgggcgggtgcttgctgccttgtcgtgcgtccaacccacggtggcggcgtccgcccactcaggcaacgggcctgtggctgggtgcgcgcccgcgaggctagcccggtggcggcgcctgcgtgccgcgacggcaatcgctgctgctcgggggttggaggtgtgcctggactgtgtgctcgcgtacctgatgcgcggagggctggatctggcgcccccagggggagcggcgttggcgcgcggaaggctggatctggcgcgcgaggttggcggcctccgcatgccatccgtcggaggcggcggcaggctggtcccgggctagcgcatgagccggggtggaggtcggcgttggtgcgccggcaggcctgcgcagtcggccggaattgcagtggcgggacctcctctcgtctggggcagcatcggctagtcgatcgggctagcgcagggtggtggtggcggcaggcccaaaatcttcatcatttgtgtggtacgtcggggtaccggcgacggcggaggcagcttgctgtgtctcgaggtttcggccagacgttgtgctgggggctcttgggcgaaagtctcggcgacggtgacgcccatgggcgtcgcttcccctgttaagggcgtcacaccccagtgctatcttccttgggtgaaagctcggtccatcacggacaggtgacggtggcgtcacagtgacgtcactcccttcctgaaggcgtcgcttctgaagttcgtctcggccaggactttgccttcggctgttgcttcgcttctcggtgcctggtatgcgagtggaggtgggggttttgcaacgtgaagtcggagctgctacatcagtggatgtggctcggcaacgataacacgaggcgaacctcccttcttcgtggtccagaatgtttcgaaggtcgggcaaaaaccggaggcagggcagagggtcaagattggaagtcgaagctgctttgtgcctgagcccggcaacgatgacttgttgagacctttcgcttcgggttgtctatctgctttttgtttggttcgcctgttggctgctttggaaagtcggagttgttggatgctctgcatctttgcttgataacgatgacctttagcagttttgtgctctcgtgtggggttgccgctgcctgtgttgtttgggcactctatgtcgacggtgagtgtggtgtcgtgttgatgtcctaatccaaccgacgagttgagttgtatggtgttggcgtgttgatgtctcaatccaaccgcatgttgtttgttgtttagtccggtccggaccacttcttaattaatataatcggcagctctcatgtctggttcgtttcaaaaaaaaaaagtgtgtcaaattgtcatccctagctagacagagtagccatgggctgctatttggagctggtctggcccttttgcagatgactccctggatgactctcgtggtggctgagtg

SEQ ID NO: 4935 - DNA, 4696 bp, Zea Mays
agcaaatttctcaagtttctgggattcatgtggaacccactgtcatgggtcatggaggctgcagctatcatggccatcgcactggccaatggtgggggaaagccaccagactggcaggatttcgttggtatcatcacactgctgcttatcaactcaactatcagtttcatagaggaaaataatgctgggaatgctgctgctgcgcttatggcccgccttgcgccgaaagccaaggtgcttcgtgatggccgttgggccgaggaagaggcagccgtccttgtgcctggggatgtaatcagcattaaacttggagatatcatccctgcagatgctcggctccttgatggagatcccttgaagatcgatcagtcttcgctaactggagaatcgttgccagtcaccaaaggtcctggtgatggtgcctactctggttcgactgtcaagcagggtgaaattgaggctgttgtgatagcaactggtgtccacactttctttgggaaggctgcgcatcttgttgactccacgaatcaagtattgacagccattgggaacttttgtatttgttcaattgctgtggggatgtttgttgagataattgtcatgtaccctatccagcatagggcgtatcgtcctgggattgacaatcttttggtgctacttattggaggcattcccatagcaatgcctacagttttgtctgtgaccatggcaattgggtcccatcgcttggctcaacagggagctataacaaaaagaatgactgcaattgaagagatggctggtatggatgtactttgtagtgacaaaactggaactctgactctgaataaactcacagtggacaagaacctcattgaggtttttgaaagggaagtgactcaagaccaagtaattctgatggctgctagagcctcccgaatagaaaatcaagatgctattgatactgctatagttggcatgctagctgatccaaaagaggcccgtgctggtattcaagaggttcatttccttccatttaatcctaccgacaaaagaactgccttgacatacattgatagtgatgggaagatgtaccgtgttagtaaaggtgcgccagagcagattctcaacctcgtctacaataagttggagatagaacgaagagttcatgctgtaattgacaagtttgctgagcgtggacttagatcacttgctgtagcgtatcaggtagtgccagatggaaggaaagagagtcccggtgggccatggcattttgttgctcttatgccactctttgatcctccaaggcatgacagtgcagaaacaatacgaagggcattgaaccttggtgttagtgtaaaaatgatcacaggtgatcagctagcaattgggaaggaaacaggacgtcgcttaggcatgggtactaacatgtacccttcctctgctttgctgggacagaataaggatgagtctattgctgttttacctgttgacgatttaattgagaaagcggatggttttgctggcgtattccctgagcacaaatatgagattgtaaaacgtctgcaagcacgaaaacacatttgtggaatgactggcgatggagtaaatgatgcccctgccctaaagaaagctgatattggtatagcagttgctgatgccactgatgcagccaggagtgcttctgacattgtcctgacagaacctggcttgagtgtgataattagtgccgttcttaccagccgggcgattttccagaggatgaagaactacactatctatgctgtttccattacaatacgtattgtgctaggatttatgctacttgccctcatatgggagttcgatttcccaccatttatggtacttattattgcaattctaaatgacggtaccataatgaccatatcgaaggatcgagtgaagccttcgcctctaccggacagctggaagctggccgagattttcacaactggaattgtgcttggtggatacctggcagtgatgactgtcatcttcttctgggctgcatataagacaaactttttccctaggatcttccacgttgaaagccttgagaagacagctcaagatgattaccagaaactcgcctctgccgtatatctccaagttagcaccatcagccaagctctcatcttcgtgacgaggtctcgcagctggtcattcgctgagcgcccgggctttctactagtgtttgccttcctggtcgcgcagctgatagctacactggtagctgtatacgcggactgggggttcacttcgatcgaaggcattggatggggctgggctggtgtggtgtggctctacaacctcgtcttctacttcccgctcgacctcctcaagttcctcatccgatacgctctgagtggcaaagcgtgggatcttgtcattgagcaaaggattgcgtttacaaggaagaaggacttcgggaaggaggagagggcgctcaagtgggcacacgcgcagaggacgctccacgggctgcagccaccggatgccaagctgttccctgacagggtgaacgagctgaatcagatggccgaagaggccaaacggagggccgagattgcaaggctgagggagcttcacacgctgaaggggcatgtggagtcggttgtgaagctcaagggcctagacatcgacaccatccagcagtcgtacacagtctgatgaccctggattaagtacatacatgtatatctagttctggcaggtggcagtcgcctgcttgtttgtatttgccatataccataacacatcatgagaactggtagttggtgccgtcggttgtcttcgcgtgctccttgcgatgttattgtgttacgccggtttcaagcaacataggtcacggatcataaatcagatatccgacggatatcaaatccgtgtgtcatctccccgcgtcctggttgccccgcgtcgggcgactcggacgctccccataatccctagtagccgccgccgccccttcgtgggcctctccctgccgcgccgctgcctgagctggccgccggaaggttcggctgcttgcggggagggcggcggcggggcatctccgtctccctctggtggatctgggcgggcacagccgccaaggtcaccgtgagttgctcgtcggcgtggtcggccccggcttcgccccctcgcgactcgggtggctgccaactcccctccctccccatctctttgccttgccgccgccggagctagctggtgggttgctcgcacggctaggggtgaaggcgtcgggcgggtgcttgctgccttgtcgtgcgtccaacccacggtggcggcgtccgcccactcaggcaacgggcctgtggctgggtgcgcgcccgcgaggctagcccggtggcggcgcctgcgtgccgcgacggcaatcgctgctgctcgggggttggaggtgtgcctggactgtgtgctcgcgtacctgatgcgcggagggctggatctggcgcccccagggggagcggcgttggcgcgcggaaggctggatctggcgcgcgaggttggcggcctccgcatgccatccgtcggaggcggcggcaggctggtcccgggctagcgcatgagccggggtggaggtcggcgttggtgcgccggcaggcctgcgcagtcggccggaattgcagtggcgggacctcctctcgtctggggcagcatcggctagtcgatcgggctagcgcagggtggtggtggcggcaggcccaaaatcttcatcatttgtgtggtacgtcggggtaccggcgacggcggaggcagcttgctgtgtctcgaggtttcggccagacgttgtgctgggggctcttgggcgaaagtctcggcgacggtgacgcccatgggcgtcgcttcccctgttaagggcgtcacaccccagtgctatcttccttgggtgaaagctcggtccatcacggacaggtgacggtggcgtcacagtgacgtcactcccttcctgaaggcgtcgcttctgaagttcgtctcggccaggactttgccttcggctgttgcttcgcttctcggtgcctggtatgcgagtggaggtgggggttttgcaacgtgaagtcggagctgctacatcagtggatgtggctcggcaacgataacacgaggcgaacctcccttcttcgtggtccagaatgtttcgaaggtcgggcaaaaaccggaggcagggcagagggtcaagattggaagtcgaagctgctttgtgcctgagcccggcaacgatgacttgttgagacctttcgcttcgggttgtctatctgctttttgtttggttcgcctgttggctgctttggaaagtcggagttgttggatgctctgcatctttgcttgataacgatgacctttagcagttttgtgctctcgtgtggggttgccgctgcctgtgttgtttgggcactctatgtcgacggtgagtgtggtgtcgtgttgatgtcctaatccaaccgacgagttgagttgtatggtgttggcgtgttgatgtctcaatccaaccgcatgttgtttgttgtttagtccggtccggaccacttcttaattaatataatcggcagctctcatgtctggttcgtttcaaaaaaaaaaagtgtgtcaaattgtcatccctagctagacagagtagccatgggctgctatttggagctggtctggcccttttgcagatgactccctggatgactctcgtggtggctgagtg

SEQ ID NO: 4936 - DNA, 4601 bp, Zea Mays
gcaaatttctcaagtttctgggattcatgtggaacccactgtcatgggtcatggaggctgcagctatcatggccatcgcactggccaatggtgggggaaagccaccagactggcaggatttcgttggtatcatcacactgctgcttatcaactcaactatcagtttcatagaggaaaataatgctgggaatgctgctgctgcgcttatggcccgccttgcgccgaaagccaaggtgcttcgtgatggccgttgggccgaggaagaggcagccgtccttgtgcctggggatgtaatcagcattaaacttggagatatcatccctgcagatgctcggctccttgatggagatcccttgaagatcgatcagtcttcgctaactggagaatcgttgccagtcaccaaaggtcctggtgatggtgcctactctggttcgactgtcaagcagggtgaaattgaggctgttgtgatagcaactggtgtccacactttctttgggaaggctgcgcatcttgttgactccacgaatcaagttggccatttccagaagcatagggcgtatcgtcctgggattgacaatcttttggtgctacttattggaggcattcccatagcaatgcctacagttttgtctgtgaccatggcaattgggtcccatcgcttggctcaacagggagctataacaaaaagaatgactgcaattgaagagatggctggtatggatgtactttgtagtgacaaaactggaactctgactctgaataaactcacagtggacaagaacctcattgaggtttttgaaagggaagtgactcaagaccaagtaattctgatggctgctagagcctcccgaatagaaaatcaagatgctattgatactgctatagttggcatgctagctgatccaaaagaggcccgtgctggtattcaagaggttcatttccttccatttaatcctaccgacaaaagaactgccttgacatacattgatagtgatgggaagatgtaccgtgttagtaaaggtgcgccagagcagattctcaacctcgtctacaataagttggagatagaacgaagagttcatgctgtaattgacaagtttgctgagcgtggacttagatcacttgctgtagcgtatcaggtagtgccagatggaaggaaagagagtcccggtgggccatggcattttgttgctcttatgccactctttgatcctccaaggcatgacagtgcagaaacaatacgaagggcattgaaccttggtgttagtgtaaaaatgatcacaggtgatcagctagcaattgggaaggaaacaggacgtcgcttaggcatgggtactaacatgtacccttcctctgctttgctgggacagaataaggatgagtctattgctgttttacctgttgacgatttaattgagaaagcggatggttttgctggcgtattccctgagcacaaatatgagattgtaaaacgtctgcaagcacgaaaacacatttgtggaatgactggcgatggagtaaatgatgcccctgccctaaagaaagctgatattggtatagcagttgctgatgccactgatgcagccaggagtgcttctgacattgtcctgacagaacctggcttgagtgtgataattagtgccgttcttaccagccgggcgattttccagaggatgaagaactacactatctatgctgtttccattacaatacgtattgtgctaggatttatgctacttgccctcatatgggagttcgatttcccaccatttatggtaccataatgaccatatcgaaggatcgagtgaagccttcgcctctaccggacagctggaagctggccgagattttcacaactggaattgtgcttggtggatacctggcagtgatgactgtcatcttcttctgggctgcatataagacaaactttttccctaggatcttccacgttgaaagccttgagaagacagctcaagatgattaccagaaactcgcctctgccgtatatctccaagttagcaccatcagccaagctctcatcttcgtgacgaggtctcgcagctggtcattcgctgagcgcccgggctttctactagtgtttgccttcctggtcgcgcagctgatagctacactggtagctgtatacgcggactgggggttcacttcgatcgaaggcattggatggggctgggctggtgtggtgtggctctacaacctcgtcttctacttcccgctcgacctcctcaagttcctcatccgatacgctctgagtggcaaagcgtgggatcttgtcattgagcaaaggattgcgtttacaaggaagaaggacttcgggaaggaggagagggcgctcaagtgggcacacgcgcagaggacgctccacgggctgcagccaccggatgccaagctgttccctgacagggtgaacgagctgaatcagatggccgaagaggccaaacggagggccgagattgcaaggctgagggagcttcacacgctgaaggggcatgtggagtcggttgtgaagctcaagggcctagacatcgacaccatccagcagtcgtacacagtctgatgaccctggattaagtacatacatgtatatctagttctggcaggtggcagtcgcctgcttgtttgtatttgccatataccataacacatcatgagaactggtagttggtgccgtcggttgtcttcgcgtgctccttgcgatgttattgtgttacgccggtttcaagcaacataggtcacggatcataaatcagatatccgacggatatcaaatccgtgtgtcatctccccgcgtcctggttgccccgcgtcgggcgactcggacgctccccataatccctagtagccgccgccgccccttcgtgggcctctccctgccgcgccgctgcctgagctggccgccggaaggttcggctgcttgcggggagggcggcggcggggcatctccgtctccctctggtggatctgggcgggcacagccgccaaggtcaccgtgagttgctcgtcggcgtggtcggccccggcttcgccccctcgcgactcgggtggctgccaactcccctccctccccatctctttgccttgccgccgccggagctagctggtgggttgctcgcacggctaggggtgaaggcgtcgggcgggtgcttgctgccttgtcgtgcgtccaacccacggtggcggcgtccgcccactcaggcaacgggcctgtggctgggtgcgcgcccgcgaggctagcccggtggcggcgcctgcgtgccgcgacggcaatcgctgctgctcgggggttggaggtgtgcctggactgtgtgctcgcgtacctgatgcgcggagggctggatctggcgcccccagggggagcggcgttggcgcgcggaaggctggatctggcgcgcgaggttggcggcctccgcatgccatccgtcggaggcggcggcaggctggtcccgggctagcgcatgagccggggtggaggtcggcgttggtgcgccggcaggcctgcgcagtcggccggaattgcagtggcgggacctcctctcgtctggggcagcatcggctagtcgatcgggctagcgcagggtggtggtggcggcaggcccaaaatcttcatcatttgtgtggtacgtcggggtaccggcgacggcggaggcagcttgctgtgtctcgaggtttcggccagacgttgtgctgggggctcttgggcgaaagtctcggcgacggtgacgcccatgggcgtcgcttcccctgttaagggcgtcacaccccagtgctatcttccttgggtgaaagctcggtccatcacggacaggtgacggtggcgtcacagtgacgtcactcccttcctgaaggcgtcgcttctgaagttcgtctcggccaggactttgccttcggctgttgcttcgcttctcggtgcctggtatgcgagtggaggtgggggttttgcaacgtgaagtcggagctgctacatcagtggatgtggctcggcaacgataacacgaggcgaacctcccttcttcgtggtccagaatgtttcgaaggtcgggcaaaaaccggaggcagggcagagggtcaagattggaagtcgaagctgctttgtgcctgagcccggcaacgatgacttgttgagacctttcgcttcgggttgtctatctgctttttgtttggttcgcctgttggctgctttggaaagtcggagttgttggatgctctgcatctttgcttgataacgatgacctttagcagttttgtgctctcgtgtggggttgccgctgcctgtgttgtttgggcactctatgtcgacggtgagtgtggtgtcgtgttgatgtcctaatccaaccgacgagttgagttgtatggtgttggcgtgttgatgtctcaatccaaccgcatgttgtttgttgtttagtccggtccggaccacttcttaattaatataatcggcagctctcatgtctggttcgtttcaaaaaaaaaaagtgtgtcaaattgtcatccctagctagacagagtagccatgggctgctatttggagctggtctggcccttttgcagatgactccctggatgactctcgtggtggctgagtg

SEQ ID NO: 4937 - DNA, 870 bp, Zea Mays
ctcggtttggccgttccgttccattccattccgctctcctcccctcccctcccctcccattcttctacacggccgatcgcgaccctcgccccgcccccacacggccacgcaccgaaactgccccgcccccgcagcacactcgtcctccccgcgccacctcggggacgtcccggtccgcgacatccctgaccaccgcgatggccgccgccgccctccgctcctccgcacgccggctcctgcgtctcaccccggcaccctcgtcggctctgttcgccgcttcccggcccaccgccagggttgcaccgctctcacgccccatcgccgctctgtcaggtggcaacaatcctatctcatggaaactgagacgcttcttcagttcaaatgaaaagcacttgcctgcaatatctgatccagagatcgaagctgcatttaaggatttgttggctgctagttggaatgaacttccagattctctcgtagcggaagcaaagaaagcagtatctaaagcgaccgatgataatgctggtcaagaggctttgaaaaatgtatttggtgcagctgaggcatgtgaagaattcagtggaaccttggttaccctaagaatggctcttgatgatctgtgtggcctgactggcgaaaatgtgggtcccttacctggttatattgaagatgctgttaaagctgcatataatcgctacatgacatatctggagtcctttggccctgaggaaaattatctaagaaagaaggtggagactgagttgggcacaaaaatgatacacctcaaaatgagatgcagtggcataggttccgagtggggaaagcaaaacaagtatgcatttgggctgattcctggccaatattgtctgg

SEQ ID NO: 4938 - DNA, 864 bp, Zea Mays
cggtttggccgttccgttccattccattccgctctcctcccctcccctcccctcccattcttctacacggccgatcgcgaccctcgccccgcccccacacggccacgcaccgaaactgccccgcccccgcagcacactcgtcctccccgcgccacctcggggacgtcccggtccgcgacatccctgaccaccgcgatggccgccgccgccctccgctcctccgcacgccggctcctgcgtctcaccccggcaccctcgtcggctctgttcgccgcttcccggcccaccgccagggttgcaccgctctcacgccccatcgccgctctgtcaggtggcaacaatcctatctcatggaaactgagacgcttcttcagttcaaatgaaaagcacttgcctgcaatatctgatccagagatcgaagctgcatttaaggatttgttggctgctagttggaatgaacttccagattctctcgtagcggaagcaaagaaagcagtatctaaagcgaccgatgataatgctggtcaagaggctttgaaaaatgtatttggtgcagctgaggcatgtgaagaattcagtggaaccttggttaccctaagaatggctcttgatgatctgtgtggcctgactggcgaaaatgtgggtcccttacctggttatattgaagatgctgttaaagctgcatataatcgctacatgacatatctggagtcctttggccctgaggaaaattatctaagaaagaaggtggagactgagttgggcacaaaaatgatacacctcaaaatgagatgcagtggcataggttccgagtggggaaagggtaattttgttattttcaagttggtaaatatttttttggtc

SEQ ID NO: 4939 - DNA, 1045 bp, Zea Mays
tcagacagacgtgaaatgtgtggtcccagagtgtttctttctaggtggcaacaatcctatctcatggaaactgagacgcttcttcagttcaaatgaaaagcacttgcctgcaatatctgatccagagatcgaagctgcatttaaggatttgttggctgctagttggaatgaacttccagattctctcgtagcggaagcaaagaaagcagtatctaaagcgaccgatgataatgctggtcaagaggctttgaaaaatgtatttggtgcagctgaggcatgtgaagaattcagtggaaccttggttaccctaagaatggctcttgatgatctgtgtggcctgactggcgaagtcagtagttgctatctctgttttctcatgtattttttggggtgcttatatcagtttgatcaaggcaaaacttttgcagaatgtgggtcccttacctggttatattgaagatgctgttaaagctgcatataatcgctacatgacatatctggagtcctttggccctgaggaaaattatctaagaaagaaggtggagactgagttgggcacaaaaatgatacacctcaaaatgagatgcagtggcataggttccgagtggggaaagatctccctgattggcacctcggggatctcaggctcctatgttgagctaagggcatgatgtgaagcctgcagatcagaaccatggaaattatcgatgagctgaggaagtctgtagatcagaatatgccgttctacattttcctttcccctttgtagctaccatggcaataacaatgagaccatcaaacagctgtgcattttaagtatggaaatactcccgtctgtgtctgtaataaggacgtttcatgtggctgaaacctgtcaattctgttaatttttgcatgacttcttgttcaactggtgtgaattgtatactttgttcacgaggcactgatcatatatgccttcgctcgcagtcgcagctcaacttccttcagcattgcaaaaactacggtgaactgccattttttaatgcaagggtttaacaatctc

SEQ ID NO: 4940 - DNA, 2177 bp, Zea Mays
cacaaaggcggtgcagcgccagtgccgagtgtactggccgccaccactcgccactcgccactcggccccaggaccctcctcttcctcgccagcaagccggcacgatccctcccttccgggaaaaaggctcccaatctgttccgagccagccggccatggcgattagggctggccgctcgccccttctccacctcctcgccctcgccttcctcatcctcgccgcctctccctgcctccaagctcgagtggaccatcgcaaacagatatctcactggactgggcaacccaactttgacctgcagaatgtctcatcgggtcgaaaggatggccctcatctcctgggtagatcaaaggaaataacacacatgaaattaaggagagttgctgtaaggaagaaaatggaagtagtgcagcaggatgatgaagcgttagttaaacttgagaatgcaggtatcgaacgttcaaaagctgttgactctgctgtgctgggaaaatacagcatctggagacgtgaaaatgaaaatgaaaaggcagattcaagggtccgtttgatgcgagatcaaatgatcatggccagaatatattctgttcttgccaaatcgagggacaagcttgatctctatcaggagctgcttgcaaggctcaaggaaagccagcgctcccttggggaagctactgctgatgctgaacttcccaagagtgcttcggatagaaccaaagcaatgggccaagttttatcaaaagcaagggatctattgtacgattgcaaggaaattacccagcgtttgagagcaatgcttcagtcagcagatgagcagagaaaagaaagttccccaatagtgagaacctggaaaatcctgatctttaccattatgctcttttctcggacaatgttttggcagcatcagttgtggtcaactcaaccatcatgaatgctaaggagcctgaaaaacatgtatttcatcttgttactgacaaactgaactttggggccatgaacatgtggtttttgctgaatccacctggggatgcaacaatccatgtggaaaatgttgatgacttcaaatggttaaactcttcttactgccctgttctgaagcagcttgagtctgcagccatgaaagaatattatttcaaggctgatcgtccgaaaacactctctgctggttcttctaatctgaagtatcgaaacccaaaatatttgtccatgctcaatcatctaagattttacctcccacaagtctatcccaagctgaataaaattcttttcctggatgatgatatagttgtccagagggacctaactggactctgggaggttgatcttaatggaaatgtaaatggagccgtggaaacatgtggagagagttttcaccgatttgataagtacctaaatttctcaaacccaaatattgctcagaattttgatcctaatgcatgtggttgggcttatggaatgaacatgtttgatctggaagaatggaagaagaaagacattactggaatttaccacaaatggcagaacatgaacgagaacaggctgctctggaaactggggacattgccaccagggcttctaactttttacaagctgacacaccctctggacaaatcatggcatgtgcttggcttagggtacaatccaaccattgagcgctcagagatagacaatgctgctgtcatccactacaatggtaacatgaagccctggctggaaattgcaatgataaagtatcggccttactggacaaagtacatcaattatcagcattcctacattcatggatgcaagatcagccaatagaaaccaccctcagatattcttctgtgatgaacattgaagttggatgggactcaaaatgaaatcagtataactatcacatgttctttattcgtgttatattagatttgttagttatcacgtgtatgtagtttcgtcgcccttttgtggtgctttctcccctagctcattgttggttcttgtccctttttgtcatgaaaagaatgatgagctctatgattctcatcagctgataaatgtaatgtctgaatttctgtcggtggcaaattaatgatcccattcaaacggtatcaagtgttcgaacattcatgctagcatttgatggcaggttgagagttatttacgagcatctgttcgttcgtggttgagattgttt

SEQ ID NO: 4941 - DNA, 2218 bp, Zea Mays
cgccagtgccgagtgtactggccgccaccactcgccactcgccactcggccccaggaccctcctcttcctcgccagcaagccggcacgatccctcccttccgggaaaaaggctcccaatctgttccgagccagccggccatggcgattagggctggccgctcgccccttctccacctcctcgccctcgccttcctcatcctcgccgcctctccctgcctccaagctcgagtggaccatcgcaaacagatggccctcatctcctgggtagatcaaaggaaataacacacatgaaattaaggagagttgctgtaaggaagaaaatggaagtagtgcagcaggatgatgaagcgttagttaaacttgagaatgcaggtatcgaacgttcaaaagctgttgactctgctgtgctgggaaaatacagcatctggagacgtgaaaatgaaaatgaaaaggcagattcaagggtccgtttgatgcgagatcaaatgatcatggccagaatatattctgttcttgccaaatcgagggacaagcttgatctctatcaggagctgcttgcaaggctcaaggaaagccagcgctcccttggggaagctactgctgatgctgaacttcccaagagtgcttcggatagaaccaaagcaatgggccaagttttatcaaaagcaagggatctattgtacgattgcaaggaaattacccagcgtttgagagcaatgcttcagtcagcagatgagcaggtccggagcttgaagaagcagagcaccttccttagccagctagcagctaagacaatcccaaatggcatccattgtctttccatgcgcttaacgattgattattatcttctctctccagagaaaagaaagttccccaatagtgagaacctggaaaatcctgatctttaccattatgctcttttctcggacaatgttttggcagcatcagttgtggtcaactcaaccatcatgaatgctaaggagcctgaaaaacatgtatttcatcttgttactgacaaactgaactttggggccatgaacatgtggtttttgctgaatccacctggggatgcaacaatccatgtggaaaatgttgatgacttcaaatggttaaactcttcttactgccctgttctgaagcagcttgagtctgcagccatgaaagaatattatttcaaggctgatcgtccgaaaacactctctgctggttcttctaatctgaagtatcgaaacccaaaatatttgtccatgctcaatcatctaagattttacctcccacaagtctatcccaagctgaataaaattcttttcctggatgatgatatagttgtccagagggacctaactggactctgggaggttgatcttaatggaaatgtaaatggagccgtggaaacatgtggagagagttttcaccgatttgataagtacctaaatttctcaaacccaaatattgctcagaattttgatcctaatgcatgtggttgggcttatggaatgaacatgtttgatctggaagaatggaagaagaaagacattactggaatttaccacaaatggcagaacatgaacgagaacaggctgctctggaaactggggacattgccaccagggcttctaactttttacaagctgacacaccctctggacaaatcatggcatgtgcttggcttagggtacaatccaaccattgagcgctcagagatagacaatgctgctgtcatccactacaatggtaacatgaagccctggctggaaattgcaatgataaagtatcggccttactggacaaagtacatcaattatcagcattcctacattcatggatgcaagatcagccaatagaaaccaccctcagatattcttctgtgatgaacattgaagttggatgggactcaaaatgaaatcagtataactatcacatgttctttattcgtgttatattagatttgttagttatcacgtgtatgtagtttcgtcgcccttttgtggtgctttctcccctagctcattgttggttcttgtccctttttgtcatgaaaagaatgatgagctctatgattctcatcagctgataaatgtaatgtctgaatttctgtcggtggcaaattaatgatcccattcaaacggtatcaagtgttcgaacattcatgctagcatttgatggcaggttgagagttatttacgagcatctgttcgttcgtggttgagattgttt

SEQ ID NO: 4942 - DNA, 2165 bp, Zea Mays
cgagtgtactggccgccaccactcgccactcgccactcggccccaggaccctcctcttcctcgccagcaagccggcacgatccctcccttccgggaaaaaggctcccaatctgttccgagccagccggccatggcgattagggctggccgctcgccccttctccacctcctcgccctcgccttcctcatcctcgccgcctctccctgcctccaagctcgagtggaccatcgcaaacagaaattaaggagagttgctgtaaggaagaaaatggaagtagtgcagcaggatgatgaagcgttagttaaacttgagaatgcaggtatcgaacgttcaaaagctgttgactctgctgtgctgggaaaatacagcatctggagacgtgaaaatgaaaatgaaaaggcagattcaagggtccgtttgatgcgagatcaaatgatcatggccagaatatattctgttcttgccaaatcgagggacaagcttgatctctatcaggagctgcttgcaaggctcaaggaaagccagcgctcccttggggaagctactgctgatgctgaacttcccaagagtgcttcggatagaaccaaagcaatgggccaagttttatcaaaagcaagggatctattgtacgattgcaaggaaattacccagcgtttgagagcaatgcttcagtcagcagatgagcaggtccggagcttgaagaagcagagcaccttccttagccagctagcagctaagacaatcccaaatggcatccattgtctttccatgcgcttaacgattgattattatcttctctctccagagaaaagaaagttccccaatagtgagaacctggaaaatcctgatctttaccattatgctcttttctcggacaatgttttggcagcatcagttgtggtcaactcaaccatcatgaatgctaaggagcctgaaaaacatgtatttcatcttgttactgacaaactgaactttggggccatgaacatgtggtttttgctgaatccacctggggatgcaacaatccatgtggaaaatgttgatgacttcaaatggttaaactcttcttactgccctgttctgaagcagcttgagtctgcagccatgaaagaatattatttcaaggctgatcgtccgaaaacactctctgctggttcttctaatctgaagtatcgaaacccaaaatatttgtccatgctcaatcatctaagattttacctcccacaagtctatcccaagctgaataaaattcttttcctggatgatgatatagttgtccagagggacctaactggactctgggaggttgatcttaatggaaatgtaaatggagccgtggaaacatgtggagagagttttcaccgatttgataagtacctaaatttctcaaacccaaatattgctcagaattttgatcctaatgcatgtggttgggcttatggaatgaacatgtttgatctggaagaatggaagaagaaagacattactggaatttaccacaaatggcagaacatgaacgagaacaggctgctctggaaactggggacattgccaccagggcttctaactttttacaagctgacacaccctctggacaaatcatggcatgtgcttggcttagggtacaatccaaccattgagcgctcagagatagacaatgctgctgtcatccactacaatggtaacatgaagccctggctggaaattgcaatgataaagtatcggccttactggacaaagtacatcaattatcagcattcctacattcatggatgcaagatcagccaatagaaaccaccctcagatattcttctgtgatgaacattgaagttggatgggactcaaaatgaaatcagtataactatcacatgttctttattcgtgttatattagatttgttagttatcacgtgtatgtagtttcgtcgcccttttgtggtgctttctcccctagctcattgttggttcttgtccctttttgtcatgaaaagaatgatgagctctatgattctcatcagctgataaatgtaatgtctgaatttctgtcggtggcaaattaatgatcccattcaaacggtatcaagtgttcgaacattcatgctagcatttgatggcaggttgagagttatttacgagcatctgttcgttcgtggttgagattgttt

SEQ ID NO: 4943 - DNA, 2162 bp, Zea Mays
gtactggccgccaccactcgccactcgccactcggccccaggaccctcctcttcctcgccagcaagccggcacgatccctcccttccgggaaaaaggctcccaatctgttccgagccagccggccatggcgattagggctggccgctcgccccttctccacctcctcgccctcgccttcctcatcctcgccgcctctccctgcctccaagttttctgtgatgcaatgtgggtaggccagatagccttctcaattcagagttcagacgatagtcatcctagtataagctcgagtggaccatcgcaaacagatggccctcatctcctgggtagatcaaaggaaataacacacatgaaattaaggagagttgctgtaaggaagaaaatggaagtagtgcagcaggatgatgaagcgttagttaaacttgagaatgcaggtatcgaacgttcaaaagctgttgactctgctgtgctgggaaaatacagcatctggagacgtgaaaatgaaaatgaaaaggcagattcaagggtccgtttgatgcgagatcaaatgatcatggccagaatatattctgttcttgccaaatcgagggacaagcttgatctctatcaggagctgcttgcaaggctcaaggaaagccagcgctcccttggggaagctactgctgatgctgaacttcccaagagtgcttcggatagaaccaaagcaatgggccaagttttatcaaaagcaagggatctattgtacgattgcaaggaaattacccagcgtttgagagcaatgcttcagtcagcagatgagcagagaaaagaaagttccccaatagtgagaacctggaaaatcctgatctttaccattatgctcttttctcggacaatgttttggcagcatcagttgtggtcaactcaaccatcatgaatgctaaggagcctgaaaaacatgtatttcatcttgttactgacaaactgaactttggggccatgaacatgtggtttttgctgaatccacctggggatgcaacaatccatgtggaaaatgttgatgacttcaaatggttaaactcttcttactgccctgttctgaagcagcttgagtctgcagccatgaaagaatattatttcaaggctgatcgtccgaaaacactctctgctggttcttctaatctgaagtatcgaaacccaaaatatttgtccatgctcaatcatctaagattttacctcccacaagtctatcccaagctgaataaaattcttttcctggatgatgatatagttgtccagagggacctaactggactctgggaggttgatcttaatggaaatgtaaatggagccgtggaaacatgtggagagagttttcaccgatttgataagtacctaaatttctcaaacccaaatattgctcagaattttgatcctaatgcatgtggttgggcttatggaatgaacatgtttgatctggaagaatggaagaagaaagacattactggaatttaccacaaatggcagaacatgaacgagaacaggctgctctggaaactggggacattgccaccagggcttctaactttttacaagctgacacaccctctggacaaatcatggcatgtgcttggcttagggtacaatccaaccattgagcgctcagagatagacaatgctgctgtcatccactacaatggtaacatgaagccctggctggaaattgcaatgataaagtatcggccttactggacaaagtacatcaattatcagcattcctacattcatggatgcaagatcagccaatagaaaccaccctcagatattcttctgtgatgaacattgaagttggatgggactcaaaatgaaatcagtataactatcacatgttctttattcgtgttatattagatttgttagttatcacgtgtatgtagtttcgtcgcccttttgtggtgctttctcccctagctcattgttggttcttgtccctttttgtcatgaaaagaatgatgagctctatgattctcatcagctgataaatgtaatgtctgaatttctgtcggtggcaaattaatgatcccattcaaacggtatcaagtgttcgaacattcatgctagcatttgatggcaggttgagagttatttacgagcatctgttcgttcgtggttgagattgttt

SEQ ID NO: 4944 - DNA, 1393 bp, Zea Mays
acgaacaggtctagcccatagcaacaccctcgccccctcccttctcagcctcaggcggtcaggcccactggccgtacccgcgacgtcttcctcctcggctccgccgccttccgccgatcgcctccgccgaatcgaatagaagaatcgagcgccgctgctggcgaggggctcggcgcacagcgcgggatggcgagcggcagcagcaacggggagccaagcacggcgccgcaggcgaaccggtggtacgacctccggctgggctcctcctgccgtgacccatcccccaccgccaagttctgcactctccgctagtaccaaagataaccgggttactgtggaattctataataatcagcctggcaaaccaaaggtgacatttgagggaagccaagaagagtacaaggataatgatggtgtcttattttttgatggtgagacctttcgcctagagaggttgcatagggctgtcaagaggttaaggcatgtccgagttccaggagagtctgcagcagttaatttggcagctacaactactggaatgggtgcagaatcacagtctcctccattacctaaagtcaacaagtcacagagcatgaacaaacctgctgttcactcagttccagttgaggttgagcgtattgacattggtgaaccagaaaatccaggcccaaaatacaacaacaggagtacatatcaatctgttaccgtagacccatttgccctttcacctgatccaaatgagcaagagaaccttgacatacttggtgacgatgatggcaatgcttcaccaaacaacttggctgcaggacaagaggcatctgttcgtggttttgacatcaacttaccaaatcaggacgatatggatgatgaaattgctgatgtagatgtaaatgatgacacggatctgtggatcaatgcagccgatgcgctgcgagctcaagtgaacgcagaggagcatcaggagcagcaggacagctcaagctctagtgggagcagcagcagcagcagcggaagtgagagcggcagtggaagtgggagcagcagcagtggtagcgatggtagtgatgctgattcggcaagttccggaggtgatgttgatatatgagcttgatacgcaagcttttgttttgacacatgccttgcttcacaagttttcattcacaaggtaggtgtaggatatgtatatgttcagctaatattgctccagtgagtgcattaaattttcactaacaatggtggcctgggtccgtttttatgtttgctagacctggattggaagaatagaatctgtaaacatatctgtacaactatttgcttatgggaccatggatgttacaattgttcggttgaaatgacaaaaggtatactgctatgcttgcctattactcttaat

SEQ ID NO: 4945 - DNA, 1343 bp, Zea Mays
acgaacaggtctagcccatagcaacaccctcgccccctcccttctcagcctcaggcggtcaggcccactggccgtacccgcgacgtcttcctcctcggctccgccgccttccgccgatcgcctccgccgaatcgaatagaagaatcgagcgccgctgctggcgaggggctcggcgcacagcgcgggatggcgagcggcagcagcaacggggagccaagcacggcgccgcaggcgaaccggtggtacgacctccggctgggctcctcctgccgtgacccatcccccaccgccaagttctgcactctccgctatgaatttaagccagcatcaattgacaagactcaagctgggtctctgcagagtaccaaagataaccgggttactgtggaattctataataatcagcctggcaaaccaaaggtgacatttgagggaagccaagaagagtacaaggataatgatggtgtcttattttttgatggtgagacctttcgcctagagaggttgcatagggctgtcaagaggttaaggcatgtccgagttccaggagagtctgcagcagttaatttggcagctacaactactggaatgggtgcagaatcacagtctcctccattacctaaagtcaacaagtcacagagcatgaacaaacctgctgttcactcagttccagttgaggttgagcgtattgacattggtgaaccagaaaatccaggcccaaaatacaacaacaggagtacatatcaatctgttaccgtagacccatttgccctttcacctgatccaaatgagcaagagaaccttgacatacttggtgacgatgatggcaatgcttcaccaaacaacttggctgcaggacaagaggcatctgttcgtggttttgacatcaacttaccaaatcaggacgatatggatgatgaaattgctgatgtagatgtaaatgatgacacggatctgtggatcaatgcagccgatgcgctgcgagctcaagtgaacgcagaggagcatcaggagcagcaggacagctcaagctctagtgggagcagcagcagcagcagcggaagtgagagcggcagtggaagtgggagcagcagcagtggtagcgatggtagtgatgctgattcggcaagttccggaggtgatgttgatatatgagcttgatacgcaagcttttgttttgacacatgccttgcttcacaagttttcattcacaagacctggattggaagaatagaatctgtaaacatatctgtacaactatttgcttatgggaccatggatgttacaattgttcggttgaaatgacaaaaggtatactgctatgcttgcctattactcttaat

SEQ ID NO: 4946 - DNA, 1235 bp, Zea Mays
cttttcttctactcccttcttttttttcagtacccagcctgcggagctgtagtctgggatccgcatcagcgaattgacgaacgctagttagcaccacaggagatgaatttaagccagcatcaattgacaagactcaagctgggtctctgcagagtaccaaagataaccgggttactgtggaattctataataatcagcctggcaaaccaaaggtgacatttgagggaagccaagaagagtacaaggataatgatggtgtcttattttttgatggtgagacctttcgcctagagaggttgcatagggctgtcaagaggttaaggcatgtccgagttccaggagagtctgcagcagttaatttggcagctacaactactggaatgggtgcagaatcacagtctcctccattacctaaagtcaacaagtcacagagcatgaacaaacctgctgttcactcagttccagttgaggttgagcgtattgacattggtgaaccagaaaatccaggcccaaaatacaacaacaggagtacatatcaatctgttaccgtagacccatttgccctttcacctgatccaaatgagcaagagaaccttgacatacttggtgacgatgatggcaatgcttcaccaaacaacttggctgcaggacaagaggcatctgttcgtggttttgacatcaacttaccaaatcaggacgatatggatgatgaaattgctgatgtagatgtaaatgatgacacggatctgtggatcaatgcagccgatgcgctgcgagctcaagtgaacgcagaggagcatcaggagcagcaggacagctcaagctctagtgggagcagcagcagcagcagcggaagtgagagcggcagtggaagtgggagcagcagcagtggtagcgatggtagtgatgctgattcggcaagttccggaggtgatgttgatatatgagcttgatacgcaagcttttgttttgacacatgccttgcttcacaagttttcattcacaaggtaggtgtaggatatgtatatgttcagctaatattgctccagtgagtgcattaaattttcactaacaatggtggcctgggtccgtttttatgtttgctagacctggattggaagaatagaatctgtaaacatatctgtacaactatttgcttatgggaccatggatgttacaattgttcggttgaaatgacaaaaggtatactgctatgcttgcctattactcttaat

SEQ ID NO: 4947 - DNA, 691 bp, Zea Mays
actcaccggctgagtcagcttcaatctcacctgtgacctgtacactcccagatcagacggttcacgtacgacgcgacaagatccaagaactcgctcgcgcgcacggacagggccggaacccagggatcgagactgaacagcagtccgagacgccatgaacgtggaggaggaggtcgggaggctcaaggaggagatccataggctcggccagcagcagcccgatggctcttacaaggtcaagtttggcgtcctcttcaacgacgaccggtgtgcaaatatctttgaagcactagttggcaccttgagggccgccaagaagaggaagatcttgacctacgaaggcgagctgcttctgcaaggtgtccatgacaacgtggagataaccctgttgcccccacctgcagttgctgccgcttgaagcgaagagcaccaccaagttctcgattccatacaactcgtatgcttgtattctgccgtgcctatattagattctctcgaaccatttggtgttccttgaaaactgctatcgtgtgatatatgaaattgtggtgctcaagaaattgccttgcttgcatatggttgtgttgcttaataaattcaatgctggtatagcattcgtgtcatgagacatgaaaacagcagactggagttaatggccgcgggttattgacgtcttccatactggatgatt

SEQ ID NO: 4948 - DNA, 3480 bp, Zea Mays
atctcacgaaaatttcaaatcttctcgttcccctccactccacgctagggtttctccatccccattccccactgcgccagccccagaactgacccttggatcggcgccgcgcttgctcgcggaaatggaggagatggccaaggagctcgacgacctgcgtgccgaggtggaggcactcaccgcccagctccgcgccaagtctgacctcgctgacggcctcaagcgcgcgagcgcggaccacgccgcgcggctgcgggatgcccgggcggaggcggagcggaatgcggcggaggccgcggccaggggtgaggaggccgccgccgccggggagcggtgcgaagtgctagagtccaggctagccgagaaggagcaggcgctgaggcacctctgtgcggcgcacgaagcgctcaaggccacgctccgggagaagatcgagggcctcgagggcgacaagaggggtctcctcgcggcgctcgaggacgctgaggcgaggcgcggggagcacgaggccgccctgcgcgcccgcgacgtcgaggtcgcgcggcttagggggcttctgtcagagaaggacaggaggtgcggcgaggctgagaagagggcatcggcgccacgagatgtggtgatgagggacgacatgctggggaagctggaggaggagaaggccgctgtccagtgtaagctcaagtggaaggatgagcagttcaggcacctcgaggaggcactcaagaaggttcaggatgacttcagggctgccaagaaggagtggggctcagatagatcaactttggttgatcggattgacactcttgaggctgatttggattccaagatcagggttgcagaggatttccggtccaggctggatatgtgcagccaggcattagcccatgaggaaggccgcaggaagcgagtggaaacagagatgtctgagttgcgccacatgtatggcaatgtgatctctgaatatcaaggggccaaatcaatggtcgagtcgttgagctccaagacagatggggatattgcatatttgagaagctcactggctgagaaggccacaatgctcaaggaaatagaatacagtaaggcacgtattgaacaagaaaatgaggatttgcggtcaaagctcaaggagtatcaggaggcacagattggtggtgcagatgctgttgtatcattgaaaagtctgcgggagaagttccgagccctggagcagacacatagaagttgcaccgagaagctaagaggtaaggaagaagaatggagactgcagatgacaaagcttgtgaatgacttggatggatgcttatcgcagttagaatccaaagatattcttatcgtgcaactgcagaatgagttgctgggtagtcataggtcccttgagctacaaacagtggataattgggaagcattgataatacttactgttgtacagacaaaattttatgagtcctgctcatttgttgatactgctaaactgaatatgcagcatcactgtgaagaaattgagaaggaaatatcttctgccaagaaacagttagaagaacaatcttgcattattgcccagtctcaagctgaacagaaacaacaatctggggttataacaaaattgcatgcaagaattgaggagctagagcatatggaacaagaacataagaagatgcaaagacaacttgatgcatacaaagagatgagggacaacatgttaagagatgctcactgcctaaaagatgaaacttcaaagaaggaaagcaccctgcaggtgaaattgagggaggcattaagtgctcttgatgaagcaaactgtgcccttgctgacaggaagcgtgagctgagccagttagaaatcagtctccatcaccaaaaggaagcgattgagcatttggaaaaactgaaagttgatatggaagctgaagccaagagctatatgtgtgacaaccgtatcctgaagagagatctggatactgctcttactgccaaagtggaagctgaggagttgcttaggcaagaaaaaatgcagttaacatgtgctcttgatgaggcaaaatataccctttctgagaggaacagtgagctgacccaatttgagatcaattttcatcagcaaaagcaagcactggcgaacttagagaaggtgaaggttgatatgggaactgaactcaaaacatgtatggatgaaaattgtgtgctgaagagagatttgggtgttgctcttattgccaaaatggaggctgaggagtgtcatacaaaagaaaaggaggagttttgtggcataattaaagagaaaggaatgatgattgataaacttcagcaatacgtcgctgtgctagaagaagaaaacatggtcaagaaacttgatttgggaagtcttatcaagatggagtgtgacaagtccattcgtgaagtgaagaactggtattctgaaattgttgagatctctgacaaaaagcttttggagctggaagaaaggcttagattcgctgagcagaaattttcatgcagggagcaggagatcatgaatatgtttgatcaagaggaatcagattggtatacactaattgcagagaaagaaattgctatttctgatattcaacaaactgttgaatctgttcagcttgacatcaagcaccttcttgaggcagcagcagcaaaagtggcagaagttcagctagaggtgaatcaactttatggttttgctgaaactctgaattcacttaacatcatccaagagcatgatactgttttcaaggatatgctcattgcagagtgcgaaagagaacttgactccctgcaggtgaatttagtgcaagagaagcatcagtcaagaaatttgaagaatcttattgaacagctcgaagctcaaactgcttcagaaatgtcagaaaaggcagaggagcatctagaagttacgaataagctgaaatcattggaggggagaaatgaaacgttagatgagcatctgcgagagcttaagtctagaacaactgatatgtctaaagctgtactacaagagaggaatcagttggtcaatgagctgactggactaaccaataccatcggggaggtaatttatggaggtgaaagtatgatgtcaaatttgagaaggatcatgcagaaagttaatgaggaaccttgcaatgacaggcttacctcagaaaaaactaatggtagaagttcttcacctttgatcaggcacaaatcagggcatgtcctagatagaagatcgcctctgaaggagaacaactactagttagtataggtcagatcgtgtactgatattgctgtaacagttgtactcggttttctatgaatctaacatgccgcccctagagctgtgccttttcttctccttccccagtgccatccgtgttttgttatttaaacacagtggctgtgttagcgaacacttattttatggactgaatttgaataacatagtttcccaagtgttgaatgaaatgaagcctattgtgtttgctgcaa

SEQ ID NO: 4949 - DNA, 2483 bp, Zea Mays
caaccccgtcgccgtcgctccagcgagaagccgtagacaaatgtctctattcccattgccgtccatatttaaaccccaacttggtcaacactcacatgccatgctgccaatgccgcctcctgcctaccctggtcttccaataaatcaacctgctccccgacgcggcgaggctcggccatgcccgtgagctgtaggcgcacccggaggccgcagcacagcagccacggatgaggaggcctccaatcgtggcgcgcgtgcgccgctcgctcttcctcctcctctgctgctgttgctgcctcgccgcctggtcgtcgccgccggccgtgcgcgcactcccgctgtgcaccgacgggcgggcgccggtgccgctgaacaggacgctgggcttctgctccgcttacggcgggggcggcagcagtagcagctgctgcgacgccgcagcggacgccgcgctgcggaagaggttcaacgccatgaacatctctgacgcggcctgcgctggcgtcatcaagtctgtcctctgcgcggaatgcagtccattttcggctgagttgttcaactcaagctcaaagattcagatggttcctctcctgtgcaactatacttcttcatcaagttctgctcaatcaaaagattctacacgagattactgtaaactagtttgggagacttgcaaaaatgtgacaatagtgaactctcctttccaacctcccttgcaaggaagtgcaagactgcctagttcatcgtcaaagctcacagatgtctggcagtcagaacatgacttctgcacatcatttggtggctcatctggtgagcagtctttatgtttcaatggaaatggaattttcttcaacagcacagaaccatcacccacacctaaagggatatgccttgagagaatcagcaatggatcttatctgaacatggcttcacatcctgatggatccaacagagttttcttgtctagccaagctggaaagatatggttggccagcatcccagaacaaggctctgggggcactctacaatatgatgaggcaaacccatttcttgacataactgatgaagtttatcatgattctcagtttggcctcatgggtgttcatgtaattctgatgctaactgtgatccgtcaaagctcggcactgataatggtgctcagccatgtcaataccaagttgttgtttcggagtattctacaaaaatctcctcacctaacgtttctatggcaacatctgccaatccatctgaggttagaaggatttttacaatgggactgccgtatatagctcaccatggagggcaaatactatttggaccaacagatggatacctttaccttatgatgggggatggtggaagtgaaggcgacccttttaatttctctcaaaataagaaatcacttttggggaaaataatgaggcttgatgttgacagcacacaaggccaaagtcaaaccacaaatcagagtttgtggggtaactattctattccaaaggacaatccgtttgctgatgatagtgactttcaaccagagatatgggccttgggatttagcaacccgtggagatgcagctttgactccgagaggccttcgtacttctactgtggagacgttgggaaggacgcatacgaagaggtagatttagtcaccaagggtggaaactacggatggcgtgtatacgaggggccatacatctttcacccgcaaaagtcgcctggagggaatacttcgcctgagtccataaacgcaatcttccccgtcatgggctacgaccattctgctgtgaacaaggaaatcgggtcagcatcgatcacaggcggatatgtgtaccgaggttccgctgacccctgcttgtacggaaggtacctctacaccgacctgtactcatcgctgatgtggacgggcacggaggccccagaggggagcgggaactacacgtcggccgtgaagccggtgagctgctccaaggcctccccgatcggctgcgagtccgtcgccgggagcacggacccgctgctcgggtacgtcttctcgttcggggaggacagccgcaaggacgtcttcgtcctggcgagcaagggcgtgtaccgcgtcgtcaggcccagcctctgcggctacacctgccccgcggagagaccggcgaccgacaacggcaccgcgccaggtccaggcgggccgtcgtcgggcgctcccgccgcgacacggctagggaggtcggtggcggcggtagcggtagctctggcgttgatcccgtgtgtgctgttactgtgaccttcagatgtgtgtctcgtgcgatgtagtaggatcagtcgtagctgaagctactgggagctggaagagtacatacgtatagcgtgagtaacgaacactcaaaaacagttgtgctatgtggatgcctctggacaagacaaagagcaatgggtagttttggcgcggcgctggaacgttcggttcaggaaagggttgttggaaggcgcgg

SEQ ID NO: 4950 - DNA, 1502 bp, Zea Mays
cactcacatgccatgctgccaatgccgcctcctgcctaccctggtcttccaataaatcaacctgctccccgacgcggcgaggctcggccatgcccgtgagctgtaggcgcacccggaggccgcagcacagcagccacggatgaggaggcctccaatcgtggcgcgcgtgcgccgctcgctcttcctcctcctctgctgctgttgctgcctcgccgcctggtcgtcgccgccggccgtgcgcgcactcccgctgtgcaccgacgggcgggcgccggtgccgctgaacaggacgctgggcttctgctccgcttacggcgggggcggcagcagtagcagctgctgcgacgccgcagcggacgccgcgctgcggaagaggttcaacgccatgaacatctctgacgcggcctgcgctggcgtcatcaagtctgtcctctgcgcggaatgcagtccattttcggctgagttgttcaactcaagctcaaagattcagatggttcctctcctgtgcaactatacttcttcatcaagttctgctcaatcaaaagattctacacgagattactgtaaactagtttgggagacttgcaaaaatgtgacaatagtgaactctcctttccaacctcccttgcaaggaagtgcaagactgcctagttcatcgtcaaagctcacagatgtctggcagtcagaacatgacttctgcacatcatttggtggctcatctggtgagcagtctttatgtttcaatggaaatggaattttcttcaacagcacagaaccatcacccacacctaaagggatatgccttgagagaatcagcaatggatcttatctgaacatggcttcacatcctgatggatccaacagagttttcttgtctagccaagctggaaagatatggttggccagcatcccagaacaaggctctgggggcactctacaatatgatgaggcaaacccatttcttgacataactgatgaagtttatcatgattctcagtttggcctcatgggtgttcatgtaattctgatgctaactgtgatccgtcaaagctcggcactgataatggtgctcagccatgtcaataccaagttgttgtttcggagtattctacaaaaatctcctcacctaacgtttctatggcaacatctgccaatccatctgaggttagaaggatttttacaatgggactgccgtatatagctcaccatggagggcaaatactatttggaccaacagatggatacctttaccttatgatgggggatggtggaagtgaaggcgacccttttaatttctctcaaaataagaaatcacttttggggaaaataatgaggcttgatgttgacagcacacaaggtgtgcttgtcacctctgataccatgtaagattgtggaatgcttcttgtattgcatagggatagttacataaccgaatgggccggcagcccaacagtggtgccgacccacacacacagagtacacactgtctaacagttactatc

SEQ ID NO: 4951 - DNA, 2386 bp, Zea Mays
cactcacatgccatgctgccaatgccgcctcctgcctaccctggtcttccaataaatcaacctgctccccgacgcggcgaggctcggccatgcccgtgagctgtaggcgcacccggaggccgcagcacagcagccacggatgaggaggcctccaatcgtggcgcgcgtgcgccgctcgctcttcctcctcctctgctgctgttgctgcctcgccgcctggtcgtcgccgccggccgtgcgcgcactcccgctgtgcaccgacgggcgggcgccggtgccgctgaacaggacgctgggcttctgctccgcttacggcgggggcggcagcagtagcagctgctgcgacgccgcagcggacgccgcgctgcggaagaggttcaacgccatgaacatctctgacgcggcctgcgctggcgtcatcaagtctgtcctctgcgcggaatgcagtccattttcggctgagttgttcaactcaagctcaaagattcagatggttcctctcctgtgcaactatacttcttcatcaagttctgctcaatcaaaagattctacacgagattactgtaaactagtttgggagacttgcaaaaatgtgacaatagtgaactctcctttccaacctcccttgcaaggaagtgcaagactgcctagttcatcgtcaaagctcacagatgtctggcagtcagaacatgacttctgcacatcatttggtggctcatctggtgagcagtctttatgtttcaatggaaatggaattttcttcaacagcacagaaccatcacccacacctaaagggatatgccttgagagaatcagcaatggatcttatctgaacatggcttcacatcctgatggatccaacagagttttcttgtctagccaagctggaaagatatggttggccagcatcccagaacaaggctctgggggcactctacaatatgatgaggcaaacccatttcttgacataactgatgaagtttatcatgattctcagtttggcctcatgggtgttcatgtaattctgatgctaactgtgatccgtcaaagctcggcactgataatggtgctcagccatgtcaataccaagttgttgtttcggagtattctacaaaaatctcctcacctaacgtttctatggcaacatctgccaatccatctgaggttagaaggatttttacaatgggactgccgtatatagctcaccatggagggcaaatactatttggaccaacagatggatacctttaccttatgatgggggatggtggaagtgaaggcgacccttttaatttctctcaaaataagaaatcacttttggggaaaataatgaggcttgatgttgacagcacacaaggccaaagtcaaaccacaaatcagagtttgtggggtaactattctattccaaaggacaatccgtttgctgatgatagtgactttcaaccagagatatgggccttgggatttagcaacccgtggagatgcagctttgactccgagaggccttcgtacttctactgtggagacgttgggaaggacgcatacgaagaggtagatttagtcaccaagggtggaaactacggatggcgtgtatacgaggggccatacatctttcacccgcaaaagtcgcctggagggaatacttcgcctgagtccataaacgcaatcttccccgtcatgggctacgaccattctgctgtgaacaaggaaatcgggtcagcatcgatcacaggcggatatgtgtaccgaggttccgctgacccctgcttgtacctctacaccgacctgtactcatcgctgatgtggacgggcacggaggccccagaggggagcgggaactacacgtcggccgtgaagccggtgagctgctccaaggcctccccgatcggctgcgagtccgtcgccgggagcacggacccgctgctcgggtacgtcttctcgttcggggaggacagccgcaaggacgtcttcgtcctggcgagcaagggcgtgtaccgcgtcgtcaggcccagcctctgcggctacacctgccccgcggagagaccggcgaccgacaacggcaccgcgccaggtccaggcgggccgtcgtcgggcgctcccgccgcgacacggctagggaggtcggtggcggcggtagcggtagctctggcgttgatcccgtgtgtgctgttactgtgaccttcagatgtgtgtctcgtgcgatgtagtaggatcagtcgtagctgaagctactgggagctggaagagtacatacgtatagcgtgagtaacgaacactcaaaaacagttgtgctatgtggatgcctctggacaagacaaagagcaatgggtagttttggcgcggcgctggaacgttcggttcaggaaagggttgttggaaggcgcgg

SEQ ID NO: 4952 - DNA, 2122 bp, Zea Mays
cgactatttgcctgatgagggaaaaaggaaagctgggaggttaacgtggtggcatttgttttgtgtgaatactaggaatgcagtccattttcggctgagttgttcaactcaagctcaaagattcagatggttcctctcctgtgcaactatacttcttcatcaagttctgctcaatcaaaagattctacacgagattactgtaaactagtttgggagacttgcaaaaatgtgacaatagtgaactctcctttccaacctcccttgcaaggaagtgcaagactgcctagttcatcgtcaaagctcacagatgtctggcagtcagaacatgacttctgcacatcatttggtggctcatctggtgagcagtctttatgtttcaatggaaatggaattttcttcaacagcacagaaccatcacccacacctaaagggatatgccttgagagaatcagcaatggatcttatctgaacatggcttcacatcctgatggatccaacagagttttcttgtctagccaagctggaaagatatggttggccagcatcccagaacaaggctctgggggcactctacaatatgatgaggcaaacccatttcttgacataactgatgaagtttatcatgattctcagtttggcctcatgggtatagcatttcacccaaagttcgctactaatgggcgcttctttgtttcttataattgtgatagaactcaatctcctaaatgtgctggtaggtgttcatgtaattctgatgctaactgtgatccgtcaaagctcggcactgataatggtgctcagccatgtcaataccaagttgttgtttcggagtattctacaaaaatctcctcacctaacgtttctatggcaacatctgccaatccatctgaggttagaaggatttttacaatgggactgccgtatatagctcaccatggagggcaaatactatttggaccaacagatggatacctttaccttatgatgggggatggtggaagtgaaggcgacccttttaatttctctcaaaataagaaatcacttttggggaaaataatgaggcttgatgttgacagcacacaaggccaaagtcaaaccacaaatcagagtttgtggggtaactattctattccaaaggacaatccgtttgctgatgatagtgactttcaaccagagatatgggccttgggatttagcaacccgtggagatgcagctttgactccgagaggccttcgtacttctactgtggagacgttgggaaggacgcatacgaagaggtagatttagtcaccaagggtggaaactacggatggcgtgtatacgaggggccatacatctttcacccgcaaaagtcgcctggagggaatacttcgcctgagtccataaacgcaatcttccccgtcatgggctacgaccattctgctgtgaacaaggaaatcgggtcagcatcgatcacaggcggatatgtgtaccgaggttccgctgacccctgcttgtacggaaggtacctctacaccgacctgtactcatcgctgatgtggacgggcacggaggccccagaggggagcgggaactacacgtcggccgtgaagccggtgagctgctccaaggcctccccgatcggctgcgagtccgtcgccgggagcacggacccgctgctcgggtacgtcttctcgttcggggaggacagccgcaaggacgtcttcgtcctggcgagcaagggcgtgtaccgcgtcgtcaggcccagcctctgcggctacacctgccccgcggagagaccggcgaccgacaacggcaccgcgccaggtccaggcgggccgtcgtcgggcgctcccgccgcgacacggctagggaggtcggtggcggcggtagcggtagctctggcgttgatcccgtgtgtgctgttactgtgaccttcagatgtgtgtctcgtgcgatgtagtaggatcagtcgtagctgaagctactgggagctggaagagtacatacgtatagcgtgagtaacgaacactcaaaaacagttgtgctatgtggatgcctctggacaagacaaagagcaatgggtagttttggcgcggcgctggaacgttcggttcaggaaagggttgttggaaggcgcgg

SEQ ID NO: 4953 - DNA, 1216 bp, Zea Mays
ctgaacgtaaaattatttggattgagactgttgtattatttacttggagattttctctggtgctcttttgaaagcacaagtacttgagcacaaccaagcgagttatcctgatggaattgatgacaagaacagaaaacttaatgaaaagctggacgccctaaataaaaagaagcatggccttgtgcagatgctgaagcaggtcttaaatgctgaagaagaaatccgaaggcgcaacatgcaggcttcattgcgcgctgccatgccccagccatcagaaaacgcaacagatggaagttctgtttctaggttggcccctagaatgactgttgatgtcaattttggtgatgttgctggcgattcagatgctggttccaaccagggcactcctggacgccccttgcatcacttccacagtatctctccttcaacagcctcttttgcgaggtcaccgtttggttctctacagggccacactccaaggagtccggcaacattctctacggcaagtccatcacgcttcgccacaaatatacacccaggacaacctcctgctctttattcagcatcgttgccaggaagtaactatgtagccacatcaccttccccggccgcatctggtggttcctcctcggtgttcagggaccctcggccacctaactctacataggttctatgctttgctcggagttctactcattggtaatgttgctaaattctctacccagggatttaggtaatgtcgtgcttcgggcaacactagtgttaaaacaaattcgtgtctctgtgaacggtaaataacgtgatagcactgaaattcaaaattagtatattaatttcacaattatattatattaaaaacaaggcttgtactcggtctaggggaaagatcacctccaatcgttgccccgactaattgcaaacttcccttttcccatctttatttactgctgaaaaagattgtttcatttttctgcggtactgctttaagcttccgaccaaatgatgaaacaagcaacttcatcatatttgctacatgttctcaacatgtttatgcacaacccacaagatgaaacgtcgacagatgtagaaatgagataacagcttgattagctacatcgcgtgtagagagagtaacaatggcggtgttccagctcgttcaaggttcacacaattccttttcggccgtcgaagactcgaaggcagggaactacaggaa

SEQ ID NO: 4954 - DNA, 3055 bp, Zea Mays
ggcgcacaaccgtgtatcatggaaactagtggagatatacataagaggattgtacagagtcccgattccgtcaatactctttttccttcctgtccaaggcccatcaccgagaggggagaagcgatgaaggcggcgccgatcgccaagtcgaggcgggagccgccttccatccctcccaactacgtcagcctccagcagctccttgagcttcgcctcaaagagaaggaggaggaggaggagaagcggcagcgggaggaggaggccgccgcagccatggccgccgcggttaagcgggaggcggcgctaagggcggaggaggaggccatggccgccgcggttaagcgggaggcggcgctgaaggcagagactaagggacgatcggtctcgcgcgaggccttctgtggggccaaggataggcagcatggggggcagggccaccggtgggtggccgtggtgcatcgagcgccgccgacgtgcggggaagttgcggcagggaagagggaatggatggtaggaggtagccgtggcaagaaggggctggacgatgtcgcggacagtgcaccccatccccgtggcggacgcaagtacccgcggaaggggaagaggaaggggaataagaagggcgagccaggtaatctggccgaggcagctcctccaacatcgaacggcggcaaggtggacatcaagagcgaactcaaggcgatggggaaggcctcggttgcgccactcgatccggccaaggcggccgtggcatcatccccgggccacctgacctgcaaggggaggaaggggaaaggcgcgggtaaccggagcgcagagacgagccggggcgatggtccggtgaaggtgaagacggccggtccgtcgctgccgcgaggcgtcaagtcgggcaacgcggggaaaccgaaacctgcagcgcccaggctcgcagacgccgggacaggcagcgattctcctgatgggaaggctccggccccgtccccggccccggccccggctctgaacccttccacctcgcccgccgatggcaggagcaaatcgaagagcggtggcatgctccgcaagaccatggaggcgaagccagagggcctagtcgaagggcagcgccggcaaccggtggtggaggtccaggccgtgaccgggccgaatccacggattgcgaggaggtcggctcaaccctggcgcccccgcggcattagggctgcacagccgcacgggcttgtgtgggtgcccaaggcagcggtggctggaccatcctccagcggcgaggacaaataatcggattgccactccactcggaattctcccctggttgatcctactctcccagtaattgcaaaagtttatcatccaaaatgttttacaagcttctacgctcgagcagctacatagaacttgggtccgtcgtcttcctcccggcgtcctagagcgaggggaagtacctgctcaagccataaggaagacggtagaactcctcgctcctgccatcatacttgtaggacttgaacttctcccaccagaaccagcccctgtccttcttcacactagcctcccagtacaggtgggtgcagtccagaaggtaggccagtatggcggccaccgtcgccggcgatgagaagatgacattgaccatcacgttgaactgcaacggcaagtaggaggaagagaggtgaggatgtgagagcttaatggaatttatttcgtctactgcatctagctcgcgtaccgctactgaatgggtgtgaactggtccgaagccgaagaacatctcgtagacccggaagtactgtgggatggacagccccaggaacaacgagatgctgagtatgaactttgtcctcaaggagttgaggttgcagtactggagtaagctgaagcctgcaccagctgtttcaggcagagaagcaagttcagatcaacaaaagatggtatggaatggaaacaccagaatccatatctctgatgattgatgggtaaaaactaccgtgaatgctgacagtaaggctgacctgaataagcgaagaggacgcagtacagtgcagcgaaaataggcaatggaatggatgcaagaaccgccccaaatttggctgttgagttgcagttcgtaccagtcaggtgcaattactaaccatggaatgctgaatcattatctaaaaaacacacatgaaatgctagatactcctgatatatatatatatatatatatatatatagtaaagaaaaatgaggaagcctaccaaacaaggagaagaaaatcatgaacaaggctgagatcttaatgactcgccggcttccaactcgcgtcactgccagtagacctgcattctcactttgaaagcaacaaagagagcaggttacttcgaagctttctttcgctttgaaatggcttgctaactgatgaggttatcaactgagttaaaagtagagtgcattacactgaagccgctgttcctgtcagtgtaccgcacatcccgtccagtatgatagatataccctgatgatattttggaagttgctttctagttaggcctggtttagatctttggaattaaaatacattctagttatcatagtttgtgcacagagtagaaatgtatttatatattattgttggtcatacttgtgagctgtatttctaatgtacgggagcaagctgaagagtatgacataagttgcagattagaaatgtagcacggtaatatttgaggtttcatcctacagatttaagacccgaacagcccctagcgaaaatcattgtattgtaaaggggcagttagaagaactgaacgttttgattatttggttacctcccagccaattccacgtgagaagacggagggtgggcagaacgtcgcgcctgagtatcttgacactgcgattaaggtgccggtagactgcattggaagttcatcgtcatcagaatcagcataggggcacttgctattaatcggtctcagaacaagcaattgtattgttgaagatgctaatgcttgctatccccattgtatgtatcttcgtgaggaggatcatatttggagtgttgccattgtttact

SEQ ID NO: 4955 - DNA, 717 bp, Zea Mays
cccagtacaggtgggtgcagtccagaaggtaggccagtatggcggccaccgtcgccggcgatgagaagatgacattgaccatcacgttgaactgcaacggcaagtaggaggaagagagccgaagaacatctcgtagacccggaagtactgtgggatggacagccccaggaacaacgagatgctgagtatgaactttgtcctcaaggagttgaggttgcagtactggagtaagctgaagcctgcaccagctgtttcaggcagagaagcaagttcagatcaacaaaagatggtatggaatggaaacaccagaatccatatctctgatgattgatgggtaaaaactaccgtgaatgctgacagtaaggctgacctgaataagcgaagaggacgcagtacagtgcagcgaaaataggcaatggaatggatgcaagaaccgccccaaatttggctgttgagttgcagttcgtaccagtcagccaattccacgtgagaagacggagggtgggcagaacgtcgcgcctgagtatcttgacactgcgattaaggtgccggtagactgcattggaagttcatcgtcatcagaatcagcataggggcacttgctattaatcggtctcagaacaagcaattgtattgttgaagatgctaatgcttgctatccccattgtatgtatcttcgtgaggaggatcatatttggagtgttgccattgtttact

SEQ ID NO: 4956 - DNA, 1302 bp, Zea Mays
gaaggttccggacttgagaagccccccaccccgcaccgcatggagctccattcgcctccaccatggtgccactgcgagcagctccgccccctgcccccccggtcggcggatcccccaccccgccagggatgctaaaggtcgcggcaagtggctctactgccactccactccgcggcggtgccagcgttgatgaccacctctcggcctactgctacttcttctccagcatgggtctaatccatgtcgcgatacggggttgttcagcatgggtctggtgaatgaaggcatcgacatgaaggagggaaacctagagatcggcatagcaattcttttgcatgacgattagtttttttttattaatctgtgttagatcttcaaatacacgcaatccaatcttgaagatctggttaaataagtatgctgcttgtaccataaaccgtgtgcgacgcaaatttcagtaagtgcattttgctgatgtattgtgatagtagaccgaccttccttctgcagagtggaaccaaaggtatttgatgagttctttggcatgccacatagcagatttgaccgggaagcttgcaggtctactatctgtcctgatttttgtatctgtgtgtcttccttcatgttcaaaatggtgattcagtttatatgagagtattgtcttagtgtttgtgtggataacatcaatatggtgtacgacgatgagtttcctgaacttagtactttcaagtgtgtgacaagaaaggaaagtagcaagctggaaagcaagaaccaagataaattgtttgatgcatatatcatgtatggttctgcaatacaatctacaacacaccagattatatgtgaaggtcagattttatcatctcagatttgttgatttcaatattttatggagtccctatggtttgccaacttcactaacgatggaattgattgaaatcctttttgagaaatgaatagccaataaatttctcatgggaagagggtaagcaatggccaatgttcagggattggatacatagttgcatttacatgtcaatgtcatcttcacatagtagatagaattgtacacaattttcagtaatattggcactgtagatatggtctgtatttaacagtgttgttgacttcttagtgatttgctgaaataatgacgcataactacgcttatatcgagaaggggagaaaggatcaactgtcaccgtctccgtcggcaacatcagccatgttgacagcccgcgctctgtgtgccctcctccccacgcatgtgatggcctatgtttttttcttctccctcacgct

SEQ ID NO: 4957 - DNA, 1310 bp, Zea Mays
cttgagaagccccccaccccgcaccgcatggagctccattcgcctccaccatggtgccactgcgagcagctccgccccctgcccccccggtcggcggatcccccaccccgccagggatgctaaaggtcgcggcaagtggctctactgccactccactccgcggcggtgccagcgttgatgaccacctctcggcctactgctacttcttctccagcatgggtctaatccatgtcgcgatacggggtttggacattttgggctaggttgttcagcatgggtctggtgaatgaaggcatcgacatgaaggagggaaacctagagatcggcatagcaattcttttgcatgacgattagtttttttttattaatctgtgttagatcttcaaatacacgcaatccaatcttgaagatctggttaaataagtatgctgcttgtaccataaaccgtgtgcgacgcaaatttcagtaagtgcattttgctgatgtattgtgatagtagaccgaccttccttctgcagagtggaaccaaaggtatttgatgagttctttggcatgccacatagcagatttgaccgggaagcttgcaggtctactatctgtcctgatttttgtatctgtgtgtcttccttcatgttcaaaatggtgattcagtttatatgagagtattgtcttagtgtttgtgtggataacatcaatatggtgtacgacgatgagtttcctgaacttagtactttcaagtgtgtgacaagaaaggaaagtagcaagctggaaagcaagaaccaagataaattgtttgatgcatatatcatgtatggttctgcaatacaatctacaacacaccagattatatgtgaaggtcagattttatcatctcagatttgttgatttcaatattttatggagtccctatggtttgccaacttcactaacgatggaattgattgaaatcctttttgagaaatgaatagccaataaatttctcatgggaagagggtaagcaatggccaatgttcagggattggatacatagttgcatttacatgtcaatgtcatcttcacatagtagatagaattgtacacaattttcagtaatattggcactgtagatatggtctgtatttaacagtgttgttgacttcttagtgatttgctgaaataatgacgcataactacgcttatatcgagaaggggagaaaggatcaactgtcaccgtctccgtcggcaacatcagccatgttgacagcccgcgctctgtgtgccctcctccccacgcatgtgatggcctatgtttttttcttctccctcacgct

SEQ ID NO: 4958 - DNA, 1023 bp, Zea Mays
cttgagaagccccccaccccgcaccgcatggagctccattcgcctccaccatggtgccactgcgagcagctccgccccctgcccccccggtcggcggatcccccaccccgccagggatgctaaaggtcgcggcaagtggctctactgccactccactccgcggcggtgccagcgttgatgaccacctctcggcctactgctacttcttctccagcatgggtctaatccatgtcgcgatacggggtttggacattttgggctaggttgttcagcatgggtctggtgaatgaaggcatcgacatgaaggagggaaacctagagatcggcatagcaattcttttgcatgacgattagtttttttttattaatctgtgttagatcttcaaatacacgcaatccaatcttgaagatctggttaaataagtatgctgcttgtaccataaaccgtgtgcgacgcaaatttcagtaagtgcattttgctgatgtattgtgatagtagaccgaccttccttctgcagagtggaaccaaaggtatttgatgagttctttggcatgccacatagcagatttgaccgggaagcttgcaggtctactatctgtcctgatttttgtatctgtgtgtcttccttcatgttcaaaatggtgattcagtttatatgagagtattgtcttagtgtttgtgtggataacatcaatatggtgtacgacgatgagtttcctgaacttagtactttcaagtgtgtgacaagaaaggaaagtagcaagctggaaagcaagaaccaagataaattgtttgatgcatatatcatgtatggttctgcaatacaatctacaacacaccagattatatgtgaagtgatttgctgaaataatgacgcataactacgcttatatcgagaaggggagaaaggatcaactgtcaccgtctccgtcggcaacatcagccatgttgacagcccgcgctctgtgtgccctcctccccacgcatgtgatggcctatgtttttttcttctccctcacgct

SEQ ID NO: 4959 - DNA, 1544 bp, Zea Mays
cttgagaagccccccaccccgcaccgcatggagctccattcgcctccaccatggtgccactgcgagcagctccgccccctgcccccccggtcggcggatcccccaccccgccaggtgctctgctaaggcccaccacagtgccagcaactccaccacccccttcctccgctgttggcggttcccccaccccgctaggagcaccgcccaggcggacggcttcaccttcaaagcccatgccacgcagccagcgtcgggatcacccccacctacacccctcgccagaggaccgcccccttgatgccagacagccaacggattcacccccacgccctccacgagcctgataaaggatgctaaaggtcgcggcaagtggctctactgccactccactccgcggcggtgccagcgttgatgaccacctctcggcctactgctacttcttctccagcatgggtctaatccatgtcgcgatacggggtttggacattttgggctaggttgttcagcatgggtctggtgaatgaaggcatcgacatgaaggagggaaacctagagatcggcatagcaattcttttgcatgacgattagtttttttttattaatctgtgttagatcttcaaatacacgcaatccaatcttgaagatctggttaaataagtatgctgcttgtaccataaaccgtgtgcgacgcaaatttcagtaagtgcattttgctgatgtattgtgatagtagaccgaccttccttctgcagagtggaaccaaaggtatttgatgagttctttggcatgccacatagcagatttgaccgggaagcttgcaggtctactatctgtcctgatttttgtatctgtgtgtcttccttcatgttcaaaatggtgattcagtttatatgagagtattgtcttagtgtttgtgtggataacatcaatatggtgtacgacgatgagtttcctgaacttagtactttcaagtgtgtgacaagaaaggaaagtagcaagctggaaagcaagaaccaagataaattgtttgatgcatatatcatgtatggttctgcaatacaatctacaacacaccagattatatgtgaaggtcagattttatcatctcagatttgttgatttcaatattttatggagtccctatggtttgccaacttcactaacgatggaattgattgaaatcctttttgagaaatgaatagccaataaatttctcatgggaagagggtaagcaatggccaatgttcagggattggatacatagttgcatttacatgtcaatgtcatcttcacatagtagatagaattgtacacaattttcagtaatattggcactgtagatatggtctgtatttaacagtgttgttgacttcttagtgatttgctgaaataatgacgcataactacgcttatatcgagaaggggagaaaggatcaactgtcaccgtctccgtcggcaacatcagccatgttgacagcccgcgctctgtgtgccctcctccccacgcatgtgatggcctatgtttttttcttctccctcacgct

SEQ ID NO: 4960 - DNA, 1267 bp, Zea Mays
ttcgcctccaccatggtgccactgcgagcagctccgccccctgcccccccggtcggcggatcccccaccccgccagggatgctaaaggtcgcggcaagtggctctactgccactccactccgcggcggtgccagcgttgatgaccacctctcggcctactgctacttcttctccagcatgggtctaatccatgtcgcgatacggggtttggacattttgggttgttcagcatgggtctggtgaatgaaggcatcgacatgaaggagggaaacctagagatcggcatagcaattcttttgcatgacgattagtttttttttattaatctgtgttagatcttcaaatacacgcaatccaatcttgaagatctggttaaataagtatgctgcttgtaccataaaccgtgtgcgacgcaaatttcagtaagtgcattttgctgatgtattgtgatagtagaccgaccttccttctgcagagtggaaccaaaggtatttgatgagttctttggcatgccacatagcagatttgaccgggaagcttgcaggtctactatctgtcctgatttttgtatctgtgtgtcttccttcatgttcaaaatggtgattcagtttatatgagagtattgtcttagtgtttgtgtggataacatcaatatggtgtacgacgatgagtttcctgaacttagtactttcaagtgtgtgacaagaaaggaaagtagcaagctggaaagcaagaaccaagataaattgtttgatgcatatatcatgtatggttctgcaatacaatctacaacacaccagattatatgtgaaggtcagattttatcatctcagatttgttgatttcaatattttatggagtccctatggtttgccaacttcactaacgatggaattgattgaaatcctttttgagaaatgaatagccaataaatttctcatgggaagagggtaagcaatggccaatgttcagggattggatacatagttgcatttacatgtcaatgtcatcttcacatagtagatagaattgtacacaattttcagtaatattggcactgtagatatggtctgtatttaacagtgttgttgacttcttagtgatttgctgaaataatgacgcataactacgcttatatcgagaaggggagaaaggatcaactgtcaccgtctccgtcggcaacatcagccatgttgacagcccgcgctctgtgtgccctcctccccacgcatgtgatggcctatgtttttttcttctccctcacgct

SEQ ID NO: 4961 - DNA, 1445 bp, Zea Mays
tgcccccccggtcggcggatcccccaccccgccaggtgctctgctaaggcccaccacagtgccagcaactccaccacccccttcctccgctgttggcggttcccccaccccgctaggagcaccgcccaggcggacggcttcaccttcaaagcccatgccacgcagccagcgtcgggatcacccccacctacacccctcgccagaggaccgcccccttgatgccagacagccaacggattcacccccacgccctccacgagcctgataaaggatgctaaaggtcgcggcaagtggctctactgccactccactccgcggcggtgccagcgttgatgaccacctctcggcctactgctacttcttctccagcatgggtctaatccatgtcgcgatacggggttgttcagcatgggtctggtgaatgaaggcatcgacatgaaggagggaaacctagagatcggcatagcaattcttttgcatgacgattagtttttttttattaatctgtgttagatcttcaaatacacgcaatccaatcttgaagatctggttaaataagtatgctgcttgtaccataaaccgtgtgcgacgcaaatttcagtaagtgcattttgctgatgtattgtgatagtagaccgaccttccttctgcagagtggaaccaaaggtatttgatgagttctttggcatgccacatagcagatttgaccgggaagcttgcaggtctactatctgtcctgatttttgtatctgtgtgtcttccttcatgttcaaaatggtgattcagtttatatgagagtattgtcttagtgtttgtgtggataacatcaatatggtgtacgacgatgagtttcctgaacttagtactttcaagtgtgtgacaagaaaggaaagtagcaagctggaaagcaagaaccaagataaattgtttgatgcatatatcatgtatggttctgcaatacaatctacaacacaccagattatatgtgaaggtcagattttatcatctcagatttgttgatttcaatattttatggagtccctatggtttgccaacttcactaacgatggaattgattgaaatcctttttgagaaatgaatagccaataaatttctcatgggaagagggtaagcaatggccaatgttcagggattggatacatagttgcatttacatgtcaatgtcatcttcacatagtagatagaattgtacacaattttcagtaatattggcactgtagatatggtctgtatttaacagtgttgttgacttcttagtgatttgctgaaataatgacgcataactacgcttatatcgagaaggggagaaaggatcaactgtcaccgtctccgtcggcaacatcagccatgttgacagcccgcgctctgtgtgccctcctccccacgcatgtgatggcctatgtttttttcttctccctcacgct

SEQ ID NO: 4962 - DNA, 1148 bp, Zea Mays
gccaggtgctctgctaaggcccaccacagtgccagcaactccaccacccccttcctccgctgttggcggttcccccaccccgctaggagcaccgcccaggcggacggcttcaccttcaaagcccatgccacgcagccagcgtcgggatcacccccacctacacccctcgccagaggaccgcccccttgatgccagacagccaacggattcacccccacgccctccacgagcctgataaaggatgctaaaggtcgcggcaagtggctctactgccactccactccgcggcggtgccagcgttgatgaccacctctcggcctactgctacttcttctccagcatgggtctaatccatgtcgcgatacggggtttggacattttgggctaggttgttcagcatgggtctggtgaatgaaggcatcgacatgaaggagggaaacctagagatcggcatagcaattcttttgcatgacgattagtttttttttattaatctgtgttagatcttcaaatacacgcaatccaatcttgaagatctggttaaataagtatgctgcttgtaccataaaccgtgtgcgacgcaaatttcagtaagtgcattttgctgatgtattgtgatagtagaccgaccttccttctgcagagtggaaccaaaggtatttgatgagttctttggcatgccacatagcagatttgaccgggaagcttgcaggtctactatctgtcctgatttttgtatctgtgtgtcttccttcatgttcaaaatggtgattcagtttatatgagagtattgtcttagtgtttgtgtggataacatcaatatggtgtacgacgatgagtttcctgaacttagtactttcaagtgtgtgacaagaaaggaaagtagcaagctggaaagcaagaaccaagataaattgtttgatgcatatatcatgtatggttctgcaatacaatctacaacacaccagattatatgtgaagtgatttgctgaaataatgacgcataactacgcttatatcgagaaggggagaaaggatcaactgtcaccgtctccgtcggcaacatcagccatgttgacagcccgcgctctgtgtgccctcctccccacgcatgtgatggcctatgtttttttcttctccctcacgct

SEQ ID NO: 4963 - DNA, 2278 bp, Zea Mays
tcccagtgccagtggcgacgacgggcgattgcgagccaccgccctcgcgaagcacctcggacacggcgactgccgactgacccggtacactgtttctccctccccatttctctctctcctgcgctgggtttaacgcagcggtaggcgatttcccccgatgcccccgtcgtgggtttgtccccgtggaaagaagcaccgctcccgtggaaacaagaagtcgttctagggatccaagatggcggcgcggatgctcatcgccgatccgcccagaatactacgccgtcaagcccccaagccccatgcacccacctctccagccactcctcccgctgccaaaaagccagatctggttgagcgcactgcagatttcgcggtaattgtttcatcgagactgccgtctccagcgcccggtggaccgccgccggtgtgcagcgacgacatagaactcgtcccagagactccacagttcagggtgctgagaaagctggtggatgatgcatcaaagtttttgaatgacaaggtcacaaaggcagtgatcacagtccctgcttacttcaacgattcacaaaggacagcaaccaaagatgctggccgcattgctgggctggaggttctgcgtattataaatgagcctaccgccgcatcactagcatatggttttgagaaaaagaacaatgaaacaattctggtttttgacctcggaggtggcaccttcgatgtttcagttcttgaagtcggtgatggtgttttcgaggtgctgtctacatcaggtgacactcaccttggtggtgatgactttgacaagagaattgtagattggctcgctgggaacttcaagaatgatgagggtattgatttgctaaaagataagcaagcactgcagcgattgacagaagcagctgagaaggcaaagatggaactgtcatctttgacccaaacaaacatgagcttgccttttattacagctactgcagatggtcccaagcatattgagactactcttaccagggctaaatttgaagagctatgctcagatctccttgacaggctgaggacccctgtggacaatgcccttagagatgcaaagttgcaattcaaagatattgatgaggttattcttgttggtggctcaactagaataccagctgttcaggagcttgtcaagaaaatgacaggaaaggaccccaatgtgacagtcaaccctgatgaggttgttgcacttggagcagctgtgcaggctggagttctgtctggtgatgttagcgacattgtacttcttgatgtgacccccttgtccctaggtttggagacactgggtggtgtcatgaccaagattatcccacggaatacaaccttgcctacctcaaagtcggaagttttctcaacagcagctgatggccagactagtgtggagatcaatgttctccaaggagaaagagagtttgtgagagacaacaagtctattggtagcttccggcttgatggaatccctcctgccccacgtggtgtaccacagatcgaagtcaagtttgatattgatgctaacggtatcctctctgtcagtgctgtggacaagggtacagggaagaagcaggatatcacaattactggtgctagcactctgccaaaggacgaggtggagaggatggttggcgaagctgagaagtttgcaaaggaggacaaggagaagcgagacgccattgacaccaagaaccaagccgagtcggtcatctaccagaccgagaagcaactgaaggaactaggggacaaggtcccaggtgacgtcaaggggaaagtcgagtcgaagctgcaagagctcaaggatgctgttgctggtggctccacgcagacgatgaaggacgccatgagtgcgttgaaccaggaagtcatgcagatcgggcaggccctctacagccagcagggtgccccaggcgcaggacctggtgcagctgatgcttcttctgctggttcagcgggcacttctgagaagccaggtgacggaggcgatgtgattgacgcagattttactgacagcaaatgagggggcatgctaggtattagatggaggcggttttgccgcgagggagataatttgtttccacaagattgtctaggatgtggatgttctactttttggtagattggcacctaactgtggaatgaatatacataggtccttttcttctgctatcaagagcattcgacgtttgacctggcagtgtttctgggttaataaaaacacaaaaaacgtgtcaaaacaaaaaaaaaaatacaaaaa

SEQ ID NO: 4964 - DNA, 2249 bp, Zea Mays
gacgaggagcgcgccgtggtcaacccggagaacaccttcttctccgtcaagcgcttcatcggccgcaagatgaacgaggtcgacgaggagtccaagcaggtctcgtatctcgtcatcagggacgacaacggcaacgtcaagctcgattgcccggcgattggcaagcagttcgcagctgaggagatctccgcacaggtgctgagaaagctggtggatgatgcatcaaagtttttgaatgacaaggtcacaaaggcagtgatcacagtccctgcttacttcaacgattcacaaaggacagcaaccaaagatgctggccgcattgctgggctggaggttctgcgtattataaatgagcctaccgccgcatcactagcatatggttttgagaaaaagaacaatgaaacaattctggtttttgacctcggaggtggcaccttcgatgtttcagttcttgaagtcggtgatggtgttttcgaggtgctgtctacatcaggtgacactcaccttggtggtgatgactttgacaagagaattgtagattggctcgctgggaacttcaagaatgatgagggtattgatttgctaaaagataagcaagcactgcagcgattgacagaagcagctgagaaggcaaagatggaactgtcatctttgacccaaacaaacatgagcttgccttttattacagctactgcagatggtcccaagcatattgagactactcttaccagggctaaatttgaagagctatgctcagatctccttgacaggctgaggacccctgtggacaatgcccttagagatgcaaagttgcaattcaaagatattgatgaggttattcttgttggtggctcaactagaataccagctgttcaggagcttgtcaagaaaatgacaggaaaggaccccaatgtgacagtcaaccctgatgaggttgttgcacttggagcagctgtgcaggctggagttctgtctggtgatgttagcgacattgtacttcttgatgtgacccccttgtccctaggtttggagacactgggtggtgtcatgaccaagattatcccacggaatacaaccttgcctacctcaaagtcggaagttttctcaacagcagctgatggccagactagtgtggagatcaatgttctccaaggagaaagagagtttgtgagagacaacaagtctattggtagcttccggcttgatggaatccctcctgccccacgtggtgtaccacagatcgaagtcaagtttgatattgatgctaacggtatcctctctgtcagtgctgtggacaagggtacagggaagaagcaggatatcacaattactggtgctagcactctgccaaaggacgaggtggagaggatggttggcgaagctgagaagtttgcaaaggaggacaaggagaagcgagacgccattgacaccaagaaccaagccgagtcggtcatctaccagaccgagaagcaactgaaggaactaggggacaaggtcccaggtgacgtcaaggggaaagtcgagtcgaagctgcaagagctcaaggatgctgttgctggtggctccacgcagacgatgaaggacgccatgagtgcgttgaaccaggaagtcatgcagatcgggcaggccctctacagccagcagggtgccccaggcgcaggacctggtgcagctgatgcttcttctgctggttcagcgggcacttctgagaagccaggtgacggaggcgatgtgattgacgcagattttactgacagcaaatgagggggcatgctaggtattagatggaggcggttttgccgcgagggagataatttgtttccacaagattgtctaggatgtggatgttctactttttggtagattggcacctaactgtggaatgaatatacataggtccttttcttctgctatcaagagcattcgacgtttgacctggcagtgtttctgggttaatctacatcttccataactttcttggtgggcggtcatggagtggaggcgacagtgtaacagtggcttacaaccttcgtatctcgaacaataataatgtagcgtgcatttgcctgggttcgaacacgggcgcttaaaacagggccgccagttgatcagatcagggctctctcagtctcccttaaatccagtttttttaagaaaaacacaaaaacatgtctccaacggttctctaaatccagttttttttagaaaaacacaaaaaacgtgtcaaaacaaaaaaaaaaatacaaaaa

SEQ ID NO: 4965 - DNA, 831 bp, Zea Mays
gaaaaatacaaaacaaccttttcatttacatgcctatttcaccagcgatgaaatggtcataaagtcctttttaggttgtaagtcaaatcaatacttcatgcatgagcgccttatcatgcctttagtggcagggtcataaagcgtggatgatggtgagaaacgtttcaatcagctttcaattgaggagaggggcaagtttgatgaagagacacttgtcaacgtgaacagcatcaagaggaataaaggaggcagccaaagatcaagtggttttagcaacgagtacattgtgataaccatattggttgctgctgagggagtacataagctgccggttataaatagcagcaatgacttaaagacagctctacaaaagatgggtgccataccatcaagcaaaatactggcagtcgaggtcctgtggactccgcaaaatgagaatgacacattgtccgagcgagagctccttgaagattacccgctcttaaggcctctgtagaaagataaaagttacagattgcccgtgcaaaggaagaacacgccgtagattcagttttggcggttttcttattagttatagcacagatcctgcgtttgtataataagtgtataataatttgtaattggcgtctctgatagccttcatttcagaacatggaacgtgcaaatctgcaattgtctgtcagtagtcttgttcaatcttcctgacacaataacacaaaattgtaaatagattgttcagagaaaaaataaaacaggacatgctgcatttgtgcgtgtacgcgttccaccaaggatatttcaaataaaaatatttgatgaatattgcatgct

SEQ ID NO: 4966 - DNA, 910 bp, Zea Mays
cgcaccatcatcaccagttcagtccaccgttccgccggcccgcccgtacccgcctgcgcctacacatcgctgctccaggtccccatggcgaagactacgcaacccaccgcggggatgcgggatcccctgctccccacctccaccgccgcctcaccgccgccctacctcgacccgcatcccgccgactcctacacctacacggtcttccttgtccccgttcgcctccgccgcggcctctgtcgcggcggccgttgcatcgtcccctgcctcaccgttctcttcctcctcgcgctcgcgggcttcctcctctggcccgcggacccggacatctccctggcccgcctccacctagcgcacgtctccgtcgtggcacgccctgccgtcgccgtcactatatccgccacgctcaaggttcgcgttcgcaatcctgacctcttcgcgctcgactacacccgcctcgacgtcgctatcggctaccgcggtgcggggcttggccgggtaacatccggcggcggacgggtccgggcgcgcgctgtctcgtacgtcgacgccaacctgcagctcgacggcatacgcgtcgtcgaggacgcgatgtacctgctcgaggacctcgcgcaaggatccgtgcccttcgacaccatcgccgaggtcgagggccacctccacttccttttcctcagcatcccggtcaaggggagaatatcttgcgtaatgcatattaatccacacaaccaaaccatagtacatcaggactgctatcctgagctgtaacagtacgaacaactgcagccgcagctgccagccgagcagccgaatatggtgaaagggtaaatggaagctgaaataggagggatggttggagaggagaaaaaatagttgagaatgcaatatttaaatatgagtagaaaat

SEQ ID NO: 4967 - DNA, 1484 bp, Zea Mays
tccctgcccgtcctccacctgtccgagacacttacaataatccttgcccaatcccgtctttagccgctagggttacgcgtccacggcgacgacctctgcgcagagcgtgctgcgattggccggccttcctgggatcctccccgcgcccgacacccggaaacgcgcgcgcgcgcgagggagagacagagtgaggaaacgagggaaggagacgacgcgctcgcctattggccgccggctccgctccttcgcgcccagtgcgacggccacggcctgagcggcgctgccagcaaggcggctagtatgagcagcatggagtcgcggccgggccgaacgaacctggtggagcccatagggcacggcgccgcgctgccgtccggcggccaggcagtgcagccgtggtggacgagctccggggctgtgctcggtgcagtctcgccagccgtcgtggcggtggcgcccgggagcgggacggggattagcctgtcgagcagcccggcaggtggtagtggtggtggcggcgcggctaaaggagccgcgagtgacgagagcagcgaggattcacggagatctggggaaccaaaagatggaagcgctagtcaagaaaagaaccatgccacatcgcagatacccgctctggcgccagagtatttggcaccatactcgcagctggaactgaaccaatcaattgctcattttcagctacctggactaactcaatctcgaatgccattacctcttgaagtatccgaggagcctgtttatgtaaatgccaagcagtaccatggtatcttaagacgacggcagtcccgtgctaaggctgaacttgagaaaaaggtggtcaaagccagaaagccataccttcacgagtctcgtcatcagcacgcgatgaggagggcaagaggaaacgggggacgcttcctgaacacaaagaaaagtgacagtggtgctcccaatggcgaaaacgccgagcatctccatgtccctcccgacttactacagctacgacagaacgaggcttgaagtagcggtatggctctggcatccttgaacagcagttcctgtccacgggcgtaggcattcgagaccggattcatatagctctccacagcatacgcgcagccatctctgcggtaacgcacgttctcctgaacgagctttgtagcgagataggtatgcaagtgcaatctgggcgcaggaatccatcatcaagtgcccaatgcccatggggtaggtacgctgtttcaggcaattcattcttggctttcacgttccacccttgtgtaactggtgtgttgtaaatgtgtggaaaactaagcttgtgctctgtatcgggccgttcagcggaactgcaaaacgcctgtataattaagatcgaactttggattaactcggtaatgctttgtctggttttcttttagcttttcaactgtaacacggccacagctgattcatgtgatgtgcttgcatatctttccttgtgccaa

SEQ ID NO: 4968 - DNA, 757 bp, Zea Mays
ggcaaaaaaccaatgtacgtggcttggacaacttgatgacctcttgccaacaagaggtcaaaatttggtagttggtgattcgatatcaaaacacttcattagctccaatattatgcatttcactgtttggtattacggtgcagcgttttccagagataagtcatatttcttacagtattttgtcagacagcagatgtatcattaactcatgtctgttatacccagtgccaatgtgacttctggagtaaaagaagatcgcatgatgatgacaggaatgcatactgtttctgatatcttctgtgttggctgtggatccatcgttggatggaaatatgaggctgctcatgagaagagccagagatacaaggaaggaaagtttattctggagaggtacaaggtgtcgggccctgacggaagccaatactggattccacaagatcctcacttgggtggaagcgacgccgatgatatatgaagcgcaagtcaacaagttcaagcctgctgttcgtcgcctcccctgtagataacctgggtgtttttgctctttagtcagccgggattgctcccattgaaataatccccggcataaattattgttgttcttgatgacatgatcatatccttcctattgcccttggaagttgttggatgtttctattgtatatgcgtaaccggtgttgcttataagttcatcgagttgtatgccaagcgctaatgaccaaataattaaagtttgttaattgtctgatcgacccgg

SEQ ID NO: 4969 - DNA, 739 bp, Zea Mays
ggcaaaaaaccaatgtacgtggcttggacaacttgatgacctcttgccaacaagaggtcaaaatttggtagttggtgattcgatatcaaaacacttcattagctccaatattatgcatttcactgtttggtattacggtgcagcgttttccagagataagtcatatttcttacagtattttgtcagacagcagatgtatcattaactcatgtctgttatacccagtgccaatgtgacttctggagtaaaagaagatcgcatgatgatgacaggaatgcatactgtttctgatatcttctgtgttggctgtggatccatcgttggatggaaatatagccagagatacaaggaaggaaagtttattctggagaggtacaaggtgtcgggccctgacggaagccaatactggattccacaagatcctcacttgggtggaagcgacgccgatgatatatgaagcgcaagtcaacaagttcaagcctgctgttcgtcgcctcccctgtagataacctgggtgtttttgctctttagtcagccgggattgctcccattgaaataatccccggcataaattattgttgttcttgatgacatgatcatatccttcctattgcccttggaagttgttggatgtttctattgtatatgcgtaaccggtgttgcttataagttcatcgagttgtatgccaagcgctaatgaccaaataattaaagtttgttaattgtctgatcgacccgg

SEQ ID NO: 4970 - DNA, 984 bp, Zea Mays
acttgtcgttggacaccaagcaaaccaggtcctcgctcggtttggtttgcttaccactccgtcctagcagcacggtcctcgattcttccgatcgctccggcagggcacacaccgaagaaggtggttagcggcctagcgccgccgaagaaagtatggcagcagccaccacgcctgaggagaacgccgccgccgcggccgccgtggacgccatcactgagacgaccaatcgcttcaccgtcaacacggacgccgccggtgccggtcctctcaagctcgacgacgtggacggcaacgtctacagctgcaagcgctgcggcacactcctcgccgtcgccgacgacatcgtctccaagagcttccattgcaagaacgggaaggcttacctcttcgataatgtgaggctgcacatgagaggagccagaaatacaaggaaggaaaatttgttctcgagaggtaccagttgcttggagcagaatgaagacttgaccgccgagtgctatacacggtgctcggtggctggctggaagagagactagtgatgcatactgcatataactttcttaccgtgtggatatatgaattttaatacgattcgacaagcttaaactcgtctgtggaccctgtaataaccgatccctcctgccatgttcttgaggccgggtgctgtgacttcatatatacattaattatgtatgtatagacatggatgtttgttgtatgtatgtgtagaccgtactagttgtgtgattgtgtcaagttctatggcgatgatgtggatgcgtgtatgtatatgtgtatgtctatttttgttttcgcccttgcccttcacaaatcacaaccaactgctgactattgttcatcgtccagccagttttatggtagagaaaatgagccgtcaaccccccgaagcggcccagcccaatgtgcgggatcgggctaggaacatcagacatgacgttgagtgagatcgccatcaccatcacg

SEQ ID NO: 4971 - DNA, 3054 bp, Zea Mays
caaagccacgactccctcaccccgcaggcccgcacttcccccagtctactctcttttcagtttctctctccccactttccccatttttaccgcacatctctccttcctcggcgtctcgcacaccccagcaccttcgtctcccctcccctcccccaacaatcggaaccggataggaagttcggcttcctcccggacgactcggcgcaagttcttccgatccgaggagcccctgttatgaacggcatgccgatctctgcgtcctctgcggcaagcgtcgacagtggcgcggtggcggccggcacgcccatgaagaatgcaacggcggcggacgctctcgccgagatggcgagacatcttaccgtcgacacggaagacaccttcgcgggcctgctggagctcgccgctgacgacgacgcagaggggctgcgcctcgcgctggagcgcgcgccacctgccgccgcggacgaggctggcctctggtacggccgccggaaggtcctggagcaccgcaccccgctgatggtcgctgccacctatgggagccttgccgcgctccgcctgctagtgtccatctcgtatgtggacgtcaaccgccgctcgggcacggacggcaccactgccctccactgcgccgcctctggtggctcacggacggctgttgagtcggtcaagctgcttctgggagccggggcagacgctaacaccatggatgacgccgggcgtcgtccggctgatgtgatctctgtgccaccgaagatgtttgatgccaagttcgcccttcaagatcttcttggattccccaagtctgagcatggcatgctccgggtggtgacaaggtccaccaactcgatctcatcgcctgtttcatcccccactgcagaggatgcacggtcaccgtctgcttctgtgatgatgatgacaaagttcgctgacttgcctagggttgcgacatcggagaagaaggaatatccagtggatccatcccttccagacatcaagaacagcatatatgcttccgatgagttccgcatgtactcgttcaagatccgcccttgctcacgggcatactcgcatgactggactgagtgcccatttgtccacccaggagagaatgctcggcgccgagacccccgcaagtaccactacagttgtgtgccatgcccagatttcaggaagggcgtatgccggcgcggagacatgtgtgaatatgctcatggagtgtttgagtgctggctccatccagcacagtaccggacgcgcctatgcaaggacggcacaagttgcaatcgtcgcgtctgtttctttgcccacacaactgatgaactccgtccattgtatgtctcgactggatcagcggtgccatctccaagagcttcagcaacagctgctatggagatggctgcagcaatgggcttgatgcccggttccccatcatcggtttccgcggtaatgtccccgtttaccccaccaatgtccccttcgggcaatgggatgcccccttcattgggctggcagcagccaaatgttccaactttacatcttcctggcagcagccttcagtcaagcaggctccgaacatcacttagtgcaagggatatgcctgctgatgactactccatgatgcgggatcttgattcccaacttatgaatgatctttgctattcccgtctcagttcatccacagggaaccactctgctagaaccaagtccctgaatccatcaaacctggatgacctcttctctgctgaaatgttatcatccccaaggtatagtaatgctgaccagggtgcaatgttttcaccttctcacaaggctgctatcctgaatcagttccagcagcagcagcaagcactgctgtctccaatcaacacaggagtttactctccaaagggcgtggacaaccagcagttaccttcacactcatcgctgctgcaagcatcactcgggatgccctcccctggccggatgtctccacgatgtgtcgaatcgggctccccaatgagctcccacctagccgctgctcttgtccagcgggagaagcagcagcagacaatgagaagtctcagctctcgtgaccttggtcctagcgcggcacgagcttcggctcttggctcccctctaagctcatcatggtctaagtggggatctccttcggggacaccagattggggcataaatggtgaagaattgggtaagctccggcgctcatcgtccttcgagctgaggtctggtggtgacgaccctgatctctcttgggtgcatacactggtcaaggaatctccaccggagaagcaagttactacggctgaatcaattagttccgttggaccctcaccactaatgcctcccggcatgaacaatggcgacggttctggcctgagcacccagctggatggacacgaccaagccgcggttataggagcgttgcttgaacagatgcagcttgaccagcagattggtagtctagcaacatagactcacgacgcgattgaggtactcaacaaagatggatagctgaaggcggtgatattcagagattggttttctttaatttttttttgggggggggggggggggggggggggtaaatcctacacattattatttgaggttcctttaggttaaaagagtgaagctcctcggttggggtttgttcctaggccaacccaggtagagagaatcgcaccccggcagcatcggttcatcgactgaagcattaaccctcttaagaaaaaaaaaagttcgctgtgttggaaattcttttcctttctccctagcggtgtttattttgttcattatggtatcgatacctgatgtacttactgatggtgtaagtgggatcctatagtaggtctgtcaagttcaaaaggtatttttttttcttcaccctttaccatttgtcgtggattatctcgtggccttgttttggttagaccttgaggccggcgtaatcctcgtggatgatatttgcaaataaatgtaatatttgctttcgaacttactgctactgttccaatctcgccatccatattcatctggtctacgttcacctgt

SEQ ID NO: 4972 - DNA, 2255 bp, Zea Mays
attcagatatttcgggtactcagttaataataacctactctctgatgtctgatgtcgcaactcgcaactctagctcccagcctcccagtcttcccaggcggccggcggcgtcctaccagtccaagcctgaagcctcccaggccaatcctcccaggcggcgtcctcactcctctcccagtcccaggcggcaggcgcagccggccaggcggctgcaggcacacgcgcactggcgcaccgcggcaccgcgcactcgcgcaccagcaggcagcagccggccagtcccactgctccacaccgccccgaccaaccttcacacctagccggcccaaccccacgcacggacgttgaatcaggctagtcctcccagtctcccactcccaggcagcagggcggcaggcgcaggcgcgcagccaccagccggccaagcgctaccgcctttcccctctcctcctctcttttcccctcccttttccagcacggggagcgacctgcgctgccgccacgatgccgaagcactaccgccctgcgggtaagaagaaggaagggaatgcggcaaagtacatcacgaggaccaaggcggtcaactacctgcaagttagcctcgcaatctttaggaagctatgcattctaaagggtgtctttccacgtcagccaaagaagaaggtggaagggaaccacaagacctactaccacacaaaggatattgcattcctcgctcatgaccctttgatcgagaagttcagggagattaaggtccatcgaaggaaggttaaaaaggctgttgctaagaaaaacagggatcttgcagacaggctgttgaatcggccaccaacttacaagcttgataggcttgtccttgaaaggtatccaacattcgttgatgctcttcgtgacttggatgactgccttacaatggtgcatctgtttgcggcattacctgctgttgacggtgaacgtgttgaggtcaaacgaatccataactgccgcaggttaagccatgaatgcttgacatttatttccgtgaagggcatatattatcaggctgaagttcaaggacaaaagatcacctggctaactccgcatgctcttcagcaagtattaactgatgatgttgatttcaatgtgatgctttcttttctagaattctatgagactcttctaggatttgtgaacttcaaaatctatcattcaataaatgtaaattatcctcctattctggatccacgtctggaagctttagctgttgagctctatgcattgtgccgatacatgtctgctggttccagaagaatgattgggaattcacaaactgacgaagtaatggaagataaggatgagaaaagtaaagctgaggaagtaattgaggaagagaaggttgtgaagaataaagcaagctcaaaagcagatgaatctgagttcagattagcacagcttcaacatcagctcccaaccaatgaacctggtgcactgatgaatcttgtagaagaatcaactgccgatgatgcagatgatgatgatactaaagattgtaaaggtttatttaagaacttaaagttctacttgagtcgagaggtgcctagggagtccctgttatttataattccagcatttggagggactgtttcatgggaaggagaaggagctccatttaaagaaatagacgaagatatcactcaccagctgaaaacttgcccaacacattagaatatattgaaggcgaggttgaagctcttgacgaagttattggtagccatgctgacttctgcgccctggtagcttctcggggcacagctaccgcttttctgaaagctggttgcacgcatggaaaaattgttaataggcccaactacagcttatcatcatcagatctgatagatattccaagcctagctcgaagtatcggaaatagatttatgacccagatttgggtaaatggcgggcggaaaatggcgggtgacgaagctcgaagtcatcttaagccggatgacgaagctgaagtataacaaatctgaagtatgacgaagctgaagcttgatagttgctacaatattctttcctgtaaaaattctggagagacttttgtaatattattatgtaaaaactcatgtaaatttgtacataccttgtaatatattttgtttccgctatctgtgtacaatctgctttgttgtggacgaaacttcttttttgagccgaaggcgaaaaacatattcccttcttttcgtacataacgaagcataaaaattttccttttt

SEQ ID NO: 4973 - DNA, 2846 bp, Zea Mays
attcagatatttcgggtactcagttaataataacctactctctgatgtctgatgtcgcaactcgcaactctagctcccagcctcccagtcttcccaggcggccggcggcgtcctaccagtccaagcctgaagcctcccaggccaatcctcccaggcggcgtcctcactcctctcccagtcccaggcggcaggcgcagccggccaggcggctgcaggcacacgcgcactggcgcaccgcggcaccgcgcactcgcgcaccagcaggcagcagccggccagtcccactgctccacaccgccccgaccaaccttcacacctagccggcccaaccccacgcacggacgttgaatcaggctagtcctcccagtctcccactcccaggcagcagggcggcaggcgcaggcgcgcagccaccagccggccaagcgctaccgcctttcccctctcctcctctcttttcccctcccttttccagcacggggagcgacctgcgctgccgccacgatgccgaagcactaccgccctgcgggtaagaagaaggaagggaatgcggcaaagtacatcacgaggaccaaggcggtcaactacctgcaagttagcctcgcaatctttaggaagctatgcattctaaagggtgtctttccacgtcagccaaagaagaaggtggaagggaaccacaagacctactaccacacaaaggatattgcattcctcgctcatgaccctttgatcgagaagttcagggagattaaggtccatcgaaggaaggttaaaaaggctgttgctaagaaaaacagggatcttgcagacaggctgttgaatcggccaccaacttacaagcttgataggcttgtccttgaaaggtatccaacattcgttgatgctcttcgtgacttggatgactgccttacaatggtgcatctgtttgcggcattacctgctgttgacggtgaacgtgttgaggtcaaacgaatccataactgccgcaggttaagccatgaatgcttgacatttatttccgtgaagggcatatattatcaggctgaagttcaaggacaaaagatcacctggctaactccgcatgctcttcagcaagtattaactgatgatgttgatttcaatgtgatgctttcttttctagaattctatgagactcttctaggatttgtgaacttcaaaatctatcattcaataaatgtaaattatcctcctattctggatccacgtctggaagctttagctgttgagctctatgcattgtgccgatacatgtctgctggttccagaagaatgattgggaattcacaaactgacgaagtaatggaagataaggatgagaaaagtaaagctgaggaagtaattgaggaagagaaggttgtgaagaataaagcaagctcaaaagcagatgaatctgagttcagattagcacagcttcaacatcagctcccaaccaatgaacctggtgcactgatgaatcttgtagaagaatcaactgccgatgatgcagatgatgatgatactaaagattgtaaaggtttatttaagaacttaaagttctacttgagtcgagaggtagggagtccctgttatttataattccagcatttggagggactgtttcatgggaaggagaaggagctccatttaaagaaatagacgaagatatcactcaccaggttgattccatttgcaataatttattacaccaaagtttaactatatagacggagacattgtgtaccatccctaaagtaagatgccactctaagtaccacgacagcaatgccatactagggcaatagttactacaatacaatttttgtatgtggctaactgttcatattttacactctaccatcatatgatcatatctagcgaagtaaaataaaatggcctgtggatttttttatgcttgctagtatccatattgtaataaaaaataggagtataatatcacatcctcacactataacagtttaaagaatgaattgctcaaacaactagaaaaatctgagcaggaaaagaaacaccttgaagcaagtcttaaaactgagatgcaaaataattcaaatttgcaaaaatccttgaaggagcttcaagagaaatgcctaagcttcggcagccgatgcgtgcagcggctgaaggatgtgtttcattctattggagccagctctgaaaaatttacactttcagctgaaaacttgcccaacacattagaatatattgaaggcgaggttgaagctcttgacgaagttattggtagccatgctgacttctgcgccctggtagcttctcggggcacagctaccgcttttctgaaagctggttgcacgcatggaaaaattgttaataggcccaactacagcttatcatcatcagatctgatagatattccaagcctagctcgaagtatcggaaatagatttatgacccagatttgggtaaatggcgggcggaaaatggcgggtgacgaagctcgaagtcatcttaagccggtaaaaagcttatatttgttacttttaccttcttcttgaaatttgcacctttcttattctgttctttaatactcgtaggatgacgaagctgaagtataacaaatctgaagtatgacgaagctgaagcttgatagttgctacaatattctttcctgtaaaaattctggagagacttttgtaatattattatgtaaaaactcatgtaaatttgtacataccttgtaatatattttgtttccgctatctgtgtacaatctgctttgttgtggacgaaacttcttttttgagccgaaggcgaaaaacatattcccttcttttcgtacataacgaagcataaaaattttccttttt

SEQ ID NO: 4974 - DNA, 2850 bp, Zea Mays
attcagatatttcgggtactcagttaataataacctactctctgatgtctgatgtcgcaactcgcaactctagctcccagcctcccagtcttcccaggcggccggcggcgtcctaccagtccaagcctgaagcctcccaggccaatcctcccaggcggcgtcctcactcctctcccagtcccaggcggcaggcgcagccggccaggcggctgcaggcacacgcgcactggcgcaccgcggcaccgcgcactcgcgcaccagcaggcagcagccggccagtcccactgctccacaccgccccgaccaaccttcacacctagccggcccaaccccacgcacggacgttgaatcaggctagtcctcccagtctcccactcccaggcagcagggcggcaggcgcaggcgcgcagccaccagccggccaagcgctaccgcctttcccctctcctcctctcttttcccctcccttttccagcacggggagcgacctgcgctgccgccacgatgccgaagcactaccgccctgcgggtaagaagaaggaagggaatgcggcaaagtacatcacgaggaccaaggcggtcaactacctgcaagttagcctcgcaatctttaggaagctatgcattctaaagggtgtctttccacgtcagccaaagaagaaggtggaagggaaccacaagacctactaccacacaaaggatattgcattcctcgctcatgaccctttgatcgagaagttcagggagattaaggtccatcgaaggaaggttaaaaaggctgttgctaagaaaaacagggatcttgcagacaggctgttgaatcggccaccaacttacaagcttgataggcttgtccttgaaaggtatccaacattcgttgatgctcttcgtgacttggatgactgccttacaatggtgcatctgtttgcggcattacctgctgttgacggtgaacgtgttgaggtcaaacgaatccataactgccgcaggttaagccatgaatgcttgacatttatttccgtgaagggcatatattatcaggctgaagttcaaggacaaaagatcacctggctaactccgcatgctcttcagcaagtattaactgatgatgttgatttcaatgtgatgctttcttttctagaattctatgagactcttctaggatttgtgaacttcaaaatctatcattcaataaatgtaaattatcctcctattctggatccacgtctggaagctttagctgttgagctctatgcattgtgccgatacatgtctgctggttccagaagaatgattgggaattcacaaactgacgaagtaatggaagataaggatgagaaaagtaaagctgaggaagtaattgaggaagagaaggttgtgaagaataaagcaagctcaaaagcagatgaatctgagttcagattagcacagcttcaacatcagctcccaaccaatgaacctggtgcactgatgaatcttgtagaagaatcaactgccgatgatgcagatgatgatgatactaaagattgtaaaggtttatttaagaacttaaagttctacttgagtcgagaggtgcctagggagtccctgttatttataattccagcatttggagggactgtttcatgggaaggagaaggagctccatttaaagaaatagacgaagatatcactcaccaggttgattccatttgcaataatttattacaccaaagtttaactatatagacggagacattgtgtaccatccctaaagtaagatgccactctaagtaccacgacagcaatgccatactagggcaatagttactacaatacaatttttgtatgtggctaactgttcatattttacactctaccatcatatgatcatatctagcgaagtaaaataaaatggcctgtggatttttttatgcttgctagtatccatattgtaataaaaaataggagtataatatcacatcctcacactataacagtttaaagaatgaattgctcaaacaactagaaaaatctgagcaggaaaagaaacaccttgaagcaagtcttaaaactgagatgcaaaataattcaaatttgcaaaaatccttgaaggagcttcaagagaaatgcctaagcttcggcagccgatgcgtgcagcggctgaaggatgtgtttcattctattggagccagctctgaaaaatttacactttcagctgaaaacttgcccaacacattagaatatattgaaggcgaggttgaagctcttgacgaagttattggtagccatgctgacttctgcgccctggtagcttctcggggcacagctaccgcttttctgaaagctggttgcacgcatggaaaaattgttaataggcccaactacagcttatcatcatcagatctgatagatattccaagcctagctcgaagtatcggaaatagatttatgacccagatttgggtaaatggcgggcggaaaatggcgggtgacgaagctcgaagtcatcttaagccggtaaaaagcttatatttgttacttttaccttcttcttgaaatttgcacctttcttattctgttctttaatactcgtaggatgacgaagctgaagtataacaaatctgaagtatgacgaagctgaagcttgatagttgctacaatattctttcctgtaaaaattctggagagacttttgtaatattattatgtaaaaactcatgtaaatttgtacataccttgtaatatattttgtttccgctatctgtgtacaatctgctttgttgtggacgaaacttcttttttgagccgaaggcgaaaaacatattcccttcttttcgtacataacgaagcataaaaattttccttttt

SEQ ID NO: 4975 - DNA, 3830 bp, Zea Mays
agaataccctcgccgccgcgaccgcctcccggagcaaggcgccgacggaggagaccgcgtccggagctgggcccatgtacgtgaaggtgagcatggatggcgcgccctacctcaggaaggtggacatcaagatgtactccagctacgaggacctctccctggcgctcgagaagatgttcagctgcttcatcgctgcctgtgattttaaaggtcaaagtggtctgcataaatcatcgagcaaagacagactgactaatggctcaaaggtggatgccctcaaagatcaggagtatgtccttacatatgaggataaggatgcagactggatgcttgtcggtgatcttccctgggagatcgagcttggcgcaagggcacccgacgctggtcctgctacagccggagatcggcctggacatcgacaagctccagatgttgccatcctttgaggcccagggcgcgtggctggtggaggcgtcgctggaggaccacgcaggcctcctcgccgccgtggcacaggccgacgtggtggtctcggccatgtccggggcgcacatccgcagccacaatcactccctgcagcataagctcctcaaggctatcaaggaggctgggaacatcaagggtttgtttggttagaaggggattgaagaaagcttcctttttaatccattttgttgattgagtcgcattcccgaatccatacttgaacatcaggatctcatatgcgaggtatcatctcgggacactggaaagactatggttgatgcttcattaggagagataatgaccacatgttagaagattacctagcaaaatgaagactggtacttaattattgttgtcacatgatgtttttactcgggagatctggaggttggcgaacgcccggggagaaactattcaaggaactattatttagtcaatttgtttcttttggagaaactttgcacagttgagggatataacttagtttttcaagcctgtccatctccagcagatggtttagttgggaaagaatcttatgctcaggtacaaattggtaggcaaattctaggcaaaggagttgggttaacatgggaagaggccaagctctagttatacatggttgttcagatgtgacagcaatgactaatgggacaaatgtcgagataggtccaaaaggccaagaaccaccatcaattagctctggcaatattagttttgttgttcgtgtattggctaagttattgcagatggcgcttgccttttgcttcagctgatcaagatctagaattcgaattgggccatgtgaagcatttcacatttcacgatctgcaaagtgcaacggacaattttaattccaagaatatattaggtcaaggaggttttggaattgtgtataaaggctgtttgagaaatggaactttagtggcagtgaagagattaaaagatcctgatgttaccggtgaagtccagtttcaaacagaagttgagttgattggccttgctgtgcacaggaatctcttgcgtttgtatgaattttgcatgacctctaaagaacgattgcttgtatatccatatatgctaaatggcagtgttgctgaccgcttgagaggaagctatgcattctaaagggtgtctttccacgtcagccaaagaagaaggtggaagggaaccacaagacctactaccacacaaaggatattgcattcctcgctcatgaccctttgatcgagaagttcagggagattaaggtccatcgaaggaaggttaaaaaggctgttgctaagaaaaacagggatcttgcagacaggctgttgaatcggccaccaacttacaagcttgataggcttgtccttgaaaggtatccaacattcgttgatgctcttcgtgacttggatgactgccttacaatggtgcatctgtttgcggcattacctgctgttgacggtgaacgtgttgaggtcaaacgaatccataactgccgcaggttaagccatgaatgcttgacatttatttccgtgaagggcatatattatcaggctgaagttcaaggacaaaagatcacctggctaactccgcatgctcttcagcaagtattaactgatgatgttgatttcaatgtgatgctttcttttctagaattctatgagactcttctaggatttgtgaacttcaaaatctatcattcaataaatgtaaattatcctcctattctggatccacgtctggaagctttagctgttgagctctatgcattgtgccgatacatgtctgctggttccagaagaatgattgggaattcacaaactgacgaagtaatggaagataaggatgagaaaagtaaagctgaggaagtaattgaggaagagaaggttgtgaagaataaagcaagctcaaaagcagatgaatctgagttcagattagcacagcttcaacatcagctcccaaccaatgaacctggtgcactgatgaatcttgtagaagaatcaactgccgatgatgcagatgatgatgatactaaagattgtaaaggtttatttaagaacttaaagttctacttgagtcgagaggtgcctagggagtccctgttatttataattccagcatttggagggactgtttcatgggaaggagaaggagctccatttaaagaaatagacgaagatatcactcaccaggttgattccatttgcaataatttattacaccaaagtttaactatatagacggagacattgtgtaccatccctaaagtaagatgccactctaagtaccacgacagcaatgccatactagggcaatagttactacaatacaatttttgtatgtggctaactgttcatattttacactctaccatcatatgatcatatctagcgaagtaaaataaaatggcctgtggatttttttatgcttgctagtatccatattgtaataaaaaataggagtataatatcacatcctcacactataacagtttaaagaatgaattgctcaaacaactagaaaaatctgagcaggaaaagaaacaccttgaagcaagtcttaaaactgagatgcaaaataattcaaatttgcaaaaatccttgaaggagcttcaagagaaatgcctaagcttcggcagccgatgcgtgcagcggctgaaggatgtgtttcattctattggagccagctctgaaaaatttacactttcagctgaaaacttgcccaacacattagaatatattgaaggcgaggttgaagctcttgacgaagttattggtagccatgctgacttctgcgccctggtagcttctcggggcacagctaccgcttttctgaaagctggttgcacgcatggaaaaattgttaataggcccaactacagcttatcatcatcagatctgatagatattccaagcctagctcgaagtatcggaaatagatttatgacccagatttgggtaaatggcgggcggaaaatggcgggtgacgaagctcgaagtcatcttaagccggtaaaaagcttatatttgttacttttaccttcttcttgaaatttgcacctttcttattctgttctttaatactcgtaggatgacgaagctgaagtataacaaatctgaagtatgacgaagctgaagcttgatagttgctacaatattctttcctgtaaaaattctggagagacttttgtaatattattatgtaaaaactcatgtaaatttgtacataccttgtaatatattttgtttccgctatctgtgtacaatctgctttgttgtggacgaaacttcttttttgagccgaaggcgaaaaacatattcccttcttttcgtacataacgaagcataaaaattttccttttt

SEQ ID NO: 4976 - DNA, 3826 bp, Zea Mays
agaataccctcgccgccgcgaccgcctcccggagcaaggcgccgacggaggagaccgcgtccggagctgggcccatgtacgtgaaggtgagcatggatggcgcgccctacctcaggaaggtggacatcaagatgtactccagctacgaggacctctccctggcgctcgagaagatgttcagctgcttcatcgctgcctgtgattttaaaggtcaaagtggtctgcataaatcatcgagcaaagacagactgactaatggctcaaaggtggatgccctcaaagatcaggagtatgtccttacatatgaggataaggatgcagactggatgcttgtcggtgatcttccctgggagatcgagcttggcgcaagggcacccgacgctggtcctgctacagccggagatcggcctggacatcgacaagctccagatgttgccatcctttgaggcccagggcgcgtggctggtggaggcgtcgctggaggaccacgcaggcctcctcgccgccgtggcacaggccgacgtggtggtctcggccatgtccggggcgcacatccgcagccacaatcactccctgcagcataagctcctcaaggctatcaaggaggctgggaacatcaagggtttgtttggttagaaggggattgaagaaagcttcctttttaatccattttgttgattgagtcgcattcccgaatccatacttgaacatcaggatctcatatgcgaggtatcatctcgggacactggaaagactatggttgatgcttcattaggagagataatgaccacatgttagaagattacctagcaaaatgaagactggtacttaattattgttgtcacatgatgtttttactcgggagatctggaggttggcgaacgcccggggagaaactattcaaggaactattatttagtcaatttgtttcttttggagaaactttgcacagttgagggatataacttagtttttcaagcctgtccatctccagcagatggtttagttgggaaagaatcttatgctcaggtacaaattggtaggcaaattctaggcaaaggagttgggttaacatgggaagaggccaagctctagttatacatggttgttcagatgtgacagcaatgactaatgggacaaatgtcgagataggtccaaaaggccaagaaccaccatcaattagctctggcaatattagttttgttgttcgtgtattggctaagttattgcagatggcgcttgccttttgcttcagctgatcaagatctagaattcgaattgggccatgtgaagcatttcacatttcacgatctgcaaagtgcaacggacaattttaattccaagaatatattaggtcaaggaggttttggaattgtgtataaaggctgtttgagaaatggaactttagtggcagtgaagagattaaaagatcctgatgttaccggtgaagtccagtttcaaacagaagttgagttgattggccttgctgtgcacaggaatctcttgcgtttgtatgaattttgcatgacctctaaagaacgattgcttgtatatccatatatgctaaatggcagtgttgctgaccgcttgagaggaagctatgcattctaaagggtgtctttccacgtcagccaaagaagaaggtggaagggaaccacaagacctactaccacacaaaggatattgcattcctcgctcatgaccctttgatcgagaagttcagggagattaaggtccatcgaaggaaggttaaaaaggctgttgctaagaaaaacagggatcttgcagacaggctgttgaatcggccaccaacttacaagcttgataggcttgtccttgaaaggtatccaacattcgttgatgctcttcgtgacttggatgactgccttacaatggtgcatctgtttgcggcattacctgctgttgacggtgaacgtgttgaggtcaaacgaatccataactgccgcaggttaagccatgaatgcttgacatttatttccgtgaagggcatatattatcaggctgaagttcaaggacaaaagatcacctggctaactccgcatgctcttcagcaagtattaactgatgatgttgatttcaatgtgatgctttcttttctagaattctatgagactcttctaggatttgtgaacttcaaaatctatcattcaataaatgtaaattatcctcctattctggatccacgtctggaagctttagctgttgagctctatgcattgtgccgatacatgtctgctggttccagaagaatgattgggaattcacaaactgacgaagtaatggaagataaggatgagaaaagtaaagctgaggaagtaattgaggaagagaaggttgtgaagaataaagcaagctcaaaagcagatgaatctgagttcagattagcacagcttcaacatcagctcccaaccaatgaacctggtgcactgatgaatcttgtagaagaatcaactgccgatgatgcagatgatgatgatactaaagattgtaaaggtttatttaagaacttaaagttctacttgagtcgagaggtagggagtccctgttatttataattccagcatttggagggactgtttcatgggaaggagaaggagctccatttaaagaaatagacgaagatatcactcaccaggttgattccatttgcaataatttattacaccaaagtttaactatatagacggagacattgtgtaccatccctaaagtaagatgccactctaagtaccacgacagcaatgccatactagggcaatagttactacaatacaatttttgtatgtggctaactgttcatattttacactctaccatcatatgatcatatctagcgaagtaaaataaaatggcctgtggatttttttatgcttgctagtatccatattgtaataaaaaataggagtataatatcacatcctcacactataacagtttaaagaatgaattgctcaaacaactagaaaaatctgagcaggaaaagaaacaccttgaagcaagtcttaaaactgagatgcaaaataattcaaatttgcaaaaatccttgaaggagcttcaagagaaatgcctaagcttcggcagccgatgcgtgcagcggctgaaggatgtgtttcattctattggagccagctctgaaaaatttacactttcagctgaaaacttgcccaacacattagaatatattgaaggcgaggttgaagctcttgacgaagttattggtagccatgctgacttctgcgccctggtagcttctcggggcacagctaccgcttttctgaaagctggttgcacgcatggaaaaattgttaataggcccaactacagcttatcatcatcagatctgatagatattccaagcctagctcgaagtatcggaaatagatttatgacccagatttgggtaaatggcgggcggaaaatggcgggtgacgaagctcgaagtcatcttaagccggtaaaaagcttatatttgttacttttaccttcttcttgaaatttgcacctttcttattctgttctttaatactcgtaggatgacgaagctgaagtataacaaatctgaagtatgacgaagctgaagcttgatagttgctacaatattctttcctgtaaaaattctggagagacttttgtaatattattatgtaaaaactcatgtaaatttgtacataccttgtaatatattttgtttccgctatctgtgtacaatctgctttgttgtggacgaaacttcttttttgagccgaaggcgaaaaacatattcccttcttttcgtacataacgaagcataaaaattttccttttt

SEQ ID NO: 4977 - DNA, 2792 bp, Zea Mays
ctacgaggacctctccctggcgctcgagaagatgttcagctgcttcatcgctgcctgtgattttaaaggtcaaagtggtctgcataaatcatcgagcaaagacagactgactaatggctcaaaggtggatgccctcaaagatcaggagtatgtccttacatatgaggataaggatgcagactggatgcttgtcggtgatcttccctgggagataggatcgagcttggcgcaagggcacccgacgctggtcctgctacagccggagatcggcctggacatcgacaagctccagatgttgccatcctttgaggcccagggcgcgtggctggtggaggcgtcgctggaggaccacgcaggcctcctcgccgccgtggcacaggccgacgtggtggtctcggccatgtccggggcgcacatccgcagccacaatcactccctgcagcataagctcctcaaggctatcaaggaggctgggaacatcaagggtttgtttggttagaaggggattgaagaaagcttcctttttaatccattttgttgattgagtcgcattcccgaatccatacttgaacatcaggatctcatatgcgaggtatcatctcgggacactggaaagactatggttgatgcttcattaggagagataatgaccacatgttagaagattacctagcaaaatgaagactggtacttaattattgttgtcacatgatgtttttactcgggagatctggaggttggcgaacgcccggggagaaactattcaaggaactattatttagtcaatttgtttcttttggagaaactttgcacagttgagggatataacttagtttttcaagcctgtccatctccagcagatggtttagttgggaaagaatcttatgctcaggtacaaattggtaggcaaattctaggcaaaggagttgggttaacatgggaagaggccaagctctagttatacatggttgttcagatgtgacagcaatgactaatgggacaaatgtcgagataggtccaaaaggccaagaaccaccatcaattagctctggcaatattagttttgttgttcgtgtattggctaagttattgcagatggcgcttgccttttgcttcagctgatcaagatctagaattcgaattgggccatgtgaagcatttcacatttcacgatctgcaaagtgcaacggacaattttaattccaagaatatattaggtcaaggaggttttggaattgtgtataaaggctgtttgagaaatggaactttagtggcagtgaagagattaaaagatcctgatgttaccggtgaagtccagtttcaaacagaagttgagttgattggccttgctgtgcacaggaatctcttgcgtttgtatgaattttgcatgacctctaaagaacgattgcttgtatatccatatatgctaaatggcagtgttgctgaccgcttgagaggaagctatgcattctaaagggtgtctttccacgtcagccaaagaagaaggtggaagggaaccacaagacctactaccacacaaaggatattgcattcctcgctcatgaccctttgatcgagaagttcagggagattaaggtccatcgaaggaaggttaaaaaggctgttgctaagaaaaacagggatcttgcagacaggctgttgaatcggccaccaacttacaagcttgataggcttgtccttgaaaggtatccaacattcgttgatgctcttcgtgacttggatgactgccttacaatggtgcatctgtttgcggcattacctgctgttgacggtgaacgtgttgaggtcaaacgaatccataactgccgcaggttaagccatgaatgcttgacatttatttccgtgaagggcatatattatcaggctgaagttcaaggacaaaagatcacctggctaactccgcatgctcttcagcaagtattaactgatgatgttgatttcaatgtgatgctttcttttctagaattctatgagactcttctaggatttgtgaacttcaaaatctatcattcaataaatgtaaattatcctcctattctggatccacgtctggaagctttagctgttgagctctatgcattgtgccgatacatgtctgctggttccagaagaatgattgggaattcacaaactgacgaagtaatggaagataaggatgagaaaagtaaagctgaggaagtaattgaggaagagaaggttgtgaagaataaagcaagctcaaaagcagatgaatctgagttcagattagcacagcttcaacatcagctcccaaccaatgaacctggtgcactgatgaatcttgtagaagaatcaactgccgatgatgcagatgatgatgatactaaagattgtaaaggtttatttaagaacttaaagttctacttgagtcgagaggtagggagtccctgttatttataattccagcatttggagggactgtttcatgggaaggagaaggagctccatttaaagaaatagacgaagatatcactcaccaggatgacgaagctgaagtataacaaatctgaagtatgacgaagctgaagcttgatagttgctacaatattctttcctgtaaaaattctggagagacttttgtaatattattatgtaaaaactcatgtaaatttgtacataccttgtaatatattttgtttccgctatctgtgtacaatctgctttgttgtggacgaaacttcttttttgagccgaaggcgaaaaacatattcccttcttttcgtacataacgaagcataaaaattttccttttt

SEQ ID NO: 4978 - DNA, 3653 bp, Zea Mays
cctctccctggcgctcgagaagatgttcagctgcttcatcgctgtggtctgcataaatcatcgagcaaagacagactgactaatggctcaaaggtggatgccctcaaagatcaggagtatgtccttacatatgaggataaggatgcagactggatgcttgtcggtgatcttccctgggagatcgagcttggcgcaagggcacccgacgctggtcctgctacagccggagatcggcctggacatcgacaagctccagatgttgccatcctttgaggcccagggcgcgtggctggtggaggcgtcgctggaggaccacgcaggcctcctcgccgccgtggcacaggccgacgtggtggtctcggccatgtccggggcgcacatccgcagccacaatcactccctgcagcataagctcctcaaggctatcaaggaggctgggaacatcaagggtttgtttggttagaaggggattgaagaaagcttcctttttaatccattttgttgattgagtcgcattcccgaatccatacttgaacatcaggatctcatatgcgaggtatcatctcgggacactggaaagactatggttgatgcttcattaggagagataatgaccacatgttagaagattacctagcaaaatgaagactggtacttaattattgttgtcacatgatgtttttactcgggagatctggaggttggcgaacgcccggggagaaactattcaaggaactattatttagtcaatttgtttcttttggagaaactttgcacagttgagggatataacttagtttttcaagcctgtccatctccagcagatggtttagttgggaaagaatcttatgctcaggtacaaattggtaggcaaattctaggcaaaggagttgggttaacatgggaagaggccaagctctagttatacatggttgttcagatgtgacagcaatgactaatgggacaaatgtcgagataggtccaaaaggccaagaaccaccatcaattagctctggcaatattagttttgttgttcgtgtattggctaagttattgcagatggcgcttgccttttgcttcagctgatcaagatctagaattcgaattgggccatgtgaagcatttcacatttcacgatctgcaaagtgcaacggacaattttaattccaagaatatattaggtcaaggaggttttggaattgtgtataaaggctgtttgagaaatggaactttagtggcagtgaagagattaaaagatcctgatgttaccggtgaagtccagtttcaaacagaagttgagttgattggccttgctgtgcacaggaatctcttgcgtttgtatgaattttgcatgacctctaaagaacgattgcttgtatatccatatatgctaaatggcagtgttgctgaccgcttgagaggaagctatgcattctaaagggtgtctttccacgtcagccaaagaagaaggtggaagggaaccacaagacctactaccacacaaaggatattgcattcctcgctcatgaccctttgatcgagaagttcagggagattaaggtccatcgaaggaaggttaaaaaggctgttgctaagaaaaacagggatcttgcagacaggctgttgaatcggccaccaacttacaagcttgataggcttgtccttgaaaggtatccaacattcgttgatgctcttcgtgacttggatgactgccttacaatggtgcatctgtttgcggcattacctgctgttgacggtgaacgtgttgaggtcaaacgaatccataactgccgcaggttaagccatgaatgcttgacatttatttccgtgaagggcatatattatcaggctgaagttcaaggacaaaagatcacctggctaactccgcatgctcttcagcaagtattaactgatgatgttgatttcaatgtgatgctttcttttctagaattctatgagactcttctaggatttgtgaacttcaaaatctatcattcaataaatgtaaattatcctcctattctggatccacgtctggaagctttagctgttgagctctatgcattgtgccgatacatgtctgctggttccagaagaatgattgggaattcacaaactgacgaagtaatggaagataaggatgagaaaagtaaagctgaggaagtaattgaggaagagaaggttgtgaagaataaagcaagctcaaaagcagatgaatctgagttcagattagcacagcttcaacatcagctcccaaccaatgaacctggtgcactgatgaatcttgtagaagaatcaactgccgatgatgcagatgatgatgatactaaagattgtaaaggtttatttaagaacttaaagttctacttgagtcgagaggtagggagtccctgttatttataattccagcatttggagggactgtttcatgggaaggagaaggagctccatttaaagaaatagacgaagatatcactcaccaggttgattccatttgcaataatttattacaccaaagtttaactatatagacggagacattgtgtaccatccctaaagtaagatgccactctaagtaccacgacagcaatgccatactagggcaatagttactacaatacaatttttgtatgtggctaactgttcatattttacactctaccatcatatgatcatatctagcgaagtaaaataaaatggcctgtggatttttttatgcttgctagtatccatattgtaataaaaaataggagtataatatcacatcctcacactataacagtttaaagaatgaattgctcaaacaactagaaaaatctgagcaggaaaagaaacaccttgaagcaagtcttaaaactgagatgcaaaataattcaaatttgcaaaaatccttgaaggagcttcaagagaaatgcctaagcttcggcagccgatgcgtgcagcggctgaaggatgtgtttcattctattggagccagctctgaaaaatttacactttcagctgaaaacttgcccaacacattagaatatattgaaggcgaggttgaagctcttgacgaagttattggtagccatgctgacttctgcgccctggtagcttctcggggcacagctaccgcttttctgaaagctggttgcacgcatggaaaaattgttaataggcccaactacagcttatcatcatcagatctgatagatattccaagcctagctcgaagtatcggaaatagatttatgacccagatttgggtaaatggcgggcggaaaatggcgggtgacgaagctcgaagtcatcttaagccggtaaaaagcttatatttgttacttttaccttcttcttgaaatttgcacctttcttattctgttctttaatactcgtaggatgacgaagctgaagtataacaaatctgaagtatgacgaagctgaagcttgatagttgctacaatattctttcctgtaaaaattctggagagacttttgtaatattattatgtaaaaactcatgtaaatttgtacataccttgtaatatattttgtttccgctatctgtgtacaatctgctttgttgtggacgaaacttcttttttgagccgaaggcgaaaaacatattcccttcttttcgtacataacgaagcataaaaattttccttttt

SEQ ID NO: 4979 - DNA, 3144 bp, Zea Mays
ctctccctggcgctcgagaagatgttcagctgcttcatcgctgtggtctgcataaatcatcgagcaaagacagactgactaatggctcaaaggtggatgccctcaaagatcaggagtatgtccttacatatgaggataaggatgcagactggatgcttgtcggtgatcttccctgggagataggatcgagcttggcgcaagggcacccgacgctggtcctgctacagccggagatcggcctggacatcgacaagctccagatgttgccatcctttgaggcccagggcgcgtggctggtggaggcgtcgctggaggaccacgcaggcctcctcgccgccgtggcacaggccgacgtggtggtctcggccatgtccggggcgcacatccgcagccacaatcactccctgcagcataagctcctcaaggctatcaaggaggctgggaacatcaagggtttgtttggttagaaggggattgaagaaagcttcctttttaatccattttgttgattgagtcgcattcccgaatccatacttgaacatcaggatctcatatgcgaggtatcatctcgggacactggaaagactatggttgatgcttcattaggagagataatgaccacatgttagaagattacctagcaaaatgaagactggtacttaattattgttgtcacatgatgtttttactcgggagatctggaggttggcgaacgcccggggagaaactattcaaggaactattatttagtcaatttgtttcttttggagaaactttgcacagttgagggatataacttagtttttcaagcctgtccatctccagcagatggtttagttgggaaagaatcttatgctcaggtacaaattggtaggcaaattctaggcaaaggagttgggttaacatgggaagaggccaagctctagttatacatggttgttcagatgtgacagcaatgactaatgggacaaatgtcgagataggtccaaaaggccaagaaccaccatcaattagctctggcaatattagttttgttgttcgtgtattggctaagttattgcagatggcgcttgccttttgcttcagctgatcaagatctagaattcgaattgggccatgtgaagcatttcacatttcacgatctgcaaagtgcaacggacaattttaattccaagaatatattaggtcaaggaggttttggaattgtgtataaaggctgtttgagaaatggaactttagtggcagtgaagagattaaaagatcctgatgttaccggtgaagtccagtttcaaacagaagttgagttgattggccttgctgtgcacaggaatctcttgcgtttgtatgaattttgcatgacctctaaagaacgattgcttgtatatccatatatgctaaatggcagtgttgctgaccgcttgagaggaagctatgcattctaaagggtgtctttccacgtcagccaaagaagaaggtggaagggaaccacaagacctactaccacacaaaggatattgcattcctcgctcatgaccctttgatcgagaagttcagggagattaaggtccatcgaaggaaggttaaaaaggctgttgctaagaaaaacagggatcttgcagacaggctgttgaatcggccaccaacttacaagcttgataggcttgtccttgaaaggtatccaacattcgttgatgctcttcgtgacttggatgactgccttacaatggtgcatctgtttgcggcattacctgctgttgacggtgaacgtgttgaggtcaaacgaatccataactgccgcaggttaagccatgaatgcttgacatttatttccgtgaagggcatatattatcaggctgaagttcaaggacaaaagatcacctggctaactccgcatgctcttcagcaagtattaactgatgatgttgatttcaatgtgatgctttcttttctagaattctatgagactcttctaggatttgtgaacttcaaaatctatcattcaataaatgtaaattatcctcctattctggatccacgtctggaagctttagctgttgagctctatgcattgtgccgatacatgtctgctggttccagaagaatgattgggaattcacaaactgacgaagtaatggaagataaggatgagaaaagtaaagctgaggaagtaattgaggaagagaaggttgtgaagaataaagcaagctcaaaagcagatgaatctgagttcagattagcacagcttcaacatcagctcccaaccaatgaacctggtgcactgatgaatcttgtagaagaatcaactgccgatgatgcagatgatgatgatactaaagattgtaaaggtttatttaagaacttaaagttctacttgagtcgagaggtgcctagggagtccctgttatttataattccagcatttggagggactgtttcatgggaaggagaaggagctccatttaaagaaatagacgaagatatcactcaccagctgaaaacttgcccaacacattagaatatattgaaggcgaggttgaagctcttgacgaagttattggtagccatgctgacttctgcgccctggtagcttctcggggcacagctaccgcttttctgaaagctggttgcacgcatggaaaaattgttaataggcccaactacagcttatcatcatcagatctgatagatattccaagcctagctcgaagtatcggaaatagatttatgacccagatttgggtaaatggcgggcggaaaatggcgggtgacgaagctcgaagtcatcttaagccggtaaaaagcttatatttgttacttttaccttcttcttgaaatttgcacctttcttattctgttctttaatactcgtaggatgacgaagctgaagtataacaaatctgaagtatgacgaagctgaagcttgatagttgctacaatattctttcctgtaaaaattctggagagacttttgtaatattattatgtaaaaactcatgtaaatttgtacataccttgtaatatattttgtttccgctatctgtgtacaatctgctttgttgtggacgaaacttcttttttgagccgaaggcgaaaaacatattcccttcttttcgtacataacgaagcataaaaattttccttttt

SEQ ID NO: 4980 - DNA, 1795 bp, Zea Mays
cttgtatatccatatatgctaaatggcagtgttgctgaccgcttgagaggaagctatgcattctaaagggtgtctttccacgtcagccaaagaagaaggtggaagggaaccacaagacctactaccacacaaaggatattgcattcctcgctcatgaccctttgatcgagaagttcagggagattaaggtccatcgaaggaaggttaaaaaggctgttgctaagaaaaacagggatcttgcagacaggctgttgaatcggccaccaacttacaagcttgataggcttgtccttgaaaggtatccaacattcgttgatgctcttcgtgacttggatgactgccttacaatggtgcatctgtttgcggcattacctgctgttgacggtgaacgtgttgaggtcaaacgaatccataactgccgcagcggatatttattattttcttatcatatgatgaaccatgaatgcttgacatttatttccgtgaagggcatatattatcaggctgaagttcaaggacaaaagatcacctggctaactccgcatgctcttcagcaagtattaactgatgatgttgatttcaatgtgatgctttcttttctagaattctatgagactcttctaggatttgtgaacttcaaaatctatcattcaataaatgtaaattatcctcctattctggatccacgtctggaagctttagctgttgagctctatgcattgtgccgatacatgtctgctggttccagaagaatgattgggaattcacaaactgacgaagtaatggaagataaggatgagaaaagtaaagctgaggaagtaattgaggaagagaaggttgtgaagaataaagcaagctcaaaagcagatgaatctgagttcagattagcacagcttcaacatcagctcccaaccaatgaacctggtgcactgatgaatcttgtagaagaatcaactgccgatgatgcagatgatgatgatactaaagattgtaaaggtttatttaagaacttaaagttctacttgagtcgagaggtgcctagggagtccctgttatttataattccagcatttggagggactgtttcatgggaaggagaaggagctccatttaaagaaatagacgaagatatcactcaccagctgaaaacttgcccaacacattagaatatattgaaggcgaggttgaagctcttgacgaagttattggtagccatgctgacttctgcgccctggtagcttctcggggcacagctaccgcttttctgaaagctggttgcacgcatggaaaaattgttaataggcccaactacagcttatcatcatcagatctgatagatattccaagcctagctcgaagtatcggaaatagatttatgacccagatttgggtaaatggcgggcggaaaatggcgggtgacgaagctcgaagtcatcttaagccggtaaaaagcttatatttgttacttttaccttcttcttgaaatttgcacctttcttattctgttctttaatactcgtaggatgacgaagctgaagtataacaaatctgaagtatgacgaagctgaagcttgatagttgctacaatattctttcctgtaaaaattctggagagacttttgtaatattattatgtaaaaactcatgtaaatttgtacataccttgtaatatattttgtttccgctatctgtgtacaatctgctttgttgtggacgaaacttcttttttgagccgaaggcgaaaaacatattcccttcttttcgtacataacgaagcataaaaattttccttttt

SEQ ID NO: 4981 - DNA, 1786 bp, Zea Mays
atatccatatatgctaaatggcagtgttgctgaccgcttgagaggaagctatgcattctaaagggtgtctttccacgtcagccaaagaagaaggtggaagggaaccacaagacctactaccacacaaaggatattgcattcctcgctcatgaccctttgatcgagaagttcagggagattaaggtccatcgaaggaaggttaaaaaggctgttgctaagaaaaacagggatcttgcagacaggctgttgaatcggccaccaacttacaagcttgataggcttgtccttgaaaggtatccaacattcgttgatgctcttcgtgacttggatgactgccttacaatggtgcatctgtttgcggcattacctgctgttgacggtgaacgtgttgaggtcaaacgaatccataactgccgcagcggatatttattattttcttatcatatgatgaaccatgaatgcttgacatttatttccgtgaagggcatatattatcaggctgaagttcaaggacaaaagatcacctggctaactccgcatgctcttcagcaagtattaactgatgatgttgatttcaatgtgatgctttcttttctagaattctatgagactcttctaggatttgtgaacttcaaaatctatcattcaataaatgtaaattatcctcctattctggatccacgtctggaagctttagctgttgagctctatgcattgtgccgatacatgtctgctggttccagaagaatgattgggaattcacaaactgacgaagtaatggaagataaggatgagaaaagtaaagctgaggaagtaattgaggaagagaaggttgtgaagaataaagcaagctcaaaagcagatgaatctgagttcagattagcacagcttcaacatcagctcccaaccaatgaacctggtgcactgatgaatcttgtagaagaatcaactgccgatgatgcagatgatgatgatactaaagattgtaaaggtttatttaagaacttaaagttctacttgagtcgagaggtagggagtccctgttatttataattccagcatttggagggactgtttcatgggaaggagaaggagctccatttaaagaaatagacgaagatatcactcaccagctgaaaacttgcccaacacattagaatatattgaaggcgaggttgaagctcttgacgaagttattggtagccatgctgacttctgcgccctggtagcttctcggggcacagctaccgcttttctgaaagctggttgcacgcatggaaaaattgttaataggcccaactacagcttatcatcatcagatctgatagatattccaagcctagctcgaagtatcggaaatagatttatgacccagatttgggtaaatggcgggcggaaaatggcgggtgacgaagctcgaagtcatcttaagccggtaaaaagcttatatttgttacttttaccttcttcttgaaatttgcacctttcttattctgttctttaatactcgtaggatgacgaagctgaagtataacaaatctgaagtatgacgaagctgaagcttgatagttgctacaatattctttcctgtaaaaattctggagagacttttgtaatattattatgtaaaaactcatgtaaatttgtacataccttgtaatatattttgtttccgctatctgtgtacaatctgctttgttgtggacgaaacttcttttttgagccgaaggcgaaaaacatattcccttcttttcgtacataacgaagcataaaaattttccttttt

SEQ ID NO: 4982 - DNA, 2147 bp, Zea Mays
ctcctctgtcgctggacccccctcccttccgtctcatccgcctccgcccgccggcatataaaccaaaaccctaaaacccatctcctcctctcttttcccctcccttttccagcacggggagcgacctgcgccgccgccacgatgccgaagcactaccgccctgcgggtaagaagaaggaagggaatgcggcaaagtacatcacgaggaccaaggcggtcaactacctgcaagttagcctcgcaatctttagctatgcattctaaagggtgtctttccacgtcagccaaagaagaaggtggaagggaaccacaagacctactaccacacaaaggatattgcattcctcgctcatgaccctttgatcgagaagttcagggagattaaggtccatcgaaggaaggttaaaaaggctgttgctaagaaaaacagggatcttgcagacaggctgttgaatcggccaccaacttacaagcttgataggcttgtccttgaaaggtatccaacattcgttgatgctcttcgtgacttggatgactgccttacaatggtgcatctgtttgcggcattacctgctgttgacggtgaacgtgttgaggtcaaacgaatccataactgccgcaggttaagccatgaatggcaagcatacatatcccgaacccattctctgaggaagacatttatttccgtgaagggcatatattatcaggctgaagttcaaggacaaaagatcacctggctaactccgcatgctcttcagcaagtattaactgatgatgttgatttcaatgtgatgctttcttttctagaattctatgagactcttctaggatttgtgaacttcaaactctatcattcaataaatgtaaattatcctcctattctggatccacgtctggaagctttagctgctgagctctatgcattgtgccgatacatgtctgctggttccagaagaatgattgggaattcacaaactgacgaagtaatggaagataaggatgagaaaagtaaagctgaggaagtaattaaggaagagaaggttgtgaagaataaagcaagctcaaaagcagatgaatctgagctcagattagcacagcttcaacatcagctcccaaccaatgaacctggtgcactgatgaatcttgtagaagaatcaactgccgatgatgcagatgatgatgatactaaagattgtaaaggtttatttaagaacttaaagttctacttgagtcgagaggtgcctagggagtccctgttatttataattccagcgtttggagggactgtttcatgggaaggagaaggagctccatttaaagaaatagacgaagatatcactcaccagattgttgataggccgacacaaagccatgttttcctctccagggattatgttcaaccacagtgggtctttgattgtgtaaatgctcgtatcatattgccaacagaaggttatcttgttggaagagtacctccaccacatttgtctccttttgtggacaatgatgccgagggctacatgcctgagtatgcagagacaataaagaggctccaagctgctgctcgcaatgaggtgttgcctcttccaggtattggtgatgaagatctagacaattcactggtagcagcaatgatggatcgaacagcttctaacgaagctgctgaaaagaagaggaagctggagatgctagagaagcaatacatcgatgaactgaagaaggaaattgatggcgttgctttctctagtttgtcaaacaaggaagcagataaatcaccgaatgcaaaagatgatactcagtcagatcgtgaggaggatgccagtaaacaagaggaggatgatgatgatgatattggtactgctctcatgtctcgcaagcagagaggcctttataaggctatgaagatgggcaaagaaaagaaaaaggagaaagttgagctactcaagaagagaaaaaagaacgcggattctggcgcttcttccaagaagcggcactgatgtgtcacaaatcttcatcgcattgggttaataattttatgcttgcactgggttggcttggcgtttgcagagaagacacgacgagccacggcatttgcttgacttgctggtataggcgcttgtcttatactcttatctggatatttgtca

SEQ ID NO: 4983 - DNA, 2091 bp, Zea Mays
catataaaccaaaaccctaaaacccatctcctcctctcttttcccctcccttttccagcacggggagcgacctgcgccgccgccacgatgccgaagcactaccgccctgcgaagaaggaagggaatgcggcaaagtacatcacgaggaccaaggcggtcaactacctgcaagttagcctcgcaatctttaggaagctatgcattctaaagggtgtctttccacgtcagccaaagaagaaggtggaagggaaccacaagacctactaccacacaaaggatattgcattcctcgctcatgaccctttgatcgagaagttcagggagattaaggtccatcgaaggaaggttaaaaaggctgttgctaagaaaaacagggatcttgcagacaggctgttgaatcggccaccaacttacaagcttgataggcttgtccttgaaaggtatccaacattcgttgatgctcttcgtgacttggatgactgccttacaatggtgcatctgtttgcggcattacctgctgttgacggtgaacgtgttgaggtcaaacgaatccataactgccgcaggttaagccatgaatggcaagcatacatatcccgaacccattctctgaggaagacatttatttccgtgaagggcatatattatcaggctgaagttcaaggacaaaagatcacctggctaactccgcatgctcttcagcaagtattaactgatgatgttgatttcaatgtgatgctttcttttctagaattctatgagactcttctaggatttgtgaacttcaaactctatcattcaataaatgtaaattatcctcctattctggatccacgtctggaagctttagctgctgagctctatgcattgtgccgatacatgtctgctggttccagaagaatgattgggaattcacaaactgacgaagtaatggaagataaggatgagaaaagtaaagctgaggaagtaattaaggaagagaaggttgtgaagaataaagcaagctcaaaagcagatgaatctgagctcagattagcacagcttcaacatcagctcccaaccaatgaacctggtgcactgatgaatcttgtagaagaatcaactgccgatgatgcagatgatgatgatactaaagattgtaaaggtttatttaagaacttaaagttctacttgagtcgagaggtgcctagggagtccctgttatttataattccagcgtttggagggactgtttcatgggaaggagaaggagctccatttaaagaaatagacgaagatatcactcaccagattgttgataggccgacacaaagccatgttttcctctccagggattatgttcaaccacagtgggtctttgattgtgtaaatgctcgtatcatattgccaacagaaggttatcttgttggaagagtacctccaccacatttgtctccttttgtggacaatgatgccgagggctacatgcctgagtatgcagagacaataaagaggctccaagctgctgctcgcaatgaggtgttgcctcttccaggtattggtgatgaagatctagacaattcactggtagcagcaatgatggatcgaacagcttctaacgaagctgctgaaaagaagaggaagctggagatgctagagaagcaatacatcgatgaactgaagaaggaaattgatggcgttgctttctctagtttgtcaaacaaggaagcagataaatcaccgaatgcaaaagatgatactcagtcagatcgtgaggaggatgccagtaaacaagaggaggatgatgatgatgatattggtactgctctcatgtctcgcaagcagagaggcctttataaggctatgaagatgggcaaagaaaagaaaaaggagaaagttgagctactcaagaagagaaaaaagaacgcggattctggcgcttcttccaagaagcggcactgatgtgtcacaaatcttcatcgcattgggttaataattttatgcttgcactgggttggcttggcgtttgcagagaagacacgacgagccacggcatttgcttgacttgctggtataggcgcttgtcttatactcttatctggatatttgtca

SEQ ID NO: 4984 - DNA, 2414 bp, Zea Mays
catataaaccaaaaccctaaaacccatctcctcctctcttttcccctcccttttccagcacggggagcgacctgcgccgccgccacgatgccgaagcactaccgccctgcgggtaagaagaaggaagggaatgcggcaaagtacatcacgaggaccaaggcggtcaactacctgcaagttagcctcgcaatctttaggaagctatgcattctaaagggtgtctttccacgtcagccaaagaagaaggtggaagggaaccacaagacctactaccacacaaaggatattgcattcctcgctcatgaccctttgatcgagaagttcagggagattaaggtccatcgaaggaaggttaaaaaggctgttgctaagaaaaacagggatcttgcagacaggctgttgaatcggccaccaacttacaagcttgataggcttgtccttgaaaggtatccaacattcgttgatgctcttcgtgacttggatgactgccttacaatggtgcatctgtttgcggcattacctgctgttgacggtgaacgtgttgaggtcaaacgaatccataactgccgcaggttaagccatgaatggcaagcatacatatcccgaacccattctctgaggaagacatttatttccgtgaagggcatatattatcaggctgaagttcaaggacaaaagatcacctggctaactccgcatgctcttcagcaagtattaactgatgatgttgatttcaatgtgatgctttcttttctagaattctatgagactcttctaggatttgtgaacttcaaactctatcattcaataaatgtaaattatcctcctattctggatccacgtctggaagctttagctgctgagctctatgcattgtgccgatacatgtctgctggttccagaagaatgattgggaattcacaaactgacgaagtaatggaagataaggatgagaaaagtaaagctgaggaagtaattaaggaagagaaggttgtgaagaataaagcaagctcaaaagcagatgaatctgagctcagattagcacagcttcaacatcagctcccaaccaatgaacctggtgcactgatgaatcttgtagaagaatcaactgccgatgatgcagatgatgatgatactaaagattgtaaaggtttatttaagaacttaaagttctacttgagtcgagaggtgcctagggagtccctgttatttataattccagcgtttggagggactgtttcatgggaaggagaaggagctccatttaaagaaatagacgaagatatcactcaccagattgttgataggccgacacaaagccatgttttcctctccagggattatgttcaaccacagtgggtctttgattgtgtaaatgctcgtatcatattgccaacagaaggttatcttgttggaagagtacctccaccacatttgtctccttttgtggacaatgatgccgagggctacatgcctgagtatgcagagacaataaagaggctccaagctgctgctcgcaatgaggtgttgcctcttccaggtattggtgatgaagatctagacaattcactggtagcagcaatgatggatcgaacagcttctaacgaagctgctgaaaagaagaggaagatgctagagaagcaatacatcgatgaactgaagaaggaaattgatggcgttgctttctctagtttgtcaaacaaggaagcagataaatcaccgaatgcaaaagatgatactcagtcagatcgtgaggaggatgccagtaaacaagaggaggatgatgatgatgatattggtactgctctcatgtctcgcaagcagagaggcctttataaggctatgaagatgggcaaagaaaagaaaaaggagaaagttgagctactcaagaagagaaaaaagaacgcggattctggcgcttcttccaagaagcggcactgatgtgtcacaaatcttcatcgcattggtgtgtcatctctagtagaaatgttaccatgatcagctctgcgtgccaatcccccatgatgggtgggttgccttttgatatctgctatgtatgcttaagatgagttcaaggatatgtaacatgaaacttgaatagaaaagttttgatctgtcttacgaagcatttagactcgttattattgtgaaacttgaatagaaaagttttgacctgtcttacgaagcatttatagttattattgagaagcctggatatattgctcgccccgttttataggaaagaattattttttgggtctccgtagacgaagtttttctggttggcagggttaataattttatgcttgcactgggttggcttggcgtttgcagagaagacacgacgagccacggcatttgcttgacttgctggtataggcgcttgtcttatactcttatctggatatttgtca

SEQ ID NO: 4985 - DNA, 1150 bp, Zea Mays
tggtgttaccgcttttgagtgccctaattgttgataggccgacacaaagccatgttttcctctccagggattatgttcaaccacagtgggtctttgattgtgtaaatgctcgtatcatattgccaacagaaggttatcttgttggaagagtacctccaccacatttgtctccttttgtggacaatgatgccgagggctacatgcctgagtatgcagagacaataaagaggctccaagctgctgctcgcaatgaggtgttgcctcttccaggtattggtgatgaagatctagacaattcactggtagcagcaatgatggatcgaacagcttctaacgaagctgctgaaaagaagaggaagctggagatgctagagaagcaatacatcgatgaactgaagaaggaaattgatggcgttgctttctctagtttgtcaaacaaggaagcagataaatcaccgaatgcaaaagatgatactcagtcagatcgtgaggaggatgccagtaaacaagaggaggatgatgatgatgatattggtactgctctcatgtctcgcaagcagagaggcctttataaggctatgaagatgggcaaagaaaagaaaaaggagaaagttgagctactcaagaagagaaaaaagaacgcggattctggcgcttcttccaagaagcggcactgatgtgtcacaaatcttcatcgcattggtgtgtcatctctagtagaaatgttaccatgatcagctctgcgtgccaatcccccatgatgggtgggttgccttttgatatctgctatgtatgcttaagatgagttcaaggatatgtaacatgaaacttgaatagaaaagttttgatctgtcttacgaagcatttagactcgttattattgtgaaacttgaatagaaaagttttgacctgtcttacgaagcatttatagttattattgagaagcctggatatattgctcgccccgttttataggaaagaattattttttgggtctccgtagacgaagtttttctggttggcagggttaataattttatgcttgcactgggttggcttggcgtttgcagagaagacacgacgagccacggcatttgcttgacttgctggtataggcgcttgtcttatactcttatctggatatttgtca

SEQ ID NO: 4986 - DNA, 2565 bp, Zea Mays
cacgtgagtagcagcaaaaggaaacaacccttcttcacccggctatcatctaacgtatcgccccgggagaatcaataactctaacgagatgacgaaaagtcaaaaataaagtcgtgtgatggccatgaaagtcagtcaagcaaatcagctgctaacacgtgtcccttatctacagacgtacctgccaagccagatgccggcggcgctgaagccgtaccgcgacgacgagctccgcaacctccgcggcgacgaccagcagggcccctaccaggagcacgaccgcgtgtaccgctacgacgtctacaacgacctcggcgagcccgacggcggcaacccgcgccccatcctcggcggctccgccgaccacccgtacccgcgccgctgccgcacgggccgcaagcccaccaaaaccgaccccaactcggagagccgactgtcgctggtggagcagatctacgtgccgcgggacgagcgcttcggccacctcaagatgtccgacttcctgggctactccatcaaggccatcacgcagggcatcatcccggcggtgcgcacgtacgtggacaccaccccgggcgagttcgactccttccaggacatcatcaacctgtacgagggcgggatcaagctgcccaagatccaggcgctcgaggacatgcgcaagctcttcccgctccagctcgtcaaggacctcctccccgccggcggggactacctgctcaagctccccatcccacagatcatccaagaggacaagaacgcgtggaggaccgacgaggagttcgcgcgggaggtgctcgccggcgtcaacccgatggtgatcacgcgcctcacggagttcccgcccaagagcacgctggaccccagcaagtacggcgaccacaccagcacgatcacggcggagcacatcgagaagaacctcgagggcctcacggtgcagcaggcgctggacggcaacaggctctacatcctggaccaccacgaccgcttcatgccgttcctcatcgacgtcaacaacctggagggcaacttcatctacgccaccaggacgctcttcttcctgcgcggcgacggcaggctcgcgcccctcgccatcgagctcagcgagccgtacatcgacggggacctcaccgtggccaagagcaaggtctacacgccggcgtccagcggcgtcgaggcctgggtgtggcagctcgccaaggcctatgtcgccgtcaacgactctggctggcaccaactcgtcagccactggctgaacacccacgcggtgatggagccgttcgtgatcgcgacgaaccggcagctgagcgtgacgcacccggtgcacaagctcctgagctcgcacttccgcgacaccatgaccatcaacgcgctggcgcggcagacgctcatcaacggcggcggcatcttcgagatgaccgtcttcccgggcaagtacgcgctgggcatgtcctccgtggtgtacaagagctggaacttcaccgagcagggcctccccgccgacctcgtcaagaggggcgtggcggtggcggacccgtccagcccgtacaaggtgcggctgctgatcgaggactacccgtacgcgagcgacgggctggccatctggcacgccatcgagcagtgggtgggcgagtacctggccatctactaccccgacgacggcgcgctgcggggcgacgaggagctgcaggcgtggtggaaggaggtgcgcgaggtcgggcacggcgaccacaaggacgcgccctggtggcccaagatgcaggccgtgtcggagctcgccagcgcctgcaccaccatcatctggatcgcgtcggcgctccacgccgccgtcaacttcggccagtacccgtacgcggggtacctcccgaacaggcccacggtgagccggcgccggatgccggagcccggcagcaaggagtacgaggagctggagcgcgacccggagcgcggcttcatccacaccatcacgagccagatccagaccatcatcggcatctcgctcatcgagatcctctccaagcactcctccgacgaggtgtacctcggccagcgcgacacccccgagtggacctccgacgcccgggcgctggcggcgttcaagaggttcagcgacgcgctggtcaagatcgagggcaaggtggtgggcgagaaccgcgacccgcagctgaggaacaggaacggccccgccgagttcccctacatgctgctctatcccaacacctctgaccacagtggcgccgccgcagggctcactgccaagggcatccccaacagcatctccatctgagcgactggtaccactaccaccccaggagtgctacgtacgagctggtacatgaataagctaatataagcaatcgtgtaaacgggaagagagcggccggcacgagacggaccatgtattttgcgtaaacgtgtgggctggtgaatcgaattactaccacgtaataagtgaagtgcttgttgcaatcattggcctgccagcttcaagattcttgcagttactattctagtcgtttcgcagtgctcctcgatcacaacatttcacgaggtgttttattacaa

SEQ ID NO: 4987 - DNA, 3058 bp, Zea Mays
catacatacaccaaccgtgcgtgaaggaaggcctttgctcgccgccacatcacattggcaggcgaggcgagggagcgagcagcagggcaaggcatccacacccacacccaccggacactccctgagaagcgagaagcgagaagcgaagagcggccggccaccatgttctggcacggggtcgcggaccggctgacggggaagaacaaggaggcgtggaacgagggaaagatccgcggcacggtgaggctggtcaagaaggaggtgctggacgtcggcgacttcaacgcctcgctcctcgacggcgtacacaggatcctcggctgggacgacggcgtcgccttccagctcgtcagcgccaccgcggccgaccccagcaacgggagccgcggcaaggtcgggaaggcggcgcacctggaggaggcggtggtgtcgctcaagtcgacgacggacggggagaccgtgtaccgggtgagcttcgagtgggacgggtcgcagggcgtcccgggcgccgtcctggtcaggaacctgcagcacgccgagttcttcctcaagtcgctcaccctcgagggcgtccccggcaggggcaccgtcgtcttcgtcgccaactcgtggatctacccgcacaatctctactcccaggaacgcgtcttcttcgccaacgacacttatctgccaagcaaaatgcctgcggcattggtgccttaccggcaggacgagctcaagattctccgcggcgacgataatcctggaccatacaaggagcacgaccgcgtctaccgttacgactactacaacgacctcggtgagccagacaagggtgaagaccatgcccggcctgtcctcgggggcagccaagaacacccgtatccccgtcgctgcaggaccggccggcgtccaacagagacagaccccaactcggagagcaggctgtttctgctgaacctgaacatctacgtcccgcgcgacgagcggtttgggcatctcaagatgtcggacttcctcgggtactcactgaaggcgatcatcgaggctgtccttccgacgctggggacgttcgtcgacgatacgcccaaggagttcgattcgttcgaagacatccttgggctctacgagccgggtccagaggcgcccaacaacccactggtagcagaggtcaggaagagaatccccagcgagttcctcagaagcattctgcccaatggtagccatgaccaccccctgaagatgccccttccaaatatcatcagatcaggctccagagtttaagtttggctggaggaccgacgaagagtttgcgagggagacgcttgcaggcgtgaacccagtgctcatcaaacgtctgacggagttcccagctaaaagtaccctggacccaagtcaatacggagaccatacgagcaagatcaccgaagctcacatccagcataacatggaaggcctgtcagtgcagaatgcactgaagaagaacaggctcttcatcctagaccaccatgaccatttcatgccgtacctcaacaagatcaacgagttggaggggaacttcatctacgccagcaggaccctactgttcctgaaggacgatggcacgctgaagcccctggccgtcgagctgagcctgccccaccctgatggccagcagcacggcgcggtcagcaaggtgtacaccccagctcactccggcgctgagggccacgtctggcaacttgccaaggcttatgcctgcgtgaacgactccgcctggcatcagctgatcagccactggctgaacacgcacgcggtgatcgagccgttcgtcatcgcaacgaaccggcagctgagcgtggtgcatccagtgcacaagctgctgagcccacactaccgtgacacgctgaacatcaacgccctggcacgccagacgctcatcaacgccgacggcatcttcgagcgcaccgtgttccctgcaaagtacgcgctggggatgtcctccgacgtgtacaagagctggaatttcaacgagcaggctctcccagcagacctcgtcaagagaggtgtggctgtgccggaccagtcgagcccctacggtgtccggttgctgatcaaggactacccttacgccgtggacgggctggtcatctggtgggcgatcgagcggtgggtcaaggagtacctggacgtctactaccccaacgacggcgagctccagcgcgacgtggagctgcaggcgtggtggaaggaggtgcgcgaggaggcgcacggcgacctcaaggaccgagactggtggcccaggatggacgccgtccagcggctggccagggcgtgcacgaccgtcatctgggtagcgtccgcgctgcacgcggccgtcaacttcgggcagtacccgtacgccgggtacctgccgaaccggccgaccgtgagccggcggccgatgccggagccgggcagcgacgactacaagaagctggaggcggggcagaaggaggcggacgcggtgttcatccgcaccatcaccagccagttccagaccatcctgggcatctcgctcatcgagatcctctccaagcactcctccgacgaggtgtacctcggccagcgcgacgagcctgagcgctggacgtcggacgccagggcgctggacgcgttcagaaggttcggaagccggctggtggagatcgagaagcggatcaggacgatgaacgacagcccgacgttgaagaaccggaaggggccggtggagatgccgtacatgctgctgtaccccaacacgtcggatgtcaccggcgagaagggcgaggggctcactgccatgggcattcccaacagcatctccatatgagcctcctcactgcctgagcggatggtttgtagatgttctgttacgctgtgtgtaatgtgtcgtttattcgttggttttgtcagtctcagggtagggaatggagatgttgattggatccatgatctgtagggttgagagaggagtcacgtctggagaatgttgtcaatgtgtgtttctttcttgttaagaataaaagttcgtcagctcatttatctctactacttattaaagaataaacaaaagaaa

SEQ ID NO: 4988 - DNA, 2444 bp, Zea Mays
accgtgatttttatggttgtagaatttcttcttggacttatctgccaagcaaaatgcctgcggcattggtgccttaccggcaggacgagctcaagattctccgcggcgacgataatcctggaccatacaaggagcacgaccgcgtctaccgttacgactactacaacgacctcggtgagccagacaagggtgaagaccatgcccggcctgtcctcgggggcagccaagaacacccgtatccccgtcgctgcaggaccggccggcgtccaacagagacagaccccaactcggagagcaggctgtttctgctgaacctgaacatctacgtcccgcgcgacgagcggtttgggcatctcaagatgtcggacttcctcgggtactcactgaaggcgatcatcgaggctgtccttccgacgctggggacgttcgtcgacgatacgcccaaggagttcgattcgttcgaagacatccttgggctctacgagccgggtccagaggcgcccaacaacccactggtagcagaggtcaggaagagaatccccagcgagttcctcagaagcattctgcccaatggtagccatgaccaccccctgaagatgccccttccaaatatcatcagatcagatgtgttgaaaaaggctccagagtttaagtttggctggaggaccgacgaagagtttgcgagggagacgcttgcaggcgtgaacccagtgctcatcaaacgtctgacggagttcccagctaaaagtaccctggacccaagtcaatacggagaccatacgagcaagatcaccgaagctcacatccagcataacatggaaggcctgtcagtgcagaatgcactgaagaagaacaggctcttcatcctagaccaccatgaccatttcatgccgtacctcaacaagatcaacgagttggaggggaacttcatctacgccagcaggaccctactgttcctgaaggacgatggcacgctgaagcccctggccgtcgagctgagcctgccccaccctgatggccagcagcacggcgcggtcagcaaggtgtacaccccagctcactccggcgctgagggccacgtctggcaacttgccaaggcttatgcctgcgtgaacgactccgcctggcatcagctgatcagccactggctgaacacgcacgcggtgatcgagccgttcgtcatcgcaacgaaccggcagctgagcgtggtgcatccagtgcacaagctgctgagcccacactaccgtgacacgctgaacatcaacgccctggcacgccagacgctcatcaacgccgacggcatcttcgagcgcaccgtgttccctgcaaagtacgcgctggggatgtcctccgacgtgtacaagagctggaatttcaacgagcaggctctcccagcagacctcgtcaagagaggtgtggctgtgccggaccagtcgagcccctacggtgtccggttgctgatcaaggactacccttacgccgtggacgggctggtcatctggtgggcgatcgagcggtgggtcaaggagtacctggacgtctactaccccaacgacggcgagctccagcgcgacgtggagctgcaggcgtggtggaaggaggtgcgcgaggaggcgcacggcgacctcaaggaccgagactggtggcccaggatggacgccgtccagcggctggccagggcgtgcacgaccgtcatctgggtagcgtccgcgctgcacgcggccgtcaacttcgggcagtacccgtacgccgggtacctgccgaaccggccgaccgtgagccggcggccgatgccggagccgggcagcgacgactacaagaagctggaggcggggcagaaggaggcggacgcggtgttcatccgcaccatcaccagccagttccagaccatcctgggcatctcgctcatcgagatcctctccaagcactcctccgacgaggtgtacctcggccagcgcgacgagcctgagcgctggacgtcggacgccagggcgctggacgcgttcagaaggttcggaagccggctggtggagatcgagaagcggatcaggacgatgaacgacagcccgacgttgaagaaccggaaggggccggtggagatgccgtacatgctgctgtaccccaacacgtcggatgtcaccggcgagaagggcgaggggctcactgccatgggcattcccaacagcatctccatatgagcctcctcactgcctgagcggatggtttgtagatgttctgttacgctgtgtgtaatgtgtcgtttattcgttggttttgtcagtctcagggtagggaatggagatgttgattggatccatgatctgtagggttgagagaggagtcacgtctggagaatgttgtcaatgtgtgtttctttcttgttaagaataaaagttcgtcagctcatttatctctactacttattaaagaataaacaaaagaaa

SEQ ID NO: 4989 - DNA, 4476 bp, Zea Mays
cgacgatcggcgtcggcagcggcgcgtccctgctgtccctcctgcatgcttgccacccagcttcgcctcgccacgcgtctcgtggaccattgcgcgcgtccctcgtgccacggcgcacccgcagccatgagtgccagcgctcccgtctcccgactcccgagcaaatcgctcggcgcctactactagcccgaaacctaggtggtgggaactcgggatacgaggtcctcttctccgccgcttgtcctcggcaagcacaaacgcggtaagccaccaaccgcctttcgatcgccgggctccatccctaagccatctcgccgcctcgtgagtcgtgagccgtgagccaaccgacctgccatcatcaattagtgacttcctgaacctgcttcgtgcgtcctaccactccaaagttccaacaatcaagagatttaaacaaagccttccataacttgttgccaataagtgcaggatttggaggccactgggctttggaaattcaaagtagactgcttggatcataacgagagagcacaaagggcctgggttttgtaaacagttggctttcactagagtcgatccattccatactgagcttttgcatatcatcaattcatcacacaatggatggtgtgcgatgcatggagtccccagctgctggtgatgccccgcatagttctttccgaacccttgggccaacactcctggtttcaatggggtatcttgacttcggaaaatggttggtggcagtggaagctgggtctcggtttggctatgatcttgtcctgctcgtgctgctttttaatctatcagctattctgtgtcagtacctctcgagctgtatcggcattgtcaccaaaaagaatcttgcggagatttgccaccaggagtatgatcagaaaatatgtgttgttcttggtcttcaagcaggactgtccttgctaacttctgaatttaccatgattgcaggcatcgtagttgggttcaaccttgtatttgaaagcaacaatcccatcacagtcgtatgttttacaagtgttgtagttaatctgctaccatatacactctcccttctggacaagaggaaggctggaatgtttaatgcctacgcatctggctttacactagtttgttttgtgcttggtttattagtgagccatcccaaaacccctgtcaataccaacgtaatgttccccaagttgagtggtgaaagtgcttactcactgatggtactacttggcacaaatataatagtacacaacttttatactcattcatcagttgttcaggttcagagaagatttcagggtcatacccttggtactctgtttcatgatcaccttttttctgtactatttgcattttctggtatctttcttgtgaattatattctgatgagttcagcagttgatgagtccaaaaacacaatggccattaacttccaagatgctagacagctaatgaatcaggttcatgtcattgttctcttcttatccgtcaagtcttttgtttaattggctatttgttctccgttcaccttcctattaatgtaaagagcagcattcgaattctcaaattataagacatgaccataggtttggtgttgtggcatgctactatacttgcatgtttggattttcaactttgtgaagttattgtattataagtacattacctattttttgggttgaccaaatggtgcacgagtttcaatattttactatggtcaaaaggacctaattggagtagcagagttttaggaaaaatatagttctagtatatttggggttcaagttatagatattagaaatcctatagtgtgtgtttgctttgtggaagtgcctcatgctagatcaggtcgtgtatcatgagtttattccatgaatttttgggtggaacaaacccattcttcatgtgtatacattagcttgtgagaattgagttggtgatgcatcaactcattctattctacagaccaaacaaaaagtgatcatgatggatcaccatattactcaaacccaatacacgttgttctaaacaagggctaaggttgggagaaatgatgtgttctagggaagccactggggacactctcttaggctcattccctgaatagggacataaagactgagttataagtaagctgctgggatgctctttttctcttcaactttcttgaaaacttagcctccgcatgaactggccagcgcatattcaataaaaatagtatccctttgagcttggagtgtgcattgaaggaggaagctccttcctgaatttcgtctggattcttgtattttgcaggtgttcacaagtcctgtggcgccaattgtattattagtggtccttctcttttcaggccacatcgtgtcaatgacatgtattattggtagtgatgtaatttcagaggatctcttcggcataaagctgcctctttttgtgcaccatctgttacctaaggtttttgccatgattactactatataccatgcgaaggttgtgggttttgaagggttatatcagttactcatggtctgcccaattatccaagctatgctccttccttcgtctgttatacctgttttccgcatttcctcgtcgagatcattgatgggaagataccggatatctcgatgtgttgaaatattgtgcttcctagcatttcttctaacactgtttacaaatatcatttttgtggcggaagttctttttggtgatagcacttggacaaatgacctgaaagggaacactgaaaaccctattctacttccatatatcgtcgtagtcctgatatcatgtggatctattggttttgcactgttccttgctgttactccactaaaatcagcatgtaatgaagctgagagagcgttgtctgtgcactcataacagagagaaacgttggatgccactcgtcacagcaaaaccgacttctctgagaatagggcacatgaagcatatgaagaacagaggtccttagccatccttgttccacaggattcactgaaagtaatccagaagttcatccttagcattgactggacagagcctatgtcaactgaaggttgtgcccttaaaattgactggacagagagcctatgtcaactgaaaaaggttgtgcaaatagactcggatgcctgcacggacaacgctctgtttgtggagaagtctgaatatttcttttatcaatcactatttctcttccatttaaattcacaattaacaggatggttcttatcatgactgtacctctgtttgtgggagtggaagtgttggcttatctacctattactcaaagaaacaccactgtctcacctgacacctccggtgattgctgcaaacagaatgctttgttggttgttgaatgaagcaaattaatgtggacagtggtactgcaaatcaggtggttcctctataggatacaccatgtgtggagtctgcaacaaggttctagtctcaacttgcacatatggtggctcttgcgagttgtgacatgatcgtctgacatcaaagcgtgaaagacgttaataaatctgttcaggagaagcagtcatctagcgtggcaagcttggaattgacaatgagtgaggtggacactggtagatctagtagcagggtcaaaggatgatttcttttaccaagtatgcttgcattcgtgaggcaaatcaatgatacattatttagagcgtgattggttgcctgctcggcccagcctgagcgtatccagtcattcaggcccatggcggcatgctaaagaggtgcaataggctattgtttggttactttgtttcatctcatgatggcccattagagcttgcctttggttgcaaggctgtacagacacttgagcatggcaagcctcccaactagagaacagaagacaccagtcatgacaacgatgttctttctcctcactaagtatgcaccttttcctcttgttgcctgccgcagacccactagtagcacctgcagctgcctcctagctcttcggagcctccccaaacagccttgaaacatcatcaaccttcatggcatctgtttgtagtgagctctcagcaaagtaagatgtggtacccattgcaaacttgccagttgcaagaccattgccaaagatcacttccatctgcttgtaattttctatttggcatgtttaagtactcagcattcttagcccttcagggtgtgcctatattgcaagctcacaaatgttagtgtaaggctggaattaggttagtgggcacttaggaaaggttacaaaatcacagatacaattaacatacatcttgatatggccacctatagtgcacttcatctagactgatcatgtgtcattcatcatcatcatcacaaaggggctatttgtttcggtttttcgctagattttagccgtcatagtcgacttctagataccagacacagaaaaccgaacgcttcgcatctcagtgcgcttcaatgaaaatcatttttttttgtaaaaatcgc

SEQ ID NO: 4990 - DNA, 4368 bp, Zea Mays
cggcagcggcgcgtccctgctgtccctcctgcatgcttgccacccagcttcgcctcgccacgcgtctcgtggaccattgcgcgcgtccctcgtgccacggcgcacccgcagccatgagtgccagcgctcccgtctcccgactcccgagcaaatcgctcggcgcctactactagcccgaaacctaggtggtgggaactcgggatacgaggtcctcttctccgccgcttgtcctcggcaagcacaaacgcggtaagccaccaaccgcctttcgatcgccgggctccatccctaagccatctcgccgcctcgtgagtcgtgagccgtgagccaaccgacctgccatcatcaattagtgacttcctgaacctgcttcgtgcgtcctaccactccaaagttccaacaatcaagagatttaaacaaagccttccataacttgttgccaataaggatttggaggccactgggctttggaaattcaaagtagactgcttggatcataacgagagagcacaaagggcctgggttttgtaaacagttggctttcactagagtcgatccattccatactgagcttttgcatatcatcaattcatcacacaatggatggtgtgcgatgcatggagtccccagctgctgtggaagctgggtctcggtttggctatgatcttgtcctgctcgtgctgctttttaatctatcagctattctgtgtcagtacctctcgagctgtatcggcattgtcaccaaaaagaatcttgcggagatttgccaccaggagtatgatcagaaaatatgtgttgttcttggtcttcaagcaggactgtccttgctaacttctgaatttaccatgattgcaggcatcgtagttgggttcaaccttgtatttgaaagcaacaatcccatcacagtcgtatgttttacaagtgttgtagttaatctgctaccatatacactctcccttctggacaagaggaaggctggaatgtttaatgcctacgcatctggctttacactagtttgttttgtgcttggtttattagtgagccatcccaaaacccctgtcaataccaacgtaatgttccccaagttgagtggtgaaagtgcttactcactgatggtactacttggcacaaatataatagtacacaacttttatactcattcatcagttgttcaggttcagagaagatttcagggtcatacccttggtactctgtttcatgatcaccttttttctgtactatttgcattttctggtatctttcttgtgaattatattctgatgagttcagcagttgatgagtccaaaaacacaatggccattaacttccaagatgctagacagctaatgaatcaggttcatgtcattgttctcttcttatccgtcaagtcttttgtttaattggctatttgttctccgttcaccttcctattaatgtaaagagcagcattcgaattctcaaattataagacatgaccataggtttggtgttgtggcatgctactatacttgcatgtttggattttcaactttgtgaagttattgtattataagtacattacctattttttgggttgaccaaatggtgcacgagtttcaatattttactatggtcaaaaggacctaattggagtagcagagttttaggaaaaatatagttctagtatatttggggttcaagttatagatattagaaatcctatagtgtgtgtttgctttgtggaagtgcctcatgctagatcaggtcgtgtatcatgagtttattccatgaatttttgggtggaacaaacccattcttcatgtgtatacattagcttgtgagaattgagttggtgatgcatcaactcattctattctacagaccaaacaaaaagtgatcatgatggatcaccatattactcaaacccaatacacgttgttctaaacaagggctaaggttgggagaaatgatgtgttctagggaagccactggggacactctcttaggctcattccctgaatagggacataaagactgagttataagtaagctgctgggatgctctttttctcttcaactttcttgaaaacttagcctccgcatgaactggccagcgcatattcaataaaaatagtatccctttgagcttggagtgtgcattgaaggaggaagctccttcctgaatttcgtctggattcttgtattttgcaggtgttcacaagtcctgtggcgccaattgtattattagtggtccttctcttttcaggccacatcgtgtcaatgacatgtattattggtagtgatgtaatttcagaggatctcttcggcataaagctgcctctttttgtgcaccatctgttacctaaggtttttgccatgattactactatataccatgcgaaggttgtgggttttgaagggttatatcagttactcatggtctgcccaattatccaagctatgctccttccttcgtctgttatacctgttttccgcatttcctcgtcgagatcattgatgggaagataccggatatctcgatgtgttgaaatattgtgcttcctagcatttcttctaacactgtttacaaatatcatttttgtggcggaagttctttttggtgatagcacttggacaaatgacctgaaagggaacactgaaaaccctattctacttccatatatcgtcgtagtcctgatatcatgtggatctattggttttgcactgttccttgctgttactccactaaaatcagcatgtaatgaagctgagagagcgttgtctgtgcactcataacagagagaaacgttggatgccactcgtcacagcaaaaccgacttctctgagaatagggcacatgaagcatatgaagaacagaggtccttagccatccttgttccacaggattcactgaaagtaatccagaagttcatccttagcattgactggacagagcctatgtcaactgaaggttgtgcccttaaaattgactggacagagagcctatgtcaactgaaaaaggttgtgcaaatagactcggatgcctgcacggacaacgctctgtttgtggagaagtctgaatatttcttttatcaatcactatttctcttccatttaaattcacaattaacaggatggttcttatcatgactgtacctctgtttgtgggagtggaagtgttggcttatctacctattactcaaagaaacaccactgtctcacctgacacctccggtgattgctgcaaacagaatgctttgttggttgttgaatgaagcaaattaatgtggacagtggtactgcaaatcaggtggttcctctataggatacaccatgtgtggagtctgcaacaaggttctagtctcaacttgcacatatggtggctcttgcgagttgtgacatgatcgtctgacatcaaagcgtgaaagacgttaataaatctgttcaggagaagcagtcatctagcgtggcaagcttggaattgacaatgagtgaggtggacactggtagatctagtagcagggtcaaaggatgatttcttttaccaagtatgcttgcattcgtgaggcaaatcaatgatacattatttagagcgtgattggttgcctgctcggcccagcctgagcgtatccagtcattcaggcccatggcggcatgctaaagaggtgcaataggctattgtttggttactttgtttcatctcatgatggcccattagagcttgcctttggttgcaaggctgtacagacacttgagcatggcaagcctcccaactagagaacagaagacaccagtcatgacaacgatgttctttctcctcactaagtatgcaccttttcctcttgttgcctgccgcagacccactagtagcacctgcagctgcctcctagctcttcggagcctccccaaacagccttgaaacatcatcaaccttcatggcatctgtttgtagtgagctctcagcaaagtaagatgtggtacccattgcaaacttgccagttgcaagaccattgccaaagatcacttccatctgcttgtaattttctatttggcatgtttaagtactcagcattcttagcccttcagggtgtgcctatattgcaagctcacaaatgttagtgtaaggctggaattaggttagtgggcacttaggaaaggttacaaaatcacagatacaattaacatacatcttgatatggccacctatagtgcacttcatctagactgatcatgtgtcattcatcatcatcatcacaaaggggctatttgtttcggtttttcgctagattttagccgtcatagtcgacttctagataccagacacagaaaaccgaacgcttcgcatctcagtgcgcttcaatgaaaatcatttttttttgtaaaaatcgc

SEQ ID NO: 4991 - DNA, 4560 bp, Zea Mays
cggcagcggcgcgtccctgctgtccctcctgcatgcttgccacccagcttcgcctcgccacgcgtctcgtggaccattgcgcgcgtccctcgtgccacggcgcacccgcagccatgagtgccagcgctcccgtctcccgactcccgagcaaatcgctcggcgcctactactagcccgaaacctaggtggtgggaactcgggatacgaggtcctcttctccgccgcttgtcctcggcaagcacaaacgcggtaagccaccaaccgcctttcgatcgccgggctccatccctaagccatctcgccgcctcgtgagtcgtgagccgtgagccaaccgacctgccatcatcaattagtgacttcctgaacctgcttcgtgcgtcctaccactccaaagttccaacaatcaagagatttaaacaaagccttccataacttgttgccaataagaggatttggaggccactgggctttggaaattcaaagtagactgcttggatcataacgagagagcacaaagggcctgggttttgtaaacagttggctttcactagagtcgatccattccatactgagcttttgcatatcatcaattcatcacacaatggatggtgtgcgatgcatggagtccccagctgctggtgatgccccgcatagttctttccgaacccttgggccaacactcctggtttcaatggggtatcttgacttcggaaaatggttggtggcagtggaagctgggtctcggtttggctatgatcttgtcctgctcgtgctgctttttaatctatcagctattctgtgtcagtacctctcgagctgtatcggcattgtcaccaaaaagaatcttgcggagatttgccaccaggagtatgatcagaaaatatgtgttgttcttggtcttcaagcaggactgtccttgctaacttctgaatttaccatgattgcaggcatcgtagttgggttcaaccttgtatttgaaagcaacaatcccatcacagtcgtatgttttacaagtgttgtagttaatctgctaccatatacactctcccttctggacaagaggaaggctggaatgtttaatgcctacgcatctggctttacactagtttgttttgtgcttggtttattagtgagccatcccaaaacccctgtcaataccaacgtaatgttccccaagttgagtggtgaaagtgcttactcactgatggtactacttggcacaaatataatagtacacaacttttatactcattcatcagttgttcaggttcagagaagatttcagggtcatacccttggtactctgtttcatgatcaccttttttctgtactatttgcattttctggtatctttcttgtgaattatattctgatgagttcagcagttgatgagtccaaaaacacaatggccattaacttccaagatgctagacagctaatgaatcaggttcatgtcattgttctcttcttatccgtcaagtcttttgtttaattggctatttgttctccgttcaccttcctattaatgtaaagagcagcattcgaattctcaaattataagacatgaccataggtttggtgttgtggcatgctactatacttgcatgtttggattttcaactttgtgaagttattgtattataagtacattacctattttttgggttgaccaaatggtgcacgagtttcaatattttactatggtcaaaaggacctaattggagtagcagagttttaggaaaaatatagttctagtatatttggggttcaagttatagatattagaaatcctatagtgtgtgtttgctttgtggaagtgcctcatgctagatcaggtcgtgtatcatgagtttattccatgaatttttgggtggaacaaacccattcttcatgtgtatacattagcttgtgagaattgagttggtgatgcatcaactcattctattctacagaccaaacaaaaagtgatcatgatggatcaccatattactcaaacccaatacacgttgttctaaacaagggctaaggttgggagaaatgatgtgttctagggaagccactggggacactctcttaggctcattccctgaatagggacataaagactgagttataagtaagctgctgggatgctctttttctcttcaactttcttgaaaacttagcctccgcatgaactggccagcgcatattcaataaaaatagtatccctttgagcttggagtgtgcattgaaggaggaagctccttcctgaatttcgtctggattcttgtattttgcaggtgttcacaagtcctgtggcgccaattgtattattagtggtccttctcttttcaggccacatcgtgtcaatgacatgtattattggtagtgatgtaatttcagaggatctcttcggcataaagctgcctctttttgtgcaccatctgttacctaaggtttttgccatgattactactatataccatgcgaaggttgtgggttttgaagggttatatcagttactcatggtctgcccaattatccaagctatgctccttccttcgtctgttatacctgttttccgcatttcctcgtcgagatcattgatgggaagataccggatatctcgatgtgttgaaatattgtgcttcctagcatttcttctaacactgtttacaaatatcatttttgtggcggaagttctttttggtgatagcacttggacaaatgacctgaaagggaacactgaaaaccctattctacttccatatatcgtcgtagtcctgatatcatgtggatctattggttttgcactgttccttgctgttactccactaaaatcagcatgtaatgaagctgagagagcgttgtctgtgcactcataacagagagaaacgttggatgccactcgtcacagcaaaaccgacttctctgagaatagggcacatgaagcatatgaagaacagaggtccttagccatccttgttccacaggattcactgaaaggtgatagaaataattttcgtagcatatccgtcatctcaaattagcttttgatcacaagggcagtttctgacgctactctacatgcaaatcatatgtctagtaatccagaagttcatccttagcattgactggacagagcctatgtcaactgaaggttgtgcccttaaaattgactggacagagagcctatgtcaactgaaaaaggttgtgcaaatagactcggatgcctgcacggacaacgctctgtttgtggagaagtctgaatatttcttttatcaatcactatttctcttccatttaaattcacaattaacaggatggttcttatcatgactgtacctctgtttgtgggagtggaagtgttggcttatctacctattactcaaagaaacaccactgtctcacctgacacctccggtgattgctgcaaacagaatgctttgttggttgttgaatgaagcaaattaatgtggacagtggtactgcaaatcaggtggttcctctataggatacaccatgtgtggagtctgcaacaaggttctagtctcaacttgcacatatggtggctcttgcgagttgtgacatgatcgtctgacatcaaagcgtgaaagacgttaataaatctgttcaggagaagcagtcatctagcgtggcaagcttggaattgacaatgagtgaggtggacactggtagatctagtagcagggtcaaaggatgatttcttttaccaagtatgcttgcattcgtgaggcaaatcaatgatacattatttagagcgtgattggttgcctgctcggcccagcctgagcgtatccagtcattcaggcccatggcggcatgctaaagaggtgcaataggctattgtttggttactttgtttcatctcatgatggcccattagagcttgcctttggttgcaaggctgtacagacacttgagcatggcaagcctcccaactagagaacagaagacaccagtcatgacaacgatgttctttctcctcactaagtatgcaccttttcctcttgttgcctgccgcagacccactagtagcacctgcagctgcctcctagctcttcggagcctccccaaacagccttgaaacatcatcaaccttcatggcatctgtttgtagtgagctctcagcaaagtaagatgtggtacccattgcaaacttgccagttgcaagaccattgccaaagatcacttccatctgcttgtaattttctatttggcatgtttaagtactcagcattcttagcccttcagggtgtgcctatattgcaagctcacaaatgttagtgtaaggctggaattaggttagtgggcacttaggaaaggttacaaaatcacagatacaattaacatacatcttgatatggccacctatagtgcacttcatctagactgatcatgtgtcattcatcatcatcatcacaaaggggctatttgtttcggtttttcgctagattttagccgtcatagtcgacttctagataccagacacagaaaaccgaacgcttcgcatctcagtgcgcttcaatgaaaatcatttttttttgtaaaaatcgc

SEQ ID NO: 4992 - DNA, 3504 bp, Zea Mays
cccagcttcgcctcgccacgcgtctcgtggaccattgcgcgcgtccctcgtgccacggcgcacccgcagccatgagtgccagcgctcccgtctcccgactcccgagcaaatcgctcggcgcctactactagcccgaaacctaggtggtgggaactcgggatacgaggtcctcttctccgccgcttgtcctcggcaagcacaaacgcggtaagccaccaaccgcctttcgatcgccgggctccatccctaagccatctcgccgcctcgtgagtcgtgagccgtgagccaaccgacctgccatcatcaattagtgacttcctgaacctgcttcgtgcgtcctaccactccaaagttccaacaatcaagagatttaaacaaagccttccataacttgttgccaataagtgcaggatttggaggccactgggctttggaaattcaaagtagactgcttggatcataacgagagagcacaaagggcctgggttttgtaaacagttggctttcactagagtcgatccattccatactgagcttttgcatatcatcaattcatcacacaatggatggtgtgcgatgcatggagtccccagctgctggtgatgccccgcatagttctttccgaacccttgggccaacactcctggtttcaatggggtatcttgacttcggaaaatggttggtggcagtggaagctgggtctcggtttggctatgatcttgtcctgctcgtgctgctttttaatctatcagctattctgtgtcagtacctctcgagctgtatcggcattgtcaccaaaaagaatcttgcggagatttgccaccaggagtatgatcagaaaatatgtgttgttcttggtcttcaagcaggactgtccttgctaacttctgaatttaccatgattgcaggcatcgtagttgggttcaaccttgtatttgaaagcaacaatcccatcacagtcgtatgttttacaagtgttgtagttaatctgctaccatatacactctcccttctggacaagaggaaggctggaatgtttaatgcctacgcatctggctttacactagtttgttttgtgcttggtttattagtgagccatcccaaaacccctgtcaataccaacgtaatgttccccaagttgagtggtgaaagtgcttactcactgatggtactacttggcacaaatataatagtacacaacttttatactcattcatcagttgttcaggttcagagaagatttcagggtcatacccttggtactctgtttcatgatcaccttttttctgtactatttgcattttctggtatctttcttgtgaattatattctgatgagttcagcagttgatgagtccaaaaacacaatggccattaacttccaagatgctagacagctaatgaatcaggtgttcacaagtcctgtggcgccaattgtattattagtggtccttctcttttcaggccacatcgtgtcaatgacatgtattattggtagtgatgtaatttcagaggatctcttcggcataaagctgcctctttttgtgcaccatctgttacctaaggtttttgccatgattactactatataccatgcgaaggttgtgggttttgaagggttatatcagttactcatggtctgcccaattatccaagctatgctccttccttcgtctgttatacctgttttccgcatttcctcgtcgagatcattgatgggaagataccggatatctcgatgtgttgaaatattgtgcttcctagcatttcttctaacactgtttacaaatatcatttttgtggcggaagttctttttggtgatagcacttggacaaatgacctgaaagggaacactgaaaaccctattctacttccatatatcgtcgtagtcctgatatcatgtggatctattggttttgcactgttccttgctgttactccactaaaatcagcatgtaatgaagctgagagagcgttgtctgtgcactcataacagagagaaacgttggatgccactcgtcacagcaaaaccgacttctctgagaatagggcacatgaagcatatgaagaacagaggtccttagccatccttgttccacaggattcactgaaagtaatccagaagttcatccttagcattgactggacagagcctatgtcaactgaaggttgtgcccttaaaattgactggacagagagcctatgtcaactgaaaaaggttgtgcaaatagactcggatgcctgcacggacaacgctctgtttgtggagaagtctgaatatttcttttatcaatcactatttctcttccatttaaattcacaattaacaggatggttcttatcatgactgtacctctgtttgtgggagtggaagtgttggcttatctacctattactcaaagaaacaccactgtctcacctgacacctccggtgattgctgcaaacagaatgctttgttggttgttgaatgaagcaaattaatgtggacagtggtactgcaaatcaggtggttcctctataggatacaccatgtgtggagtctgcaacaaggttctagtctcaacttgcacatatggtggctcttgcgagttgtgacatgatcgtctgacatcaaagcgtgaaagacgttaataaatctgttcaggagaagcagtcatctagcgtggcaagcttggaattgacaatgagtgaggtggacactggtagatctagtagcagggtcaaaggatgatttcttttaccaagtatgcttgcattcgtgaggcaaatcaatgatacattatttagagcgtgattggttgcctgctcggcccagcctgagcgtatccagtcattcaggcccatggcggcatgctaaagagacacttgagcatggcaagcctcccaactagagaacagaagacaccagtcatgacaacgatgttctttctcctcactaagtatgcaccttttcctcttgttgcctgccgcagacccactagtagcacctgcagctgcctcctagctcttcggagcctccccaaacagccttgaaacatcatcaaccttcatggcatctgtttgtagtgagctctcagcaaagtaagatgtggtacccattgcaaacttgccagttgcaagaccattgccaaagatcacttccatctgcttgtaattttctatttggcatgtttaagtactcagcattcttagcccttcagggtgtgcctatattgcaagctcacaaatgttagtgtaaggctggaattaggttagtgggcacttaggaaaggttacaaaatcacagatacaattaacatacatcttgatatggccacctatagtgcacttcatctagactgatcatgtgtcattcatcatcatcatcacaaaggggctatttgtttcggtttttcgctagattttagccgtcatagtcgacttctagataccagacacagaaaaccgaacgcttcgcatctcagtgcgcttcaatgaaaatcatttttttttgtaaaaatcgc

SEQ ID NO: 4993 - DNA, 3521 bp, Zea Mays
gccacggcgcacccgcagccatgagtgccagcgctcccgtctcccgactcccgagcaaatcgctcggcgcctactactagcccgaaacctaggtggtgggaactcgggatacgaggtcctcttctccgccgcttgtcctcggcaagcacaaacgcggtaagccaccaaccgcctttcgatcgccgggctccatccctaagccatctcgccgcctcgtgagtcgtgagccgtgagccaaccgacctgccatcatcaattagtgacttcctgaacctgcttcgtgcgtcctaccactccaaagttccaacaatcaagagatttaaacaaagccttccataacttgttgccaataagtgcaggatttggaggccactgggctttggaaattcaaagtagactgcttggatcataacgagagagcacaaagggcctgggttttgtaaacagttggctttcactagagtcgatccattccatactgagcttttgcatatcatcaattcatcacacaatggatggtgtgcgatgcatggagtccccagctgctggtgatgccccgcatagttctttccgaacccttgggccaacactcctggtttcaatggggtatcttgacttcggaaaatggttggtggcagtggaagctgggtctcggtttggctatgatcttgtcctgctcgtgctgctttttaatctatcagctattctgtgtcagtacctctcgagctgtatcggcattgtcaccaaaaagaatcttgcggagatttgccaccaggagtatgatcagaaaatatgtgttgttcttggtcttcaagcaggactgtccttgctaacttctgaatttaccatggacaagaggaaggctggaatgtttaatgcctacgcatctggctttacactagtttgttttgtgcttggtttattagtgagccatcccaaaacccctgtcaataccaacgtaatgttccccaagttgagtggtgaaagtgcttactcactgatggtactacttggcacaaatataatagtacacaacttttatactcattcatcagttgttcaggttcagagaagatttcagggtcatacccttggtactctgtttcatgatcaccttttttctgtactatttgcattttctggtatctttcttgtgaattatattctgatgagttcagcagttgatgagtccaaaaacacaatggccattaacttccaagatgctagacagctaatgaatcaggtgttcacaagtcctgtggcgccaattgtattattagtggtccttctcttttcaggccacatcgtgtcaatgacatgtattattggtagtgatgtaatttcagaggatctcttcggcataaagctgcctctttttgtgcaccatctgttacctaaggtttttgccatgattactactatataccatgcgaaggttgtgggttttgaagggttatatcagttactcatggtctgcccaattatccaagctatgctccttccttcgtctgttatacctgttttccgcatttcctcgtcgagatcattgatgggaagataccggatatctcgatgtgttgaaatattgtgcttcctagcatttcttctaacactgtttacaaatatcatttttgtggcggaagttctttttggtgatagcacttggacaaatgacctgaaagggaacactgaaaaccctattctacttccatatatcgtcgtagtcctgatatcatgtggatctattggttttgcactgttccttgctgttactccactaaaatcagcatgtaatgaagctgagagagcgttgtctgtgcactcataacagagagaaacgttggatgccactcgtcacagcaaaaccgacttctctgagaatagggcacatgaagcatatgaagaacagaggtccttagccatccttgttccacaggattcactgaaaggtgatagaaataattttcgtagcatatccgtcatctcaaattagcttttgatcacaagggcagtttctgacgctactctacatgcaaatcatatgtctagtaatccagaagttcatccttagcattgactggacagagcctatgtcaactgaaggttgtgcccttaaaattgactggacagagagcctatgtcaactgaaaaaggttgtgcaaatagactcggatgcctgcacggacaacgctctgtttgtggagaagtctgaatatttcttttatcaatcactatttctcttccatttaaattcacaattaacaggatggttcttatcatgactgtacctctgtttgtgggagtggaagtgttggcttatctacctattactcaaagaaacaccactgtctcacctgacacctccggtgattgctgcaaacagaatgctttgttggttgttgaatgaagcaaattaatgtggacagtggtactgcaaatcaggtggttcctctataggatacaccatgtgtggagtctgcaacaaggttctagtctcaacttgcacatatggtggctcttgcgagttgtgacatgatcgtctgacatcaaagcgtgaaagacgttaataaatctgttcaggagaagcagtcatctagcgtggcaagcttggaattgacaatgagtgaggtggacactggtagatctagtagcagggtcaaaggatgatttcttttaccaagtatgcttgcattcgtgaggcaaatcaatgatacattatttagagcgtgattggttgcctgctcggcccagcctgagcgtatccagtcattcaggcccatggcggcatgctaaagaggtgcaataggctattgtttggttactttgtttcatctcatgatggcccattagagcttgcctttggttgcaaggctgtacagacacttgagcatggcaagcctcccaactagagaacagaagacaccagtcatgacaacgatgttctttctcctcactaagtatgcaccttttcctcttgttgcctgccgcagacccactagtagcacctgcagctgcctcctagctcttcggagcctccccaaacagccttgaaacatcatcaaccttcatggcatctgtttgtagtgagctctcagcaaagtaagatgtggtacccattgcaaacttgccagttgcaagaccattgccaaagatcacttccatctgcttgtaattttctatttggcatgtttaagtactcagcattcttagcccttcagggtgtgcctatattgcaagctcacaaatgttagtgtaaggctggaattaggttagtgggcacttaggaaaggttacaaaatcacagatacaattaacatacatcttgatatggccacctatagtgcacttcatctagactgatcatgtgtcattcatcatcatcatcacaaaggggctatttgtttcggtttttcgctagattttagccgtcatagtcgacttctagataccagacacagaaaaccgaacgcttcgcatctcagtgcgcttcaatgaaaatcatttttttttgtaaaaatcgc

SEQ ID NO: 4994 - DNA, 3522 bp, Zea Mays
gcacccgcagccatgagtgccagcgctcccgtctcccgactcccgagcaaatcgctcggcgcctactactagcccgaaacctaggtggtgggaactcgggatacgaggtcctcttctccgccgcttgtcctcggcaagcacaaacgcggtaagccaccaaccgcctttcgatcgccgggctccatccctaagccatctcgccgcctcgtgagtcgtgagccgtgagccaaccgacctgccatcatcaattagtgacttcctgaacctgcttcgtgcgtcctaccactccaaagttccaacaatcaagagatttaaacaaagccttccataacttgttgccaataaggatttggaggccactgggctttggaaattcaaagtagactgcttggatcataacgagagagcacaaagggcctgggttttgtaaacagttggctttcactagagtcgatccattccatactgagcttttgcatatcatcaattcatcacacaatggatggtgtgcgatgcatggagtccccagctgctggtgatgccccgcatagttctttccgaacccttgggccaacactcctggtttcaatggggtatcttgacttcggaaaatggttggtggcagtggaagctgggtctcggtttggctatgatcttgtcctgctcgtgctgctttttaatctatcagctattctgtgtcagtacctctcgagctgtatcggcattgtcaccaaaaagaatcttgcggagatttgccaccaggagtatgatcagaaaatatgtgttgttcttggtcttcaagcaggactgtccttgctaacttctgaatttaccatgattgcaggcatcgtagttgggttcaaccttgtatttgaaagcaacaatcccatcacagtcgtatgttttacaagtgttgtagttaatctgctaccatatacactctcccttctggacaagaggaaggctggaatgtttaatgcctacgcatctggctttacactagtttgttttgtgcttggtttattagtgagccatcccaaaacccctgtcaataccaacgtaatgttccccaagttgagtggtgaaagtgcttactcactgatggtactacttggcacaaatataatagtacacaacttttatactcattcatcagttgttcaggttcagagaagatttcagggtcatacccttggtactctgtttcatgatcaccttttttctgtactatttgcattttctggtatctttcttgtgaattatattctgatgagttcagcagttgatgagtccaaaaacacaatggccattaacttccaagatgctagacagctaatgaatcaggtgttcacaagtcctgtggcgccaattgtattattagtggtccttctcttttcaggccacatcgtgtcaatgacatgtattattggtagtgatgtaatttcagaggatctcttcggcataaagctgcctctttttgtgcaccatctgttacctaaggtttttgccatgattactactatataccatgcgaaggttgtgggttttgaagggttatatcagttactcatggtctgcccaattatccaagctatgctccttccttcgtctgttatacctgttttccgcatttcctcgtcgagatcattgatgggaagataccggatatctcgatgtgttgaaatattgtgcttcctagcatttcttctaacactgtttacaaatatcatttttgtggcggaagttctttttggtgatagcacttggacaaatgacctgaaagggaacactgaaaaccctattctacttccatatatcgtcgtagtcctgatatcatgtggatctattggttttgcactgttccttgctgttactccactaaaatcagcatgtaatgaagctgagagagcgttgtctgtgcactcataacagagagaaacgttggatgccactcgtcacagcaaaaccgacttctctgagaatagggcacatgaagcatatgaagaacagaggtccttagccatccttgttccacaggattcactgaaagtaatccagaagttcatccttagcattgactggacagagcctatgtcaactgaaggttgtgcccttaaaattgactggacagagagcctatgtcaactgaaaaaggttgtgcaaatagactcggatgcctgcacggacaacgctctgtttgtggagaagtctgaatatttcttttatcaatcactatttctcttccatttaaattcacaattaacaggatggttcttatcatgactgtacctctgtttgtgggagtggaagtgttggcttatctacctattactcaaagaaacaccactgtctcacctgacacctccggtgattgctgcaaacagaatgctttgttggttgttgaatgaagcaaattaatgtggacagtggtactgcaaatcaggtggttcctctataggatacaccatgtgtggagtctgcaacaaggttctagtctcaacttgcacatatggtggctcttgcgagttgtgacatgatcgtctgacatcaaagcgtgaaagacgttaataaatctgttcaggagaagcagtcatctagcgtggcaagcttggaattgacaatgagtgaggtggacactggtagatctagtagcagggtcaaaggatgatttcttttaccaagtatgcttgcattcgtgaggcaaatcaatgatacattatttagagcgtgattggttgcctgctcggcccagcctgagcgtatccagtcattcaggcccatggcggcatgctaaagaggtgcaataggctattgtttggttactttgtttcatctcatgatggcccattagagcttgcctttggttgcaaggctgtacagacacttgagcatggcaagcctcccaactagagaacagaagacaccagtcatgacaacgatgttctttctcctcactaagtatgcaccttttcctcttgttgcctgccgcagacccactagtagcacctgcagctgcctcctagctcttcggagcctccccaaacagccttgaaacatcatcaaccttcatggcatctgtttgtagtgagctctcagcaaagtaagatgtggtacccattgcaaacttgccagttgcaagaccattgccaaagatcacttccatctgcttgtaattttctatttggcatgtttaagtactcagcattcttagcccttcagggtgtgcctatattgcaagctcacaaatgttagtgtaaggctggaattaggttagtgggcacttaggaaaggttacaaaatcacagatacaattaacatacatcttgatatggccacctatagtgcacttcatctagactgatcatgtgtcattcatcatcatcatcacaaaggggctatttgtttcggtttttcgctagattttagccgtcatagtcgacttctagataccagacacagaaaaccgaacgcttcgcatctcagtgcgcttcaatgaaaatcatttttttttgtaaaaatcgc

SEQ ID NO: 4995 - DNA, 3488 bp, Zea Mays
cagcgctcccgtctcccgactcccgagcaaatcgctcggcgcctactactagcccgaaacctaggtggtgggaactcgggatacgaggtcctcttctccgccgcttgtcctcggcaagcacaaacgcggtaagccaccaaccgcctttcgatcgccgggctccatccctaagccatctcgccgcctcgtgagtcgtgagccgtgagccaaccgacctgccatcatcaattagtgacttcctgaacctgcttcgtgcgtcctaccactccaaagttccaacaatcaagagatttaaacaaagccttccataacttgttgccaataaggatttggaggccactgggctttggaaattcaaagtagactgcttggatcataacgagagagcacaaagggcctgggttttgtaaacagttggctttcactagagtcgatccattccatactgagcttttgcatatcatcaattcatcacacaatggatggtgtgcgatgcatggagtccccagctgctggtgatgccccgcatagttctttccgaacccttgggccaacactcctggtttcaatggggtatcttgacttcggaaaatggttggtggcagtggaagctgggtctcggtttggctatgatcttgtcctgctcgtgctgctttttaatctatcagctattctgtgtcagtacctctcgagctgtatcggcattgtcaccaaaaagaatcttgcggagatttgccaccaggagtatgatcagaaaatatgtgttgttcttggtcttcaagcaggactgtccttgctaacttctgaatttaccatggacaagaggaaggctggaatgtttaatgcctacgcatctggctttacactagtttgttttgtgcttggtttattagtgagccatcccaaaacccctgtcaataccaacgtaatgttccccaagttgagtggtgaaagtgcttactcactgatggtactacttggcacaaatataatagtacacaacttttatactcattcatcagttgttcaggttcagagaagatttcagggtcatacccttggtactctgtttcatgatcaccttttttctgtactatttgcattttctggtatctttcttgtgaattatattctgatgagttcagcagttgatgagtccaaaaacacaatggccattaacttccaagatgctagacagctaatgaatcaggtgttcacaagtcctgtggcgccaattgtattattagtggtccttctcttttcaggccacatcgtgtcaatgacatgtattattggtagtgatgtaatttcagaggatctcttcggcataaagctgcctctttttgtgcaccatctgttacctaaggtttttgccatgattactactatataccatgcgaaggttgtgggttttgaagggttatatcagttactcatggtctgcccaattatccaagctatgctccttccttcgtctgttatacctgttttccgcatttcctcgtcgagatcattgatgggaagataccggatatctcgatgtgttgaaatattgtgcttcctagcatttcttctaacactgtttacaaatatcatttttgtggcggaagttctttttggtgatagcacttggacaaatgacctgaaagggaacactgaaaaccctattctacttccatatatcgtcgtagtcctgatatcatgtggatctattggttttgcactgttccttgctgttactccactaaaatcagcatgtaatgaagctgagagagcgttgtctgtgcactcataacagagagaaacgttggatgccactcgtcacagcaaaaccgacttctctgagaatagggcacatgaagcatatgaagaacagaggtccttagccatccttgttccacaggattcactgaaaggtgatagaaataattttcgtagcatatccgtcatctcaaattagcttttgatcacaagggcagtttctgacgctactctacatgcaaatcatatgtctagtaatccagaagttcatccttagcattgactggacagagcctatgtcaactgaaggttgtgcccttaaaattgactggacagagagcctatgtcaactgaaaaaggttgtgcaaatagactcggatgcctgcacggacaacgctctgtttgtggagaagtctgaatatttcttttatcaatcactatttctcttccatttaaattcacaattaacaggatggttcttatcatgactgtacctctgtttgtgggagtggaagtgttggcttatctacctattactcaaagaaacaccactgtctcacctgacacctccggtgattgctgcaaacagaatgctttgttggttgttgaatgaagcaaattaatgtggacagtggtactgcaaatcaggtggttcctctataggatacaccatgtgtggagtctgcaacaaggttctagtctcaacttgcacatatggtggctcttgcgagttgtgacatgatcgtctgacatcaaagcgtgaaagacgttaataaatctgttcaggagaagcagtcatctagcgtggcaagcttggaattgacaatgagtgaggtggacactggtagatctagtagcagggtcaaaggatgatttcttttaccaagtatgcttgcattcgtgaggcaaatcaatgatacattatttagagcgtgattggttgcctgctcggcccagcctgagcgtatccagtcattcaggcccatggcggcatgctaaagaggtgcaataggctattgtttggttactttgtttcatctcatgatggcccattagagcttgcctttggttgcaaggctgtacagacacttgagcatggcaagcctcccaactagagaacagaagacaccagtcatgacaacgatgttctttctcctcactaagtatgcaccttttcctcttgttgcctgccgcagacccactagtagcacctgcagctgcctcctagctcttcggagcctccccaaacagccttgaaacatcatcaaccttcatggcatctgtttgtagtgagctctcagcaaagtaagatgtggtacccattgcaaacttgccagttgcaagaccattgccaaagatcacttccatctgcttgtaattttctatttggcatgtttaagtactcagcattcttagcccttcagggtgtgcctatattgcaagctcacaaatgttagtgtaaggctggaattaggttagtgggcacttaggaaaggttacaaaatcacagatacaattaacatacatcttgatatggccacctatagtgcacttcatctagactgatcatgtgtcattcatcatcatcatcacaaaggggctatttgtttcggtttttcgctagattttagccgtcatagtcgacttctagataccagacacagaaaaccgaacgcttcgcatctcagtgcgcttcaatgaaaatcatttttttttgtaaaaatcgc

SEQ ID NO: 4996 - DNA, 2123 bp, Zea Mays
aaatcgctcggcgcctactactagcccgaaacctaggtggtgggaactcgggatacgaggtcctcttctccgccgcttgtcctcggcaagcacaaacgcggtaagccaccaaccgcctttcgatcgccgggctccatccctaagccatctcgccgcctcgtgagtcgtgagccgtgagccaaccgacctgccatcatcaattagtgacttcctgaacctgcttcgtgcgtcctaccactccaaagttccaacaatcaagagatttaaacaaagccttccataacttgttgccaataagtgcaggatttggaggccactgggctttggaaattcaaagtagactgcttggatcataacgagagagcacaaagggcctgggttttgtaaacagttggctttcactagagtcgatccattccatactgagcttttgcatatcatcaattcatcacacaatggatggtgtgcgatgcatggagtccccagctgctggtgatgccccgcatagttctttccgaacccttgggccaacactcctggtttcaatggggtatcttgacttcggaaaatggttggtggcagtggaagctgggtctcggtttggctatgatcttgtcctgctcgtgctgctttttaatctatcagctattctgtgtcagtacctctcgagctgtatcggcattgtcaccaaaaagaatcttgcggagatttgccaccaggagtatgatcagaaaatatgtgttgttcttggtcttcaagcaggactgtccttgctaacttctgaatttaccatgattgcaggcatcgtagttgggttcaaccttgtatttgaaagcaacaatcccatcacagtcgtatgttttacaagtgttgtagttaatctgctaccatatacactctcccttctggacaagaggaaggctggaatgtttaatgcctacgcatctggctttacactagtttgttttgtgcttggtttattagtgagccatcccaaaacccctgtcaataccaacgtaatgttccccaagttgagtggtgaaagtgcttactcactgatggtactacttggcacaaatataatagtacacaacttttatactcattcatcagttgttcaggttcagagaagatttcagggtcatacccttggtactctgtttcatgatcaccttttttctgtactatttgcattttctggtatctttcttgtgaattatattctgatgagttcagcagttgatgagtccaaaaacacaatggccattaacttccaagatgctagacagctaatgaatcaggcaaatcaatgatacattatttagagcgtgattggttgcctgctcggcccagcctgagcgtatccagtcattcaggcccatggcggcatgctaaagaggtgcaataggctattgtttggttactttgtttcatctcatgatggcccattagagcttgcctttggttgcaaggctgtacagacacttgagcatggcaagcctcccaactagagaacagaagacaccagtcatgacaacgatgttctttctcctcactaagtatgcaccttttcctcttgttgcctgccgcagacccactagtagcacctgcagctgcctcctagctcttcggagcctccccaaacagccttgaaacatcatcaaccttcatggcatctgtttgtagtgagctctcagcaaagtaagatgtggtacccattgcaaacttgccagttgcaagaccattgccaaagatcacttccatctgcttgtaattttctatttggcatgtttaagtactcagcattcttagcccttcagggtgtgcctatattgcaagctcacaaatgttagtgtaaggctggaattaggttagtgggcacttaggaaaggttacaaaatcacagatacaattaacatacatcttgatatggccacctatagtgcacttcatctagactgatcatgtgtcattcatcatcatcatcacaaaggggctatttgtttcggtttttcgctagattttagccgtcatagtcgacttctagataccagacacagaaaaccgaacgcttcgcatctcagtgcgcttcaatgaaaatcatttttttttgtaaaaatcgc

SEQ ID NO: 4997 - DNA, 2841 bp, Zea Mays
ggacttttatgtgctcatgatacatttgcttgcaccattcctaattaacagagcatattgcaggcatcgtagttgggttcaaccttgtatttgaaagcaacaatcccatcacagtcgtatgttttacaagtgttgtagttaatctgctaccatatacactctcccttctggacaagaggaaggctggaatgtttaatgcctacgcatctggctttacactagtttgttttgtgcttggtttattagtgagccatcccaaaacccctgtcaataccaacgtaatgttccccaagttgagtggtgaaagtgcttactcactgatggtactacttggcacaaatataatagtacacaacttttatactcattcatcagttgttcaggttcagagaagatttcagggtcatacccttggtactctgtttcatgatcaccttttttctgtactatttgcattttctggtatctttcttgtgaattatattctgatgagttcagcagttgatgagtccaaaaacacaatggccattaacttccaagatgctagacagctaatgaatcaggtgttcacaagtcctgtggcgccaattgtattattagtggtccttctcttttcaggccacatcgtgtcaatgacatgtattattggtagtgatgtaatttcagaggatctcttcggcataaagctgcctctttttgtgcaccatctgttacctaaggtttttgccatgattactactatataccatgcgaaggttgtgggttttgaagggttatatcagttactcatggtctgcccaattatccaagctatgctccttccttcgtctgttatacctgttttccgcatttcctcgtcgagatcattgatgggaagataccggatatctcgatgtgttgaaatattgtgcttcctagcatttcttctaacactgtttacaaatatcatttttgtggcggaagttctttttggtgatagcacttggacaaatgacctgaaagggaacactgaaaaccctattctacttccatatatcgtcgtagtcctgatatcatgtggatctattggttttgcactgttccttgctgttactccactaaaatcagcatgtaatgaagctgagagagcgttgtctgtgcactcataacagagagaaacgttggatgccactcgtcacagcaaaaccgacttctctgagaatagggcacatgaagcatatgaagaacagaggtccttagccatccttgttccacaggattcactgaaaggtgatagaaataattttcgtagcatatccgtcatctcaaattagcttttgatcacaagggcagtttctgacgctactctacatgcaaatcatatgtctagtaatccagaagttcatccttagcattgactggacagagcctatgtcaactgaaggttgtgcccttaaaattgactggacagagagcctatgtcaactgaaaaaggttgtgcaaatagactcggatgcctgcacggacaacgctctgtttgtggagaagtctgaatatttcttttatcaatcactatttctcttccatttaaattcacaattaacaggatggttcttatcatgactgtacctctgtttgtgggagtggaagtgttggcttatctacctattactcaaagaaacaccactgtctcacctgacacctccggtgattgctgcaaacagaatgctttgttggttgttgaatgaagcaaattaatgtggacagtggtactgcaaatcaggtggttcctctataggatacaccatgtgtggagtctgcaacaaggttctagtctcaacttgcacatatggtggctcttgcgagttgtgacatgatcgtctgacatcaaagcgtgaaagacgttaataaatctgttcaggagaagcagtcatctagcgtggcaagcttggaattgacaatgagtgaggtggacactggtagatctagtagcagggtcaaaggatgatttcttttaccaagtatgcttgcattcgtgaggcaaatcaatgatacattatttagagcgtgattggttgcctgctcggcccagcctgagcgtatccagtcattcaggcccatggcggcatgctaaagaggtgcaataggctattgtttggttactttgtttcatctcatgatggcccattagagcttgcctttggttgcaaggctgtacagacacttgagcatggcaagcctcccaactagagaacagaagacaccagtcatgacaacgatgttctttctcctcactaagtatgcaccttttcctcttgttgcctgccgcagacccactagtagcacctgcagctgcctcctagctcttcggagcctccccaaacagccttgaaacatcatcaaccttcatggcatctgtttgtagtgagctctcagcaaagtaagatgtggtacccattgcaaacttgccagttgcaagaccattgccaaagatcacttccatctgcttgtaattttctatttggcatgtttaagtactcagcattcttagcccttcagggtgtgcctatattgcaagctcacaaatgttagtgtaaggctggaattaggttagtgggcacttaggaaaggttacaaaatcacagatacaattaacatacatcttgatatggccacctatagtgcacttcatctagactgatcatgtgtcattcatcatcatcatcacaaaggggctatttgtttcggtttttcgctagattttagccgtcatagtcgacttctagataccagacacagaaaaccgaacgcttcgcatctcagtgcgcttcaatgaaaatcatttttttttgtaaaaatcgc

SEQ ID NO: 4998 - DNA, 3467 bp, Zea Mays
atggtccccaagcgcacacacgatcctcgttctggggatgaatctacggcagatgaatccagtttggaagcttcaaactttgaaaagaacactaaacctggcaagaccggcttaggttcgcactgtgaacctacacccgttgtgaatgctgctaagcttctatctccagaagcaaggcaatacgtgatagattgtggctttggtgcctttcttgagatgaaggctacgaagatcttttcccttgagacaatcatagtcatactgaacaagtgtgacgtcagctcttctgatgagtcctttacgattgtactttccgatgagcatcaattaaaggtcacaacagaggtagtgcacagtatttttggtcttcctactggagaaatatcaatagaccagaagaatttcacccatacagagttcctgaaattttggaaaattctgaaagctggaggacatgtgacagagtccacgaccagatgtagagggaaaccagtatctaccaaaagaatcactttacaatcgttgttgaattacatggaagctgaagctgacaaggaaaagcaagcctttgctttcttcaccattctgctatccaagctgctcctaacaacaacgagcaatgtgcccactaaggggcacgtggcgttgtgctcttacatcgagaacacgcaaaagtatgattggtgcaaatttgtttgtcaggatctgaaaaataaaatcagttcatggaaacagaaaccgacatcaaaaatcccgggatgcttactactgctgttgatatgttcgttcagaattgttgtcccggaacctaagctggaagaagcatctgctggtccactcatcaaacattatgatgacaacagaattttagagttgttaaaggctgttaaggatacaataaaattcaaagaagagagttcaagggctatcgccccagtcccactttgcattgggtcccactttgcattgcaaaaagaccgttttaacggtttacaaccagagggctcaaacagccagagaaggaaacaagtcttgaggcacaaagtaaacttattacatggccatattccagccaagatcatctatactagctcagagcacctgattgccaacctcaaggtgcagcgcaacgccaagcctcaaccccccaaagaaaagaaaccagcttccaaaaggcaaaagggtgaaggacaaaacttagggattcaaattcatgtggaagatttgctcaagggctatgaggttgatgagaatcagcggggcattctcttgaaagtaatagaagacgaagttgggtctagtgaaatcaagctcatggaaaaattgaagaagattgttgcgaatcgttccttctttatattttatgatgagatcaaaaacagggcccaaattaaagacaaagaaagaatacaacagatggagaagaatcttgtagttgatattgaagatgtgacgatttcagaggctgtatttgttaagaccttcaaaccatatggtcgcttgcatacttcgatcattgaaactctgattcgcatatggaataaatcatgggatgacaggattatgctttcacttcttgctgtagagcaaatactcggtaagagaaaagattatctcgaaagagaacttaaagactatgacaaagagaaaaagcacacgatttttgtgcctttcattattgatcaacactggtccttagttgtggtggaacctgggagagaagttataactgttcttgattccttttatgaattgcggctgtgcgaaaaacgtcatgaaaatctgatggctcaactgcaaaaaaatctttatcctttcataggcctggaaaatgctacgcaccgatttattacaccaccagtagttcagaatcaaaataacagtcatgattgtggttttcatatgcttctgtacataaagcgatatgaggatcaaaactaccataacattagtgaggacgaagtcatcatgtgccgcatagagactgcgatgttgctccttaacaatgaagacaacaagtgcagggacaaatttacagagagccatgcaataacgaaagagcaaaagaaagaaaaggtgagagataaagttgacgacaagaaaggagatagaaaagatgagagttcagacgatgattatgaggacaagtctgaggaggaggaggaggaggaggaggaggggacagataattggacccagaatttgggtaataaagaactgcgacagcaactcttgagaaagatagttgacaataaagattataagagtgttcagttcatgagtcctaagagtgacactgctcgtagagacactgatacatggaacttaacgggaagcgatattgcaaaaagctttgtggataaaactctttgtgaagacacggtggcgacgttttatgtacagtgtctcatgtatgatgaaggtcaactaggagctgatgaaaaaactgtgttttccaggatcttcctggaacctaaagttgctgaattgctgctgtcgaaggaatacaagcttgaggtagttgctgattacatgaagggacaatacaatgctcagcaaatttgtaaagcaatgcaaatatttgtgcccatctgccaagagaaccactggacgctttatgttgttaacaaaaaatatggacaaattgatatattggactcctcacccacggcagtcaatgataagatgaaatatcaccaaagcatcgcagctaaagtgaggcaaaggctgaatgctgttcttttgagaatctccaaggaagaacacatcgatttcatcgatttttcaaagtggggtttgccattgatacctaaaatacgtatcgctcatcaggacagaaacagtatggactgcgggttctttgtgatgtttttcatgaggcactataatccagatactcatctacttgagggtcataaacttgccgatgatcaagttgagggtgatcaacttgaggctactaaagatattaggagtaagattttctggtacttactccatcacaagttgaatgcatcagctgataaactacctccgggtatcatcaaccggaaatcagaaacttagcccaaatcagcctcgggagaagggaaaaatccttgaagatcatgtggttttgtttagagtgtagcctgggtggtgttagcaaaatgtttgaactgagcttggaatcgaagggccttcaggataaggatgccatgacgagaggccttaaaaaagaacttgatttgaataaatacaaatatatcctgaaatatgaggataagttcaactatatatttccagcatgccattatcagaagtcaataccaatgcgtgcgtttatcaacaatactggatctagtggggacttaagtgttacaagtattcggaagcgcagcattgatgagaccttctgccggctcttcttcggcagaagagctcagacgttgataagcctgagtcagcagaaaatcacaagaccttag

SEQ ID NO: 4999 - DNA, 3921 bp, Zea Mays
ctcgactccatcgtccaggcccccaccgtccgtctctccctccctcccccgtccgccttcgcctcgcctcaccgcgccgctcccaaaattccccgccccacggcttccccccgcaaaacccaccccacgaaacccaaaaaatcccgcgcggacacccgaatccccccgccttcccgctcccctcgcgctgcgccgatccgttcccccatggatccgcagtcggacgcgggcgcggcggtggtgctgggcgccgacccggcggcgctgacggcgctgctggcggacctcacctccccggccaacgaggcgcggtcgcgggcagagcagcagttccacgccttccgcaggtcccatccggacgcgctcgcgctgagcctcgcgcacctgctgctctccccggcgcacccctccgcgcccatcgccgccgtgctgctgcgtcgcctcatcgcgccgtcatcccagtccttcgtctaccctgcgctgtcgcccgccacgcagtcctcgctccgcgcgctgctgctctcggccgcttccgcgcctgcgctccccaggtctgtctctaggaagctctctgacgccgtcgccgagctcgcgtccttcctcctgcccgccaacgcgtggcccgacctactcagtttcctgtacaagtccatagattccacgtcctccccgccgggattgcaggagtcggcgctcaacatcctggcccggctggcctcccacctcgcggccagcttccccaacctccacgggctcctccacgccgctctctcccacccttcttccgccgatgtgcgcgtcgcggggctcaatgcggccatcagcctcatccagtcccttccttctgccgcggcccgcgaccaatttcaggacctcctcccggccatgatgcgcgctctcgccgagtcactcaactgcgggaacgagggctcagcccaggaggctctggagatgatgatcgagctcgctggcgcagagccgcggttcctgcgccgccagctgcctgacgtggtcgcgtccatgctgcagattgccgaggccccaggactagaggatggcacccgccaccttgccgttgagtttgtcgtcacccttgccgaggcacgggagcgtgcacccggaatgatgcggaagctgcctcggtacgttggtcggctatttgcggtgctcatgagtatgctgctcgatgtccaggatgaaccggcatggcatgccgcagtgtcagaggaggaagacgccggagagacgggaagctatgtttttgcacaggagtgtctggaccggctgtcaattgctgttggtggtaatacgattctgtccgtggcagctgagttgctcccatcgtttttctcctctgaagattggaagagacgccacgcggcactagtgaccatagctcagattgcagagggctctgctaagatgatgattaagaatctggagcaggttgttgggatggtgctgaattctttccaggaccctcacccacgggtgaggtgggcagcaattaatgcaatagggcagctttcaacggacctggggccagagttgcaaaatcagttgcaccatgttgtgctaccttcattagcttcagcaatggatgatgtccagaacccacgtgtacaggcacatgctgcatcagctattctgaacttcagtgaaaactgcagacctgatattttgacaccatacttggatgtaatagttgggaaacttctattgttactccagactgggaaccaaatggtgcaagaagctgctttaactgctttagcatcagcagcagattcttctcaggaacacttccaaaaatattatgatgcagtaatgccatacctcaaggctattctcatgaatgcaactgataaatccaacagaatgttgcgtgccaaatccatggaatgcatcagtttagttggtatggcagttgggaaacaaaagtttaaggatgatgctaagcaggtgatggaggtccttatgacactgcaaggatctcagatggaggctgatgaccctataacaagctacatgctgcaagcatgggcaagactgtgtaaatgccttggtcaggatttcttaccatacatgagtgttgttatgccccctctgctccagtctgctcagctcaaaccagatgtgagtgtcacttctgctggaccagaagatgaaaatggtgaatctgatgacgagggtgtcgagactattacactaggtgataagaggatcggcatccgaactagtctactagaggagaaagctacagcatgtaacatgctgtgttgctacgctgatgagctcaaggaaggatttttcccatggattgatcaggtcacgactacgcttgtacctctcattaagttctattttcatgaggaagttaggaaggcagctatttcagcaatgcctgagcttctacgttcagcaaaattggctatagaaaagggccaagctcaaggtcgtgataaatcctatcttaagcaactgtctgattacatagttccagcccttgttgaggccatgcataaagaacctgagccacaaatttgtgcaagcatactggaatcattgaatgaatctatacagctatcaggaacacttcttgatcaaaatcaagtaagatctgcagtggaaggtgtcaaagaagttatagttgcaagcactaacaggaggatagaacgaacagaaagggcaagggctgaggactttgattctgaagaagaggagctactcagagaagaaaacgaacaggaagatgaaatctttgaccaaattggtgattgtctaggcactctcgttaaaaccttcaagacttcttttattccgttcttcgatgaactctccatgtatttgacacctatgttggtattatgatacataccttccttctctattagaagcctgcatgagtgaaaatccagatgtcaggcaggctgcagtgtatggaattggcatttgtgccgaatgtggtggttctgcatttaggcctcacactggggaggccctatccagattatacaatgtaatcaaacatcctaatgccctggatttggataatgcaatggcctatgacaatgctgtttctgctcttggaaaaatatgccgatttcatcgtgatatcattgatgtatctcaggtaattcctgcctggttaagttgccttccgataaaaaatgatttaattgaggccaagcttgtccatgaacagctgtgtgtgatgcttgagcagtctgagagggagcttttgggtcataataatcagtatcttccaaagattgtgtctgtttttgcagagatattatgtgcgggcaaagatctagcaacagaacagactgccagcaggatggttaatctactaaggcaacttcaggcaacattgcctccttcagtattagcctcgacatggtcttctctacaaccacagcaacagctcgctctacagtccgtgttgtcgtcatagctaacctaaaatagcctcaactgtgtaaagcatatgagtcttcacagcttgacctttcgtgttctatttatgcgcttttgagccagagccagggttcctggggtttgctttcgcgttcatgtgcccttaggttttgtacaaggggcactgcttgcatccggtgtgtaatatcggctgcagttgcagaactgcacggatgtgtacgagactgggctctctccacatcgtcgattaagttgtaaagcagtatatcttgctcgcttagtaattttagttgggttgaaagaattgtaaattaaaacaattttggtagttgattttaatgtcgtatttcttataccatcagcatgggaaattttgtgttcaaaaaaagaagagaaaaagcagcttggttatcttgtgtcgtgtgccttttctcgatgtgtacttattcttcgtatgtatggggatagtaacgcatttgc

SEQ ID NO: 5000 - DNA, 3914 bp, Zea Mays
caccgtccgtctctccctccctcccccgtccgccttcgcctcgcctcaccgcgccgctcccaaaattccccgccccacggcttccccccgcaaaacccaccccacgaaacccaaaaaatcccgcgcggacacccgaatccccccgccttcccgctcccctcgcgctgcgccgatccgttcccccatggatccgcagtcggacgcgggcgcggcggtggtgctgggcgccgacccggcggcgctgacggcgctgctggcggacctcacctccccggccaacgaggcgcggtcgcgggcagagcagcagttccacgccttccgcaggtcccatccggacgcgctcgcgctgagcctcgcgcacctgctgctctccccggcgcacccctccgcgcccatcgccgccgtgctgctgcgtcgcctcatcgcgccgtcatcccagtccttcgtctaccctgcgctgtcgcccgccacgcagtcctcgctccgcgcgctgctgctctcggccgcttccgcgcctgcgctccccaggtctgtctctaggaagctctctgacgccgtcgccgagctcgcgtccttcctcctgcccgccaacgcgtggcccgacctactcagtttcctgtacaagtccatagattccacgtcctccccgccgggattgcaggagtcggcgctcaacatcctggcccggctggcctcccacctcgcggccagcttccccaacctccacgggctcctccacgccgctctctcccacccttcttccgccgatgtgcgcgtcgcggggctcaatgcggccatcagcctcatccagtcccttccttctgccgcggcccgcgaccaatttcaggacctcctcccggccatgatgcgcgctctcgccgagtcactcaactgcgggaacgagggctcagcccaggaggctctggagatgatgatcgagctcgctggcgcagagccgcggttcctgcgccgccagctgcctgacgtggtcgcgtccatgctgcagattgccgaggccccaggactagaggatggcacccgccaccttgccgttgagtttgtcgtcacccttgccgaggcacgggagcgtgcacccggaatgatgcggaagctgcctcggtacgttggtcggctatttgcggtgctcatgagtatgctgctcgatgtccaggatgaaccggcatggcatgccgcagtgtcagaggaggaagacgccggagagacgggaagctatgtttttgcacaggagtgtctggaccggctgtcaattgctgttggtggtaatacgattctgtccgtggcagctgagttgctcccatcgtttttctcctctgaagattggaagagacgccacgcggcactagtgaccatagctcagattgcagagggctctgctaagatgatgattaagaatctggagcaggttgttgggatggtgctgaattctttccaggaccctcacccacgggtgaggtgggcagcaattaatgcaatagggcagctttcaacggacctggggccagagttgcaaaatcagttgcaccatgttgtgctaccttcattagcttcagcaatggatgatgtccagaacccacgtgtacaggcacatgctgcatcagctattctgaacttcagtgaaaactgcagacctgatattttgacaccatacttggatgtaatagttgggaaacttctattgttactccagactgggaaccaaatggtgcaagaagctgctttaactgctttagcatcagcagcagattcttctcaggaacacttccaaaaatattatgatgcagtaatgccatacctcaaggctattctcatgaatgcaactgataaatccaacagaatgttgcgtgccaaatccatggaatgcatcagtttagttggtatggcagttgggaaacaaaagtttaaggatgatgctaagcaggtgatggaggtccttatgacactgcaaggatctcagatggaggctgatgaccctataacaagctacatgctgcaagcatgggcaagactgtgtaaatgccttggtcaggatttcttaccatacatgagtgttgttatgccccctctgctccagtctgctcagctcaaaccagatgtgagtgtcacttctgctggaccagaagatgaaaatggtgaatctgatgacgagggtgtcgagactattacactaggtgataagaggatcggcatccgaactagtctactagaggagaaagctacagcatgtaacatgctgtgttgctacgctgatgagctcaaggaaggatttttcccatggattgatcaggtcacgactacgcttgtacctctcattaagttctattttcatgaggaagttaggaaggcagctatttcagcaatgcctgagcttctacgttcagcaaaattggctatagaaaagggccaagctcaaggtcgtgataaatcctatcttaagcaactgtctgattacatagttccagcccttgttgaggccatgcataaagaacctgagccacaaatttgtgcaagcatactggaatcattgaatgaatctatacagctatcaggaacacttcttgatcaaaatcaaaaagggcaagggctgaggactttgattctgaagaagaggagctactcagagaagaaaacgaacaggaagatgaaatctttgaccaaattggtgattgtctaggcactctcgttaaaaccttcaagacttcttttattccgttcttcgatgaactctccatgtatttgacacctatgttgggtaagaataaatcaccagaagaaagaaggattgccatatgcatttttgatgatgttgctgagcattgccgtgaagcagcagttaggtattatgatacataccttccttctctattagaagcctgcatgagtgaaaatccagatgtcaggcaggctgcagtgtatggaattggcatttgtgccgaatgtggtggttctgcatttaggcctcacactggggaggccctatccagattatacaatgtaatcaaacatcctaatgccctggatttggataatgcaatggcctatgacaatgctgtttctgctcttggaaaaatatgccgatttcatcgtgatatcattgatgtatctcaggtaattcctgcctggttaagttgccttccgataaaaaatgatttaattgaggccaagcttgtccatgaacagctgtgtgtgatgcttgagcagtctgagagggagcttttgggtcataataatcagtatcttccaaagattgtgtctgtttttgcagagatattatgtgcgggcaaagatctagcaacagaacagactgccagcaggatggttaatctactaaggcaacttcaggcaacattgcctccttcagtattagcctcgacatggtcttctctacaaccacagcaacagctcgctctacagtccgtgttgtcgtcatagctaacctaaaatagcctcaactgtgtaaagcatatgagtcttcacagcttgacctttcgtgttctatttatgcgcttttgagccagagccagggttcctggggtttgctttcgcgttcatgtgcccttaggttttgtacaaggggcactgcttgcatccggtgtgtaatatcggctgcagttgcagaactgcacggatgtgtacgagactgggctctctccacatcgtcgattaagttgtaaagcagtatatcttgctcgcttagtaattttagttgggttgaaagaattgtaaattaaaacaattttggtagttgattttaatgtcgtatttcttataccatcagcatgggaaattttgtgttcaaaaaaagaagagaaaaagcagcttggttatcttgtgtcgtgtgccttttctcgatgtgtacttattcttcgtatgtatggggatagtaacgcatttgc

SEQ ID NO: 5001 - DNA, 3572 bp, Zea Mays
tccgccttcgcctcgcctcaccgcgccgctcccaaaattccccgccccacggcttccccccgcaaaacccaccccacgaaacccaaaaaatcccgcgcggacacccgaatccccccgccttcccgctcccctcgcgctgcgccgatccgttcccccatggatccgcagtcggacgcgggcgcggcggtggtgctgggcgccgacccggcggcgctgacggcgctgctggcggacctcacctccccggccaacgaggcgcggtcgcgggcagagcagcagttccacgccttccgcaggtcccatccggacgcgctcgcgctgagcctcgcgcacctgctgctctccccggcgcacccctccgcgcccatcgccgccgtgctgctgcgtcgcctcatcgcgccgtcatcccagtccttcgtctaccctgcgctgtcgcccgccacgcagtcctcgctccgcgcgctgctgctctcggccgcttccgcgcctgcgctccccagattgccgaggccccaggactagaggatggcacccgccaccttgccgttgagtttgtcgtcacccttgccgaggcacgggagcgtgcacccggaatgatgcggaagctgcctcggtacgttggtcggctatttgcggtgctcatgagtatgctgctcgatgtccaggatgaaccggcatggcatgccgcagtgtcagaggaggaagacgccggagagacgggaagctatgtttttgcacaggagtgtctggaccggctgtcaattgctgttggtggtaatacgattctgtccgtggcagctgagttgctcccatcgtttttctcctctgaagattggaagagacgccacgcggcactagtgaccatagctcagattgcagagggctctgctaagatgatgattaagaatctggagcaggttgttgggatggtgctgaattctttccaggaccctcacccacgggtgaggtgggcagcaattaatgcaatagggcagctttcaacggacctggggccagagttgcaaaatcagttgcaccatgttgtgctaccttcattagcttcagcaatggatgatgtccagaacccacgtgtacaggcacatgctgcatcagctattctgaacttcagtgaaaactgcagacctgatattttgacaccatacttggatgtaatagttgggaaacttctattgttactccagactgggaaccaaatggtgcaagaagctgctttaactgctttagcatcagcagcagattcttctcaggaacacttccaaaaatattatgatgcagtaatgccatacctcaaggctattctcatgaatgcaactgataaatccaacagaatgttgcgtgccaaatccatggaatgcatcagtttagttggtatggcagttgggaaacaaaagtttaaggatgatgctaagcaggtgatggaggtccttatgacactgcaaggatctcagatggaggctgatgaccctataacaagctacatgctgcaagtatgttagaacttgaaaccttgttctcaacttttttttgtcaatttaaatctttttttctcatttgatctatatgttcgcctctgtaggcatgggcaagactgtgtaaatgccttggtcaggatttcttaccatacatgagtgttgttatgccccctctgctccagtctgctcagctcaaaccagatgtgagtgtcacttctgctggaccagaagatgaaaatggtgaatctgatgacgagggtgtcgagactattacactaggtgataagaggatcggcatccgaactagtctactagaggagaaagctacagcatgtaacatgctgtgttgctacgctgatgagctcaaggaaggatttttcccatggattgatcaggtcacgactacgcttgtacctctcattaagttctattttcatgaggaagttaggaaggcagctatttcagcaatgcctgagcttctacgttcagcaaaattggctatagaaaagggccaagctcaaggtcgtgataaatcctatcttaagcaactgtctgattacatagttccagcccttgttgaggccatgcataaagaacctgagccacaaatttgtgcaagcatactggaatcattgaatgaatctatacagctatcaggaacacttcttgatcaaaatcaagtaagatctgcagtggaaggtgtcaaagaagttatagttgcaagcactaacaggaggatagaacgaacagaaagggcaagggctgaggactttgattctgaagaagaggagctactcagagaagaaaacgaacaggaagatgaaatctttgaccaaattggtgattgtctaggcactctcgttaaaaccttcaagacttcttttattccgttcttcgatgaactctccatgtatttgacacctatgttgggtaagaataaatcaccagaagaaagaaggattgccatatgcatttttgatgatgttgctgagcattgccgtgaagcagcagttaggtattatgatacataccttccttctctattagaagcctgcatgagtgaaaatccagatgtcaggcaggctgcagtgtatggaattggcatttgtgccgaatgtggtggttctgcatttaggcctcacactgggggtatgaggccctatccagattatacaatgtaatcaaacatcctaatgccctggatttggataatgcaatggcctatgacaatgctgtttctgctcttggaaaaatatgccgatttcatcgtgatatcattgatgtatctcaggtaattcctgcctggttaagttgccttccgataaaaaatgatttaattgaggccaagcttgtccatgaacagctgtgtgtgatgcttgagcagtctgagagggagcttttgggtcataataatcagtatcttccaaagattgtgtctgtttttgcagagatattatgtgcgggcaaagatctagcaacagaacagactgccagcaggatggttaatctactaaggcaacttcaggcaacattgcctccttcagtattagcctcgacatggtcttctctacaaccacagcaacagctcgctctacagtccgtgttgtcgtcatagctaacctaaaatagcctcaactgtgtaaagcatatgagtcttcacagcttgacctttcgtgttctatttatgcgcttttgagccagagccagggttcctggggtttgctttcgcgttcatgtgcccttaggttttgtacaaggggcactgcttgcatccggtgtgtaatatcggctgcagttgcagaactgcacggatgtgtacgagactgggctctctccacatcgtcgattaagttgtaaagcagtatatcttgctcgcttagtaattttagttgggttgaaagaattgtaaattaaaacaattttggtagttgattttaatgtcgtatttcttataccatcagcatgggaaattttgtgttcaaaaaaagaagagaaaaagcagcttggttatcttgtgtcgtgtgccttttctcgatgtgtacttattcttcgtatgtatggggatagtaacgcatttgc

SEQ ID NO: 5002 - DNA, 2539 bp, Zea Mays
agaacacacaagagatcaaaaggcacatgctgcatcagctattctgaacttcagtgaaaactgcagacctgatattttgacaccatacttggatgtaatagttgggaaacttctattgttactccagactgggaaccaaatggtgcaagaagctgctttaactgctttagcatcagcagcagattcttctcaggaacacttccaaaaatattatgatgcagtaatgccatacctcaaggctattctcatgaatgcaactgataaatccaacagaatgttgcgtgccaaatccatggaatgcatcagtttagttggtatggcagttgggaaacaaaagtttaaggatgatgctaagcaggtgatggaggtccttatgacactgcaaggatctcagatggaggctgatgaccctataacaagctacatgctgcaagcatgggcaagactgtgtaaatgccttggtcaggatttcttaccatacatgagtgttgttatgccccctctgctccagtctgctcagctcaaaccagatgtgagtgtcacttctgctggaccagaagatgaaaatggtgaatctgatgacgagggtgtcgagactattacactaggtgataagaggatcggcatccgaactagtctactagaggagaaagctacagcatgtaacatgctgtgttgctacgctgatgagctcaaggaaggatttttcccatggattgatcaggtcacgactacgcttgtacctctcattaagttctattttcatgaggaagttaggaaggcagctatttcagcaatgcctgagcttctacgttcagcaaaattggctatagaaaagggccaagctcaaggtcgtgataaatcctatcttaagcaactgtctgattacatagttccagcccttgttgaggccatgcataaagaacctgagccacaaatttgtgcaagcatactggaatcattgaatgaatctatacagctatcaggaacacttcttgatcaaaatcaagtaagatctgcagtggaaggtgtcaaagaagttatagttgcaagcactaacaggaggatagaacgaacagaaagggcaagggctgaggactttgattctgaagaagaggagctactcagagaagaaaacgaacaggaagatgaaatctttgaccaaattggtgattgtctaggcactctcgttaaaaccttcaagacttcttttattccgttcttcgatgaactctccatgtatttgacacctatgttgggtaagaataaatcaccagaagaaagaaggattgccatatgcatttttgatgatgttgctgagcattgccgtgaagcagcagttaggtattatgatacataccttccttctctattagaagcctgcatgagtgaaaatccagatgtcaggcaggctgcagtgtatggaattggcatttgtgccgaatgtggtggttctgcatttaggcctcacactggggaggccctatccagattatacaatgtaatcaaacatcctaatgccctggatttggataatgcaatggcctatgacaatgctgtttctgctcttggaaaaatatgccgatttcatcgtgatatcattgatgtatctcaggtaattcctgcctggttaagttgccttccgataaaaaatgatttaattgaggccaagcttgtccatgaacagctgtgtgtgatgcttgagcagtaagtaattcccacaatttgtttctgcagagttgcttttcctgagattaaccaatactccctatcatctagacttctgttttatttcacgtttctttaacagctattattttttcgtgtaatcaacgttcaacaggtctgagagggagcttttgggtcataataatcagtatcttccaaagattgtgtctgtttttgcagagatattatgtgcgggcaaagatctagcaacagaacagactgccagcaggatggttaatctactaaggcaacttcaggcaacattgcctccttcagtattagcctcgacatggtcttctctacaaccacagcaacagctcgctctacagtccgtgttgtcgtcatagctaacctaaaatagcctcaactgtgtaaagcatatgagtcttcacagcttgacctttcgtgttctatttatgcgcttttgagccagagccagggttcctggggtttgctttcgcgttcatgtgcccttaggttttgtacaaggggcactgcttgcatccggtgtgtaatatcggctgcagttgcagaactgcacggatgtgtacgagactgggctctctccacatcgtcgattaagttgtaaagcagtatatcttgctcgcttagtaattttagttgggttgaaagaattgtaaattaaaacaattttggtagttgattttaatgtcgtatttcttataccatcagcatgggaaattttgtgttcaaaaaaagaagagaaaaagcagcttggttatcttgtgtcgtgtgccttttctcgatgtgtacttattcttcgtatgtatggggatagtaacgcatttgc

SEQ ID NO: 5003 - DNA, 1069 bp, Zea Mays
cgacagtgcgcgcccgcgctgccaacacttaccccacctgacagtcggatcgagctgcccgcgcctccgtcccgtcgctttccatgatcgacggcgccgccgaaaggcccagggaatttaccccaatggcggggaatttcggcgtcaggcggggcggggtaacgagggaaacgaaggaggaaaaaaaaatcggggcccggtggggtcgtggcaagcgctgggattggtcggcgccagctcggccactagcagggggcaacgtggtggtggttcccgtccttctccttcccttccctcccccaccgggccccagtccccttcgcgctgcctgcccccttcgatctcctgctctctttccccttctctctctatctactgttcttgcttgagctgcgatcctcttcctgaggcgcgggcgttggatgtgatacgtggttggctccgcgccatctcctccggtggcgatgagctccaagtccacctgctgctgcttatgagatcttgctgaatgaattttgtggtttttgagccatcctggtaaaccttggcatggccagtggagagacaaacgcagggaacacccagagggggaatacccttccaaatggtgacatctatgttggcaactttgctggtttagttcctcatggatttggaaagtatatgtggacagatggaactctttattatggcgagtgggatacaagcaagatgagtggtagaggagcaattcagtggccttcaggtgcttcatatgatggagatctttgtggaggtttcattgacggaacaggcagtttcaaaggagttgatggatctgtatataaaggttcttggaggatgaatagaaagcatggaatgggcacaatggtttacgccaacgatgatacttacgaaggtttatggaatgagggcttgccagatggatttggtaaatatacatgggttgatggcaacatctacattggactttggaaatctggtaaaatgaatggcagaggagtgatgcaatggacaaatggcgatactcttgactgtaattggcttaatggactggctcatggaaagt

SEQ ID NO: 5004 - DNA, 983 bp, Zea Mays
cgacagtgcgcgcccgcgctgccaacacttaccccacctgacagtcggatcgagctgcccgcgcctccgtcccgtcgctttccatgatcgacggcgccgccgaaaggcccagggaatttaccccaatggcggggaatttcggcgtcaggcggggcggggtaacgagggaaacgaaggaggaaaaaaaaatcggggcccggtggggtcgtggcaagcgctgggattggtcggcgccagctcggccactagcagggggcaacgtggtggtggttcccgtccttctccttcccttccctcccccaccgggccccagtccccttcgcgctgcctgcccccttcgatctcctgctctctttccccttctctctctatctactgttcttgcttgagctgcgatcctcttcctgaggcgcgggcgttggatgtgatacgtggttggctccgcgccatctcctccggtggcgatgagctccaagtccacctgctgctgcttatgagatcttgctgaatgaattttgtggtttttgagccatcctggtaaaccttggcatggccagtggagagacaaacgcagggaacacccagagatggaactctttattatggcgagtgggatacaagcaagatgagtggtagaggagcaattcagtggccttcaggtgcttcatatgatggagatctttgtggaggtttcattgacggaacaggcagtttcaaaggagttgatggatctgtatataaaggttcttggaggatgaatagaaagcatggaatgggcacaatggtttacgccaacgatgatacttacgaaggtttatggaatgagggcttgccagatggatttggtaaatatacatgggttgatggcaacatctacattggactttggaaatctggtaaaatgaatggcagaggagtgatgcaatggacaaatggcgatactcttgactgtaattggcttaatggactggctcatggaaagt

SEQ ID NO: 5005 - DNA, 440 bp, Zea Mays
agaaatcttgggagcactactatatagacattttaatataaattatggaactctttattatggcgagtgggatacaagcaagatgagtggtagaggagcaattcagtggccttcaggtgcttcatatgatggagatctttgtggaggtttcattgacggaacaggcagtttcaaaggagttgatggatctgtatataaaggttcttggaggatgaatagaaagcatggaatgggcacaatggtttacgccaacgatgatacttacgaaggtttatggaatgagggcttgccagatggatttggtaaatatacatgggttgatggcaacatctacattggactttggaaatctggtaaaatgaatggcagaggagtgatgcaatggacaaatggcgatactcttgactgtaattggcttaatggactggctcatggaaagt

SEQ ID NO: 5006 - DNA, 1014 bp, Zea Mays
aaaatacaagaaaaataaaaataagaataaatacaaactgtagaaagtaaggtacttatgatagatttctactttatttttttcgaacaacgcaggagatctacgagtcattacattaagaagaaagaaacagataagtccagcaaggctggataggatacactaaacccacacccactcacaaaacctgaaaaactagccaaaacaagcaaaggcttagaccaggaccaaccgaaaactggtgggaaaggatgcgacaagatcaactttagtctaagattggcagatatcacttgactgtatgttcctggagtcccagtctatcatcgattatagcatgctcttggggatccattttagagctccccatcacctgaagacatcctcatcacatcagagcagtcttgaaagatgcggaattccagatagtgatctgttgcagtatgaggaaaaaagttcctggaagggatttttgcttgttgctcatgagccaggcgctacagttggtggttcccacataagaggaagtatggttagagcatcggaagctggttatgaagaagttgatcttgttttgccaggcaccggacggttccgtgtgcagttaggggtgaatatgccagctcgagctcggaaagtgcacgaggacacgaacacagaacttgaaaacccagataccattgaggagtacgatgttgttctttaccttggtatcatagacatattacaggaatacaatatgtcaaaaagggtcgagcacgcagtcaaatctctcaagtttgatcccctttcaatatcagctgttgatcctgatttgtattcgaaacgatttgtaaaattcctggagagtgttttccctgaacaggactgagtaggcacaataaagtacatatatagtagtgccgctggcctcatttttcccccttgtataaaatgttaacatgttctcagttattcagcacggcttctgtgcacctccaagtgttattatgttattttactaagatgtcatgt

SEQ ID NO: 5007 - DNA, 361 bp, Zea Mays
tgcgacaagatcaactttagtctaagattggcagatatcacttgactgtatgttcctggagtcccagtctatcatcgattatagcatgctcttggggatccattttagagctccccatcacctgaagacatcctcatcacatcagagcagtcttgaaagatgcggaattccagatagtgatctgttgcagtatgaggaaaaaagttcctggaagggatttttgcttgttgctcatgagccaggcgctacagttggtggttcccacataagaggaagtatggttagagcatcggaagctggttatgaagaagttgatcttgttttgccaggcaccggacggtaactgtttactccggaatcg

SEQ ID NO: 5008 - DNA, 1943 bp, Zea Mays
gatcttgcatcgttttacggtgaggagtacgcgtggagcgggtcctgggccgaacgcccgaacccgtgcatcacaaaggagcaaagacgacaataatttgtttctgggtcgacaacaatttgccgggcacacccaagacccgcggaagccacgacgacaagcctccatcgcctcttgttgtttgcgggccccatacgtcagagaccacaagcccgaggcttaactctccctgccgctaatccctcgcgccgccggagggaagcaagagatagatctgtccgcggccatggcggcggcggcggcggcggcggagcaaggcgtggacgccgcgaggaaagaggaggaggaggagcaggtagtgaatccgtgggaggtgtcggcggggaagggcggcatcgactacgacaagctcgtggaccagttcggctgccagcgcatcgacgacgcgctcgtggaccgcatcgcacgcctcaccgcccgaccaccgcactgcttcctccgccgaggcctcttcttcgcccaccgtgatttgaacgagatactggatttgtatgagaacgggcagaagttctacctctacacggggagggggccctcgtcggaggccctgcacctcggccacctcatccccttcatgttcacaaaatacttgcaggaggcttttaaggtgcccctagttatacaactgactgacgatgagaagtacttgtggaaaaacttgactattcaggaaagtaaaaggcttgcccgtgaaaatgctaaagatattatagcatgtggttttgacattgaaagaacattcattttctctgatttttcttttgttggaggtgctttttatgaaaacatgatgcaagttgccagatgtgtaactatgaataaggctattggaatatttgggttcaatcttgaggatcacataggaaaggttagctttcctccagtgcaggcagtcccatcattcccttcttcatttccccatctcttcgctggcaaggaccaactgcggtgtcttatcccatgtgcaatagatcaggcagacttagtgatggaggctcccacatggacgggggaaagggataaacaaggcgggccctttccctgcaaatgtggagatgatgtttcgaatccacgacctggtgactcagatccatattttaggatgactcgtgatgttgctcctagaattggttatcagaaaccatcactgattgaatctagattttttcctgctcttcagggggagaacacaaaaatgtcagctagtgacgcaaattcggcgatatacgtgacagatagtgctaaagaaataaagacaaaggtgaataaatatgccttctcaggtggccaggactcaatagagctccatagaaaacttggcgctaaccttgatgtggatgtcccaatcaaatacctgaacttcttccttgaagatgatgacgagcttgcgcacataaaaaaggagtacaaggagggaaggatgttgactggtgaagtgaagcaacggcttattgcagttctatctgagattgttgctagacaccagagagctagagctcaagtgaccgaagagatggtcgatgcattcatggcagtgaggcctcttcccaatatgtttggctgagcatcacggcgacaacttgaacaaacatttttgttatcagggagaattttaagagtctttagaattgtcgtgccaccataagtatcccctgtgttttacttcttcgggatttaggcaaacctggccaaacatcccatgtggtggctgtggttgattttgtaaactcatacttgatatggtatcaatgattcaattcagacattttttttcaagcatatgcatgccattgtaatagagagcacctcttttttagttataaacggatgttgcttttgttcaattcaataaccactgtgtttgaatggaagatgaacaatca

SEQ ID NO: 5009 - DNA, 1760 bp, Zea Mays
gggtcgacaacaatttgccgggcacacccaagacccgcggaagccacgacgacaagcctccatcgcctcttgttgtttgcgggccccatacgtcagagaccacaagcccgaggcttaactctccctgccgctaatccctcgcgccgccggagggaagcaagagatagatctgtccgcggccatggcggcggcggcggcggcggcggagcaaggcgtggacgccgcgaggaaagaggaggaggaggagcaggtagtgaatccgtgggaggtgtcggcggggaagggcggcatcgactacgacaagctcgtggaccagttcggctgccagcgcatcgacgacgcgctcgtggaccgcatcgcacgcctcaccgcccgaccaccgcactgcttcctccgccgaggcctcttcttcgcccaccgtgatttgaacgagatactggatttgtatgagaacgggcagaagttctacctctacacggggagggggccctcgtcggaggccctgcacctcggccacctcatccccttcatgttcacaaaatacttgcaggaggcttttaaggtgcccctagttatacaactgactgacgatgagaagtacttgtggaaaaacttgactattcaggaaagtaaaaggcttgcccgtgaaaatgctaaagatattatagcatgtggttttgacattgaaagaacattcattttctctgatttttcttttgttggaggtgctttttatgaaaacatgatgcaagttgccagatgtgtaactatgaataaggctattggaatatttgggttcaatcttgaggatcacataggaaaggttagctttcctccagtgcaggcagtcccatcattcccttcttcatttccccatctcttcgctggcaaggaccaactgcggtgtcttatcccatgtgcaatagatcaggatccatattttaggatgactcgtgatgttgctcctagaattggttatcagaaaccatcactgattgaatctagattttttcctgctcttcagggggagaacacaaaaatgtcagctagtgacgcaaattcggcgatatacgtgacagatagtgctaaagaaataaagacaaaggtgaataaatatgccttctcaggtggccaggactcaatagagctccatagaaaacttggcgctaaccttgattttgtgaatggctggttttttgttgcgatgaaggtggatgtcccaatcaaatacctgaacttcttccttgaagatgatgacgagcttgcgcacataaaaaaggagtacaaggagggaaggatgttgactggtgaagtgaagcaacggcttattgcagttctatctgagattgttgctagacaccagagagctagagctcaagtgaccgaagagatggtcgatgcattcatggcagtgaggcctcttcccaatatgtttggctgagcatcacggcgacaacttgaacaaacatttttgttatcagggagaattttaagagtctttagaattgtcgtgccaccataagtatcccctgtgttttacttcttcgggatttaggcaaacctggccaaacatcccatgtggtggctgtggttgattttgtaaactcatacttgatatggtatcaatgattcaattcagacattttttttcaagcatatgcatgccattgtaatagagagcacctcttttttagttataaacggatgttgcttttgttcaattcaataaccactgtgtttgaatggaagatgaacaatca

SEQ ID NO: 5010 - DNA, 1906 bp, Zea Mays
agatctcgaaacccaacacactaggcctcgccctttcgcccgacacggacatcccctggcccctgccgctccccacccatctccgatctgcgattccttccagccgacgcctccgcatccacctccccggagccaccagcggccagccactggccgtccaaccatcgtccccaagcggcgagttgcggggtgtggcgaagatgatcagcaggcagctcgtgctgacctacctctacctgctgatctacatctgcctctcttcgggcgtcatcctgttcaacaaatgggtcctttctccaaagtacttcaaattccctttccctatcacgcttacgatgattcacatggcattttctggaatcgtgacattcttccttgtccgagtttttaaggttgttgcacccgtcaagatgactttccatattttccccccttaatgcagatatgccacatgtgtgattccaattagtgcctttttcgcttcaagtctgtggtttggcaacacggcgtacttgtatatttccgtggccttcattcagatgctcaaggccttgatgcctgtagcaacatttataatggctgttttctgtggtactgacaaattaagatgggacctcttcttgaacatggtattggtcagtgttggtgttgtagtttcatcttatggtgagatccactttaatgtgattggaaccttgtaccaagtcactggtatctttgcggaagccctcaggctggtcctaactcaggtccttctccaaaagaagggcttaaccctgaatcccattacaagcttgtattacatagccccttgcagtttcatcttcctgtttattccatggtatttactggaaaagccagaaatggacgtgactcaaattcaattcaactattcaatatttttcctgaatgcactttctgcattcgcattgaacatatccatattcttagttattggaagaactggagctgtcaccattcgagttgctggtgttctgaaggactggatacttattgctctctcaactattatcttccctgaatccgttattacaagtctcaacataattggatacgcagttgcgctctctggtgttgtcctgtacaattatctgaagatgaaagatgtcagagcaaaccagcttccagcagataataattctgatagggctacaaaggacaagaagtcttctagtatgttcaggcctgacaattccatggacaacagtgatgggactgtagcaggaggcctggcatcagaagctgcagcagttgatgaggaagcccctttgatcccttctgcacgcctctcctacgttacacggacccaaacaggcagctccagtaacagataaccatggtgtacctgttctgtgggttgaccaccatatatttttgttccggtgaacctgaaagaggtgctggtatacgtgtggaaaagaatatggttaaggaagctcctgcaagtcgcacctcatctcataccatgacgacacctggatgtctcctctcgatgtacctttttcgctaggcgtgtatatttcggggagatacctagaggtggattagagaacttgaagagataggctataacttttgcttagtatttggagaaacacgttaggccatgtgttggctatagtatttccttaaccaaacatatggaaatggtgttaaacgttagatgttgtgaagcacttcataggctctaatttgagtgttagtgttgtttccttttcggttctttcattgttcccttaagtactagcggattaccaagtgtgcatccggcaaattttgcaattgtctggactctgatatgtttttaggagtacacctactgcaggctgccgtattgctgcataccctaattttgcaagtgaagttctactctggcgtgtgttcc

SEQ ID NO: 5011 - DNA, 1119 bp, Zea Mays
caatattaatgaatgtgcaaaaatcaagagtttcatcttcctgtttattccatggtatttactggaaaagccagaaatggacgtgactcaaattcaattcaactattcaatatttttcctgaatgcactttctgcattcgcattgaacatatccatattcttagttattggaagaactggagctgtcaccattcgagttgctggtgttctgaaggactggatacttattgctctctcaactattatcttccctgaatccgttattacaagtctcaacataattggatacgcagttgcgctctctggtgttgtcctgtacaattatctgaagatgaaagatgtcagagcaaaccagcttccagcagataataattctgatagggctacaaaggacaagaagtcttctagtatgttcaggcctgacaattccatggacaacagtgatgggactgtagcaggaggcctggcatcagaagctgcagcagttgatgaggaagcccctttgatcccttctgcacgcctctcctacgttacacggacccaaacaggcagctccagtaacagataaccatggtgtacctgttctgtgggttgaccaccatatatttttgttccggtgaacctgaaagaggtgctggtatacgtgtggaaaagaatatggttaaggaagctcctgcaagtcgcacctcatctcataccatgacgacacctggatgtctcctctcgatgtacctttttcgctaggcgtgtatatttcggggagatacctagaggtggattagagaacttgaagagataggctataacttttgcttagtatttggagaaacacgttaggccatgtgttggctatagtatttccttaaccaaacatatggaaatggtgttaaacgttagatgttgtgaagcacttcataggctctaatttgagtgttagtgttgtttccttttcggttctttcattgttcccttaagtactagcggattaccaagtgtgcatccggcaaattttgcaattgtctggactctgatatgtttttaggagtacacctactgcaggctgccgtattgctgcataccctaattttgcaagtgaagttctactctggcgtgtgttcc

SEQ ID NO: 5012 - DNA, 861 bp, Zea Mays
atacaaatcaatctcaaaattaatgggaactgaatgggaaaacatttagaacagagaacaggttgaatgtaaattttcatggatctaacctattcatactacataccagattaaacattctgaacatggaaaatacatgtgttttaacggagtaagtgattgggctttatatttattgagaaaatatagtcataaatttatagggtacatatgagcagatttaattggattagttaaaatcatagaacaaagttaaataagtgttacaaatccaaatcacaaatgcataggattacaggaaaaaatattacctcaactgcaggatctgattcatatgagccatcatgcttaatggcactaccatttgtcactgcagttctgtagcagtaagagaaagtaaccatatcatgcttcctgaagcaacaaataatactgcggcagcatactactcgactgtactcgttcagaaacaagagtacctgatatattcacattccttcgaaaatgtatgcaggaattcctctttttctaccaagttttcgagtcagatactgcttcaattcctctttttctggaggaggcccggccactgtagcccctgcttgatgtcaaagttgatgacgtggacgcggtcatggctgccgaacgcgcggagcacccggtcgttgagggtgaagtagaaatacacgtacaagaaagaccgttctaacttggaagaaggaaaaaatcagacaactatatcaactgaacaaagacatcaggcgtcacctggctgctagaacatcattcatggcttcctgctcctccggttggatggtgatgtccaccttgtctgacttttgattcttaagtagatccacc

SEQ ID NO: 5013 - DNA, 874 bp, Zea Mays
atacaaatcaatctcaaaattaatgggaactgaatgggaaaacatttagaacagagaacaggttgaatgtaaattttcatggatctaacctattcatactacataccagattaaacattctgaacatggaaaatacatgtgttttaacggagtaagtgattgggctttatatttattgagaaaatatagtcataaatttatagggtacatatgagcagatttaattggattagttaaaatcatagaacaaagttaaataagtgttacaaatccaaatcacaaatgcataggattacaggaaaaaatattacctcaactgcaggatctgattcatatgagccatcatgcttaatggcactaccatttgtcactgcagttctgtagcagtaagagaaagtaaccatatcatgcttcctgaagcaacaaataatactgcggcagcatactactcgactgtactcgttcagaaacaagagtacctgatatattcacattccttcgaaaatgtatgcaggaattcctctttttctaccaagttttctacaaaaatgttcgagtcagatactgcttcaattcctctttttctggaggaggcccggccactgtagcccctgcttgatgtcaaagttgatgacgtggacgcggtcatggctgccgaacgcgcggagcacccggtcgttgagggtgaagtagaaatacacgtacaagaaagaccgttctaacttggaagaaggaaaaaatcagacaactatatcaactgaacaaagacatcaggcgtcacctggctgctagaacatcattcatggcttcctgctcctccggttggatggtgatgtccaccttgtctgacttttgattcttaagtagatccacc

SEQ ID NO: 5014 - DNA, 900 bp, Zea Mays
aatacatgtgttttaacggagtaagtgattgggctttatatttattgagaaaatatagtcataaatttatagggtacatatgagcagatttaattggattagttaaaatcatagaacaaagttaaataagtgttacaaatccaaatcacaaatgcataggattacaggaaaaaatattacctcaactgcaggatctgattcatatgagccatcatgcttaatggcactaccatttgtcactgcagttctgtagcagtaagagaaagtaaccatatcatgcttcctgaagcaacaaataatactgcggcagcatactactcgactgtactcgttcagaaacaagagtacctgatatattcacattccttcgaaaatgccatcgtcaggcacgcccccaccaggccggcgtcgggggagcccaggcacgtggacagcgcctccaggaacggtctcctgatcccgctacggctgccgagtagcgtcgcggccacgtgtctcagccacacatcgttttcggctgcttcattgtcctgggcaccgcaaagcgaacttcagaaactactcgtcgatactgtgttgtgccttcctgtgtgtaaaaggtgaccgggtgtgtagcactgtacgtgtacaacagcatcaggagtggtagtggtggcccgtgagtggtcgacgaagccggcatgttccagcatccagtcctctgcgtgaaggtcgcctgaggagcagcagcagagttctccgagtgctgggcacggcagtgtcctctgacaggcagcatctcagagaacgtgcgatggtcttgatcgcctcttctttgtacgtgatgtttctgtttggctccacctgcaatgtgtttcagttagagttctctgcagactattaaattccaggcgatgtttg

SEQ ID NO: 5015 - DNA, 646 bp, Zea Mays
attatgacctgcgaatctaactttttccaactattacattaattagtaatatgatattaatattaattggcattgcatttttcatgttcattcgtgggttttaatattacaatccactaaaatagacaaaataggcttgtgaatcatattagtggtcaatctttctttcccaacacaagtgcaaggaacttatgtgaaggatgttgacagacctgagcatcctcccattgaaggtgacagttttatcagagtgaccatctatgttggcaacgaatgctgcacaaattgaaccagttatgtatactgctgcctgaagatagaagaatgcatacattttttttatacggacggacggaccagacattgaagataaaaaaattcagaacaaaatttgctacattactgcaatgctgaacgttaacttgttttgtagtcacaaagacactttttgttgaaaaataaaggtcatacctcagcatttggcagcagcagttgcaatgctgaacgcattagtggacacacacacacaaggagcagccagaggagtgaaactgatgatgacaggatgattgtaattatgccagatccaaatacaagtattctgtgcatagcaaaaaaaatcccaatgcattgctctaactgtgac

SEQ ID NO: 5016 - DNA, 1708 bp, Zea Mays
gaaaaaaaaacaaaaaagccgaacaaaaaacacgacgcggcacagaacatagcaccgcaccaccgcaccgggcctcctccgagtctccgacctcctcctgtcttcggtgtcgtcgcccgcctccccatgaggccgccctcgagacatgcctcgtagcctcggcgtcagtagcagcagcagcaccaggcgctccctccgcgtcgcgccccccgcctcacccccgctgcggcggccgccgtcgccggcatggccatgccgttcgcgcgccgcgacatcgaggcggcgggcgccggcgccagcagcgacgactctcctgccgctaagaagggcaagcccgagctcgcaggggcgcgcccggctttgacgaggtccgaggcgttcgcgttcgcggccgtgctcgcgctcttcaccgccgggatcttctgcgtcttcctcaccgcgccacgcggcgagtttgggcagatcctccgcctcccgcgcagccttgccgacgtccgccttctcaaagacaatcttgctgtttacgcgagagattaccaaacgaattttatattgggttattgctcaatatacatcttcatgcaaacattcatgatccctgggacaatattcatgtctttacttgctggggctctttttggagtgattaaaggtggcattttggtagttttcactgccacagccggtggatcttcttgctattttgtctccaagctgattggcaggcccttggttagttggttgtggcctgaaaaactgagatatttccaatcagagattgctaagaggaaagaaaagctgctgaattatatgctttttctgagaataactccaactttgcccaatacattcataaatatggcgtcaccgattgttgacatacctttccatattttctttgctgcaacactagttggtcttattccagcatcttatattactgtaaagaagggaggaatcggtcacggtggcttgcggatcgagtgcatccgtattggtggtgttgagattccaaaccacaagagggtggagtactcgctgcagtacatacatggcattggacgctcacgctcacgccagatcctcctggacctcaatttcgataacaagatcaccaaggacctctccgaggaggaggtcatcaccctccgtaaggaggttggcaagtacatgattgagggagaccttaaacgtttcaaccgtgtggcgattgagaggctgaaggagattaggtgctacaagggcatccggcacaagcttggactcccagttcgtggccagaggacaaagaacaactgccggacacttaagggaaagagggcttcagttgccaagaagaagtcacccgcctcccaggatgaataaatcgtattgccatgtattgaagttctctctctctctctctctctctctctctctctctctctgtgtgtgtgtgtgtgtgtgtgtgtgtgtgtagcgctactactgctgggtgttttgtttcgagcttttatgctgccattgacaaatcatggggtagccatcagctgctgcagattttgtagcaatgacatactagctcatatgggtcggttctataaatgaagatcaaattcttgtttacatccatttgtattcctctgtcccaacctatgctcgatgcaaggagtccagactgctcctgacgaattactatttaccagatccagtgttctggggattattc

SEQ ID NO: 5017 - DNA, 746 bp, Zea Mays
aggccactaggtcatcgaaggttgcctacgcatacgcaaccttatcatcatccgcccttgggttttctatccgatagaccggggacgcacaggcctctcgccctccgcgcggctccacaggagagcaaaaatggcgaccctctccatggtctccgtccccatcgcaccctcctccttgtccctttccacccggggccgcagctcctccgcatccttccccgctaagaaacgtttcaaccgtgtggcgattgagaggctgaaggagattaggtgctacaagggcatccggcacaagcttggactcccagttcgtggccagaggacaaagaacaactgccggacacttaagggaaagagggcttcagttgccaagaagaagtcacccgcctcccaggatgaataaatcgtattgccatgtattgaagttctctctctctctctctctctctctctctctctctctctgtgtgtgtgtgtgtgtgtgtgtgtgtgtgtagcgctactactgctgggtgttttgtttcgagcttttatgctgccattgacaaatcatggggtagccatcagctgctgcagattttgtagcaatgacatactagctcatatgggtcggttctataaatgaagatcaaattcttgtttacatccatttgtattcctctgtcccaacctatgctcgatgcaaggagtccagactgctcctgacgaattactatttaccagatccagtgttctggggattattc

SEQ ID NO: 5018 - DNA, 1006 bp, Zea Mays
atttgccgaagcttgcaccggtgcacggacaccaccacctgctcccccatccggcggcacccgggccgccgcgcccgcgcgctctatccaccactcaaataaacgcgatatgctctgccttgctggcctgctattgaaaatcacacgacttccaccgcaatcgcacgcaaaaatcccgctcgagcttccaccgtctccctccgcttccccgtgcggcggtgccgggtcgcgccgtgccatggcgcccgccttctcggtctcgtgcgcgcccggatcctcgcgcccgctggccgccagccccggccccagcgtcgtcgtcgtcgcctcctcccaacttcccgcgtcgtcgcggagcagcgaacgcaggagagcaccaggcctcgcgctcgccgcggccccgggtgtcggcggtagggatggcggtggcaggtggagagcaggcatctcgtccttccccttcctgccgccgttcttcacagggaacaagggggagaaggacgctgagaaggcgatgaggctcaaggaggagctcctcgacgccattgcaccgctggaccgtggcgccgaggccacgcccgaggacaaggagcgcgtcgagcagattgttcagcaactggaggcggtgaaccaggtgaaggagccgctcaagtccgatctcctaaacggcaaatgggagcttctctataccacctccacaagtatactgcagccacagaggccaaagtatctgaggccgtttgggaagatttaccaatcaatcaacgccgacaatttgagagcccaaaacatggaaacttggccctactttaatcaggttactgccaacttggtacctctgaattctagaagagtggcagttaaatttgactacttcaagatatttggtttgataccgatcaaagcacccggaagtggtaaaggtgaacttgagattacttatcttgatgaagagctcagcaatgcatgggccttgttgatagggttcgctaagttgtaagaaaccaca

SEQ ID NO: 5019 - DNA, 3101 bp, Zea Mays
aaacagtcgagtgttcgacgtagggccggcactccaaaagcgtactcaactatccggcaccacaagctccattgcttacgaacccttccttcagttccagtcctttacctttttccctcggagctctctgactctctgagattttttttttgtcttcatttcaaattttgtggtttcctcccacattcccttcccccgctcccctccaggctccagccgctcgcttcgattcgcttcagctctgccttcccgtctcatggccacctaccagcccacgcccggtgacgccttcccagcccgctgctgactgcaccgattcacccacagttggccttcaggcaaccctagcgtcgccgatccgccgctccggcgagatgccggtgggccacatcgccgtctctcccgccgccgtctatggagaacagggatagcttcactcgccccccagcgccctcctacgcccacggaacccaaaccgctaagggcgtcgcggtccctaccggcggggacacggccgccaccaacctgacgtcgtcgtcagggttgtcctcgtctctcacgctctcccctccccacttcctgcaacagattcatgcagctgtcaagcggcagaggcctttcggtccaatgcagtctaaacttccaagagcaacacgggtcctggtttccggaggtgagcgtgcaaataaaattggtgccaacccttctgtttcgaaagaccaggaacgaattgttacgcagcctcagagaggcatgttgggaccctctatgctgccaaatgtgacgcctgatcaacagaaagtcgatagcacttctaaattagggtcctctgccccagatgagttgatgttgacagcaccctcaatgctaaaaagtaccactgatacctgtgcacaacgtgttggccagcagaaaaacaaggctaatctgttgatggatacagagaagtcagctttcgatgctttgtcatctcaaattacatcatgcaatgcattgatgggggaaagtttcaagaaaggacagcttgattcggttgttaatccacagttgacgtcacaaagagataattttcctgcaaatcaaggagctcagaatgatcaccagaagaaccatcaggagcttcaaactgttgatatagcagctgatatggatatcgaatatgatgcgtctaatttgtctcggagagggatccaagaggctcgtaatcagaatcatggaaagcatatgattcctttctctgccattggttcatctgtgactgctatgtctcttcactcgggacctactgtccaaagttcacagactccacaggttggcggatacacttcaccagtgcagataccagaatctgctgtagaatcctccaagggtgcactgggccatggtgctcaaaaggagcatgctggtgcaactggtgttggtgactggaatccccacaaccagcaggttcaaaatctaggtaatggtgccacggacaaagctgtttctagcattggcagattgcgttctgaaggattacctgcaaatgatcagtctacatctgccagggatggtggtggttcccgaccaaacaagggtgagaaggagcgccgtaaaaagaattatgatcctaatgttttctttaaggtgaacgggaaactttatcagaaacttggtaaaataggatctgggggtagcagtgaagtacataaagttatatcatcagattgcataatatatgccttgaaaaagatcaagcttagaggtcgtgattaccctactgcatatggtttctgtcaagaaattgagtacttaaataagttgaaaggaaggagcaatatcatacaaatgattgattatgaggtcactgataaaagtctacttctagaaagtaccgtgtcacccagggatgggagaattaaggatgatcactacatttacatggttctggaatatggtgaaattgacttggctaacatggttgctcagaagtggaaggagaggaacaactctactatgaaaattgatgaaaattggctgcgcttttattggcagggtaggcctcgtgctatggtgagagctgtctcattgagtcaccaggtcgcggcattgaagcagcgtagcatttgcggcggaaggcttcaaatacttgaagctgtcagtacaatacacgaggaacgaattgtccactctgatttgaagcctgcaaactttatgcttgtgaggggctcacttaaactaattgactttggcatcgccaaggctataatgaatggtacaacaaacattcaacgtgatgctcaggtagggactctcaactacatgtcacctgaagcgttcatgtgcaatgatacagactcggatggtaacattattaagtgcgggctcccctcagatatctggtctcttggctgtattctttaccagatggtgtatggcaagacaccatttgcagactacaagactttctgggacaaatataaaggagtgactgataggaaccacaagatcatgtatgaaccagttgacaacccatggctcattgatttgatgcaaaggtgtctcgcctgggaccgaaatgaacgatggagaacacctcagcttcttaagcacccttttctcaatcctccagttccaagggatttacctccctctgacgatgatccatataggttgctcattgagaggatcagagtccactgggataacccaatggttcaaaaacttcgtagtttaattgaagaactcgatggggatcagtaaaaatgggtttttaacaatcctgattgatactcgatctagggcctgggtagtggtggcacaagtgttttagtttctgtattgttcctgattgatagggtactgttgtaatttgtaattagagagtggcggcatcggttggagacgtcggagcatattatgatgccctggcatttttgcttcctcgtgtttggaggttgatgtgacactttgtcagaaatggcggctagttaacgttaagagtcaagatatttttgttgtctgatcagtggaagcatctccaggtgtaaatagttgaaccaattggtagtttgtgttttaccatgaatcaagcgagccaacgagccatgagcatttcgtct

SEQ ID NO: 5020 - DNA, 2872 bp, Zea Mays
cggcaccacaagctccattgcttacgaacccttccttcagttccagtcctttacctttttccctcggagctctctgactctctgagattttttttttgtcttcatttcaaattttgtggtttcctcccacattcccttcccccgctcccctccaggctccagccgctcgcttcgattcgcttcagctctgccttcccgtctcatggccacctaccagcccacgcccggtgacgccttcccagcccgctgctgactgcaccgattcacccacagttggccttcaggcaaccctagcgtcgccgatccgccgctccggcgagatgccggtgggccacatcgccgtctctcccgccgccgtctatggagaacagggatagcttcactcgccccccagcgccctcctacgcccacggaacccaaaccgctaagggcgtcgcggtccctaccggcggggacacggccgccaccaacctgacgtcgtcgtcagggttgtcctcgtctctcacgctctcccctccccacttcctgcaacagattcatgcagctgtcaagcggcagaggcctttcggtccaatgcagtctaaacttccaagagcaacacgggtcctggtttccggaggtgagcgtgcaaataaaattggtgccaacccttctgtttcgaaagaccaggaacgaattgttacgcagcctcagagaggcatgttgggaccctctatgctgccaaatgtgacgcctgatcaacagaaagtcgatagcacttctaaattagggtcctctgccccagatgagttgatgttgacagcaccctcaatgctaaaaagtaccactgatacctgtgcacaacgtgttggccagcagaaaaacaaggctaatctgttgatggatacagagaagtcagctttcgatgctttgtcatctcaaattacatcatgcaatgcattgatgggggaaagtttcaagaaaggacagcttgattcggttgttaatccacagttgacgtcacaaagagataattttcctgcaaatcaaggagctcagaatgatcaccagaagaaccatcaggagcttcaaactgttgatatagcagctgatatggatatcgaatatgatgcgtctaatttgtctcggagagggatccaagaggctcgtaatcagaatcatggaaagcatatgattcctttctctgccattggttcatctgtgactgctatgtctcttcactcgggacctactgtccaaagttcacagactccacaggttggcggatacacttcaccagtgcagataccagaatctgctgtagaatcctccaagggtgcactgggccatggtgctcaaaaggagcatgctggtgcaactggtgttggtgactggaatccccacaaccagcaggttcaaaatctagggatggtggtggttcccgaccaaacaagggtgagaaggagcgccgtaaaaagaattatgatcctaatgttttctttaaggtgaacgggaaactttatcagaaacttggtaaaataggatctgggggtagcagtgaagtacataaagttatatcatcagattgcataatatatgccttgaaaaagatcaagcttagaggtcgtgattaccctactgcatatggtttctgtcaagaaattgagtacttaaataagttgaaaggaaggagcaatatcatacaaatgattgattatgaggtcactgataaaagtctacttctagaaagtaccgtgtcacccagggatgggagaattaaggatgatcactacatttacatggttctggaatatggtgaaattgacttggctaacatggttgctcagaagtggaaggagaggaacaactctactatgaaaattgatgaaaattggctgcgcttttattggcagcaaatacttgaagctgtcagtacaatacacgaggaacgaattgtccactctgatttgaagcctgcaaactttatgcttgtgaggggctcacttaaactaattgactttggcatcgccaaggctataatgaatggtacaacaaacattcaacgtgatgctcaggtagggactctcaactacatgtcacctgaagcgttcatgtgcaatgatacagactcggatggtaacattattaagtgcgggctcccctcagatatctggtctcttggctgtattctttaccagatggtgtatggcaagacaccatttgcagactacaagactttctgggacaaatataaaggagtgactgataggaaccacaagatcatgtatgaaccagttgacaacccatggctcattgatttgatgcaaaggtgtctcgcctgggaccgaaatgaacgatggagaacacctcagcttcttaagcacccttttctcaatcctccagttccaagggatttacctccctctgacgatgatccatataggttgctcattgagaggatcagagtccactgggataacccaatggttcaaaaacttcgtagtttaattgaagaactcgatggggatcagtaaaaatgggtttttaacaatcctgattgatactcgatctagggcctgggtagtggtggcacaagtgttttagtttctgtattgttcctgattgatagggtactgttgtaatttgtaattagagagtggcggcatcggttggagacgtcggagcatattatgatgccctggcatttttgcttcctcgtgtttggaggttgatgtgacactttgtcagaaatggcggctagttaacgttaagagtcaagatatttttgttgtctgatcagtggaagcatctccaggtgtaaatagttgaaccaattggtagtttgtgttttaccatgaatcaagcgagccaacgagccatgagcatttcgtct

SEQ ID NO: 5021 - DNA, 2995 bp, Zea Mays
cagtcctttacctttttccctcggagctctctgactctctgagattttttttttgtcttcatttcaaattttgtggtttcctcccacattcccttcccccgctcccctccaggctccagccgctcgcttcgattcgcttcagctctgccttcccgtctcatggccacctaccagcccacgcccggtgacgccttcccagcccgctgctgactgcaccgattcacccacagttggccttcaggcaaccctagcgtcgccgatccgccgctccggcgagatgccggtgggccacatcgccgtctctcccgccgccgtctatggagaacagggatagcttcactcgccccccagcgccctcctacgcccacggaacccaaaccgctaagggcgtcgcggtccctaccggcggggacacggccgccaccaacctgacgtcgtcgtcagggttgtcctcgtctctcacgctctcccctccccacttcctgcaacagattcatgcagctgtcaagcggcagaggcctttcggtccaatgcagtctaaacttccaagagcaacacgggtcctggtttccggaggtgagcgtgcaaataaaattggtgccaacccttctgtttcgaaagaccaggaacgaattgttacgcagcctcagagaggcatgttgggaccctctatgctgccaaatgtgacgcctgatcaacagaaagtcgatagcacttctaaattagggtcctctgccccagatgagttgatgttgacagcaccctcaatgctaaaaagtaccactgatacctgtgcacaacgtgttggccagcagaaaaacaaggctaatctgttgatggatacagagaagtcagctttcgatgctttgtcatctcaaattacatcatgcaatgcattgatgggggaaagtttcaagaaaggacagcttgattcggttgttaatccacagttgacgtcacaaagtgataatatatgcatcactgtggatagtagaatggacagtatgttgtcttatctacattctgtttcattgacggcaggagataattttcctgcaaatcaaggagctcagaatgatcaccagaagaaccatcaggagcttcaaactgttgatatagcagctgatatggatatcgaatatgatgcgtctaatttgtctcggagagggatccaagaggctcgtaatcagaatcatggaaagcatatgattcctttctctgccattggttcatctgtgactgctatgtctcttcactcgggacctactgtccaaagttcacagactccacaggttggcggatacacttcaccagtgcagataccagaatctgctgtagaatcctccaagggtgcactgggccatggtgctcaaaaggagcatgctggtgcaactggtgttggtgactggaatccccacaaccagcaggttcaaaatctaggtaatggtgccacggacaaagctgtttctagcattggcagattgcgttctgaaggattacctgcaaatgatcagtctacatctgccagggatggtggtggttcccgaccaaacaagggtgagaaggagcgccgtaaaaagaattatgatcctaatgttttctttaaggtgaacgggaaactttatcagaaacttggtaaaataggatctgggggtagcagtgaagtacataaagttatatcatcagattgcataatatatgccttgaaaaagatcaagcttagaggtcgtgattaccctactgcatatggtttctgtcaagaaattgagtacttaaataagttgaaaggaaggagcaatatcatacaaatgattgattatgaggtcactgataaaagtctacttctagaaagtaccgtgtcacccagggatgggagaattaaggatgatcactacatttacatggttctggaatatggtgaaattgacttggctaacatggttgctcagaagtggaaggagaggaacaactctactatgaaaattgatgaaaattggctgcgcttttattggcagcaaatacttgaagctgtcagtacaatacacgaggaacgaattgtccactctgatttgaagcctgcaaactttatgcttgtgaggggctcacttaaactaattgactttggcatcgccaaggctataatgaatggtacaacaaacattcaacgtgatgctcaggtagggactctcaactacatgtcacctgaagcgttcatgtgcaatgatacagactcggatggtaacattattaagtgcgggctcccctcagatatctggtctcttggctgtattctttaccagatggtgtatggcaagacaccatttgcagactacaagactttctgggacaaatataaaggagtgactgataggaaccacaagatcatgtatgaaccagttgacaacccatggctcattgatttgatgcaaaggtgtctcgcctgggaccgaaatgaacgatggagaacacctcagcttcttaagcacccttttctcaatcctccagttccaagggatttacctccctctgacgatgatccatataggttgctcattgagaggatcagagtccactgggataacccaatggttcaaaaacttcgtagtttaattgaagaactcgatggggatcagtaaaaatgggtttttaacaatcctgattgatactcgatctagggcctgggtagtggtggcacaagtgttttagtttctgtattgttcctgattgatagggtactgttgtaatttgtaattagagagtggcggcatcggttggagacgtcggagcatattatgatgccctggcatttttgcttcctcgtgtttggaggttgatgtgacactttgtcagaaatggcggctagttaacgttaagagtcaagatatttttgttgtctgatcagtggaagcatctccaggtgtaaatagttgaaccaattggtagtttgtgttttaccatgaatcaagcgagccaacgagccatgagcatttcgtct

SEQ ID NO: 5022 - DNA, 2981 bp, Zea Mays
tttttccctcggagctctctgactctctgagattttttttttgtcttcatttcaaattttgtggtttcctcccacattcccttcccccgctcccctccaggctccagccgctcgcttcgattcgcttcagctctgccttcccgtctcatggccacctaccagcccacgcccggtgacgccttcccagcccgctgctgactgcaccgattcacccacagttggccttcaggcaaccctagcgtcgccgatccgccgctccggcgagatgccggtgggccacatcgccgtctctcccgccgccgtctatggagaacagggatagcttcactcgccccccagcgccctcctacgcccacggaacccaaaccgctaagggcgtcgcggtccctaccggcggggacacggccgccaccaacctgacgtcgtcgtcagggttgtcctcgtctctcacgctctcccctccccacttcctgcaacagattcatgcagctgtcaagcggcagaggcctttcgtctaaacttccaagagcaacacgggtcctggtttccggaggtgagcgtgcaaataaaattggtgccaacccttctgtttcgaaagaccaggaacgaattgttacgcagcctcagagaggcatgttgggaccctctatgctgccaaatgtgacgcctgatcaacagaaagtcgatagcacttctaaattagggtcctctgccccagatgagttgatgttgacagcaccctcaatgctaaaaagtaccactgatacctgtgcacaacgtgttggccagcagaaaaacaaggctaatctgttgatggatacagagaagtcagctttcgatgctttgtcatctcaaattacatcatgcaatgcattgatgggggaaagtttcaagaaaggacagcttgattcggttgttaatccacagttgacgtcacaaagagataattttcctgcaaatcaaggagctcagaatgatcaccagaagaaccatcaggagcttcaaactgttgatatagcagctgatatggatatcgaatatgatgcgtctaatttgtctcggagagggatccaagaggctcgtaatcagaatcatggaaagcatatgattcctttctctgccattggttcatctgtgactgctatgtctcttcactcgggacctactgtccaaagttcacagactccacaggttggcggatacacttcaccagtgcagataccagaatctgctgtagaatcctccaagggtgcactgggccatggtgctcaaaaggagcatgctggtgcaactggtgttggtgactggaatccccacaaccagcaggttcaaaatctaggtaatggtgccacggacaaagctgtttctagcattggcagattgcgttctgaaggattacctgcaaatgatcagtctacatctgccagggatggtggtggttcccgaccaaacaagggtgagaaggagcgccgtaaaaagaattatgatcctaatgttttctttaaggtgaacgggaaactttatcagaaacttggtaaaataggatctgggggtagcagtgaagtacataaagttatatcatcagattgcataatatatgccttgaaaaagatcaagcttagaggtcgtgattaccctactgcatatggtttctgtcaagaaattgagtacttaaataagttgaaaggaaggagcaatatcatacaaatgattgattatgaggtcactgataaaagtctacttctagaaagtaccgtgtcacccagggatgggagaattaaggatgatcactacatttacatggttctggaatatggtgaaattgacttggctaacatggttgctcagaagtggaaggagaggaacaactctactatgaaaattgatgaaaattggctgcgcttttattggcagggtaggcctcgtgctatggtgagagctgtctcattgagtcaccaggtcgcggcattgaagcagcgtagcatttgcggcggaaggcttcaaatacttgaagctgtcagtacaatacacgaggaacgaattgtccactctgatttgaagcctgcaaactttatgcttgtgaggggctcacttaaactaattgactttggcatcgccaaggctataatgaatggtacaacaaacattcaacgtgatgctcaggtagggactctcaactacatgtcacctgaagcgttcatgtgcaatgatacagactcggatggtaacattattaagtgcgggctcccctcagatatctggtctcttggctgtattctttaccagatggtgtatggcaagacaccatttgcagactacaagactttctgggacaaatataaaggagtgactgataggaaccacaagatcatgtatgaaccagttgacaacccatggctcattgatttgatgcaaaggtgtctcgcctgggaccgaaatgaacgatggagaacacctcagcttcttaagcacccttttctcaatcctccagttccaagggatttacctccctctgacgatgatccatataggttgctcattgagaggatcagagtccactgggataacccaatggttcaaaaacttcgtagtttaattgaagaactcgatggggatcagtaaaaatgggtttttaacaatcctgattgatactcgatctagggcctgggtagtggtggcacaagtgttttagtttctgtattgttcctgattgatagggtactgttgtaatttgtaattagagagtggcggcatcggttggagacgtcggagcatattatgatgccctggcatttttgcttcctcgtgtttggaggttgatgtgacactttgtcagaaatggcggctagttaacgttaagagtcaagatatttttgttgtctgatcagtggaagcatctccaggtgtaaatagttgaaccaattggtagtttgtgttttaccatgaatcaagcgagccaacgagccatgagcatttcgtct

SEQ ID NO: 5023 - DNA, 2961 bp, Zea Mays
caaattttgtggtttcctcccacattcccttcccccgctcccctccaggctccagccgctcgcttcgattcgcttcagctctgccttcccgtctcatggccacctaccagcccacgcccggtgacgccttcccagcccgctgctgactgcaccgattcacccacagttggccttcaggcaaccctagcgtcgccgatccgccgctccggcgagatgccggtgggccacatcgccgtctctcccgccgccgtctatggagaacagggatagcttcactcgccccccagcgccctcctacgcccacggaacccaaaccgctaagggcgtcgcggtccctaccggcggggacacggccgccaccaacctgacgtcgtcgtcagggttgtcctcgtctctcacgctctcccctccccacttcctgcaacagattcatgcagctgtcaagcggcagaggcctttcggtccaatgcagtctaaacttccaagagcaacacgggtcctggtttccggaggtgagcgtgcaaataaaattggtgccaacccttctgtttcgaaagaccaggaacgaattgttacgcagcctcagagaggcatgttgggaccctctatgctgccaaatgtgacgcctgatcaacagaaagtcgatagcacttctaaattagggtcctctgccccagatgagttgatgttgacagcaccctcaatgctaaaaagtaccactgatacctgtgcacaacgtgttggccagcagaaaaacaaggctaatctgttgatggatacagagaagtcagctttcgatgctttgtcatctcaaattacatcatgcaatgcattgatgggggaaagtttcaagaaaggacagcttgattcggttgttaatccacagttgacgtcacaaagtgataatatatgcatcactgtggatagtagaatggacagtatgttgtcttatctacattctgtttcattgacggcaggagataattttcctgcaaatcaaggagctcagaatgatcaccagaagaaccatcaggagcttcaaactgttgatatagcagctgatatggatatcgaatatgatgcgtctaatttgtctcggagagggatccaagaggctcgtaatcagaatcatggaaagcatatgattcctttctctgccattggttcatctgtgactgctatgtctcttcactcgggacctactgtccaaagttcacagactccacaggttggcggatacacttcaccagtgcagataccagaatctgctgtagaatcctccaagggtgcactgggccatggtgctcaaaaggagcatgctggtgcaactggtgttggtgactggaatccccacaaccagcaggttcaaaatctaggtaatggtgccacggacaaagctgtttctagcattggcagattgcgttctgaaggattacctgcaaatgatcagtctacatctgccagggatggtggtggttcccgaccaaacaagggtgagaaggagcgccgtaaaaagaattatgatcctaatgttttctttaaggtgaacgggaaactttatcagaaacttggtaaaataggatctgggggtagcagtgaagtacataaagttatatcatcagattgcataatatatgccttgaaaaagatcaagcttagaggtcgtgattaccctactgcatatggtttctgtcaagaaattgagtacttaaataagttgaaaggaaggagcaatatcatacaaatgattgattatgaggtcactgataaaagtctacttctagaaagtaccgtgtcacccagggatgggagaattaaggatgatcactacatttacatggttctggaatatggtgaaattgacttggctaacatggttgctcagaagtggaaggagaggaacaactctactatgaaaattgatgaaaattggctgcgcttttattggcagcaaatacttgaagctgtcagtacaatacacgaggaacgaattgtccactctgatttgaagcctgcaaactttatgcttgtgaggggctcacttaaactaattgactttggcatcgccaaggctataatgaatggtacaacaaacattcaacgtgatgctcaggctaattgtggttctcactgcactgagcaggtagggactctcaactacatgtcacctgaagcgttcatgtgcaatgatacagactcggatggtaacattattaagtgcgggctcccctcagatatctggtctcttggctgtattctttaccagatggtgtatggcaagacaccatttgcagactacaagactttctgggacaaatataaaggagtgactgataggaaccacaagatcatgtatgaaccagttgacaacccatggctcattgatttgatgcaaaggtgtctcgcctgggaccgaaatgaacgatggagaacacctcagcttcttaagcacccttttctcaatcctccagttccaagggatttacctccctctgacgatgatccatataggttgctcattgagaggatcagagtccactgggataacccaatggttcaaaaacttcgtagtttaattgaagaactcgatggggatcagtaaaaatgggtttttaacaatcctgattgatactcgatctagggcctgggtagtggtggcacaagtgttttagtttctgtattgttcctgattgatagggtactgttgtaatttgtaattagagagtggcggcatcggttggagacgtcggagcatattatgatgccctggcatttttgcttcctcgtgtttggaggttgatgtgacactttgtcagaaatggcggctagttaacgttaagagtcaagatatttttgttgtctgatcagtggaagcatctccaggtgtaaatagttgaaccaattggtagtttgtgttttaccatgaatcaagcgagccaacgagccatgagcatttcgtct

SEQ ID NO: 5024 - DNA, 2931 bp, Zea Mays
caaattttgtggtttcctcccacattcccttcccccgctcccctccaggctccagccgctcgcttcgattcgcttcagctctgccttcccgtctcatggccacctaccagcccacgcccggtgacgccttcccagcccgctgctgactgcaccgattcacccacagttggccttcaggcaaccctagcgtcgccgatccgccgctccggcgagatgccggtgggccacatcgccgtctctcccgccgccgtctatggagaacagggatagcttcactcgccccccagcgccctcctacgcccacggaacccaaaccgctaagggcgtcgcggtccctaccggcggggacacggccgccaccaacctgacgtcgtcgtcagggttgtcctcgtctctcacgctctcccctccccacttcctgcaacagattcatgcagctgtcaagcggcagaggcctttcggtccaatgcagtctaaacttccaagagcaacacgggtcctggtttccggaggtgagcgtgcaaataaaattggtgccaacccttctgtttcgaaagaccaggaacgaattgttacgcagcctcagagaggcatgttgggaccctctatgctgccaaatgtgacgcctgatcaacagaaagtcgatagcacttctaaattagggtcctctgccccagatgagttgatgttgacagcaccctcaatgctaaaaagtaccactgatacctgtgcacaacgtgttggccagcagaaaaacaaggctaatctgttgatggatacagagaagtcagctttcgatgctttgtcatctcaaattacatcatgcaatgcattgatgggggaaagtttcaagaaaggacagcttgattcggttgttaatccacagttgacgtcacaaaggtgataatatatgcatcactgtggatagtagaatggacagtatgttgtcttatctacattctgtttcattgacggcaggagataattttcctgcaaatcaaggagctcagaatgatcaccagaagaaccatcaggagcttcaaactgttgatatagcagctgatatggatatcgaatatgatgcgtctaatttgtctcggagagggatccaagaggctcgtaatcagaatcatggaaagcatatgattcctttctctgccattggttcatctgtgactgctatgtctcttcactcgggacctactgtccaaagttcacagactccacaggttggcggatacacttcaccagtgcagataccagaatctgctgtagaatcctccaagggtgcactgggccatggtgctcaaaaggagcatgctggtgcaactggtgttggtgactggaatccccacaaccagcaggttcaaaatctagggatggtggtggttcccgaccaaacaagggtgagaaggagcgccgtaaaaagaattatgatcctaatgttttctttaaggtgaacgggaaactttatcagaaacttggtaaaataggatctgggggtagcagtgaagtacataaagttatatcatcagattgcataatatatgccttgaaaaagatcaagcttagaggtcgtgattaccctactgcatatggtttctgtcaagaaattgagtacttaaataagttgaaaggaaggagcaatatcatacaaatgattgattatgaggtcactgataaaagtctacttctagaaagtaccgtgtcacccagggatgggagaattaaggatgatcactacatttacatggttctggaatatggtgaaattgacttggctaacatggttgctcagaagtggaaggagaggaacaactctactatgaaaattgatgaaaattggctgcgcttttattggcagggtaggcctcgtgctatggtgagagctgtctcattgagtcaccaggtcgcggcattgaagcagcgtagcatttgcggcggaaggcttcaaatacttgaagctgtcagtacaatacacgaggaacgaattgtccactctgatttgaagcctgcaaactttatgcttgtgaggggctcacttaaactaattgactttggcatcgccaaggctataatgaatggtacaacaaacattcaacgtgatgctcaggtagggactctcaactacatgtcacctgaagcgttcatgtgcaatgatacagactcggatggtaacattattaagtgcgggctcccctcagatatctggtctcttggctgtattctttaccagatggtgtatggcaagacaccatttgcagactacaagactttctgggacaaatataaaggagtgactgataggaaccacaagatcatgtatgaaccagttgacaacccatggctcattgatttgatgcaaaggtgtctcgcctgggaccgaaatgaacgatggagaacacctcagcttcttaagcacccttttctcaatcctccagttccaagggatttacctccctctgacgatgatccatataggttgctcattgagaggatcagagtccactgggataacccaatggttcaaaaacttcgtagtttaattgaagaactcgatggggatcagtaaaaatgggtttttaacaatcctgattgatactcgatctagggcctgggtagtggtggcacaagtgttttagtttctgtattgttcctgattgatagggtactgttgtaatttgtaattagagagtggcggcatcggttggagacgtcggagcatattatgatgccctggcatttttgcttcctcgtgtttggaggttgatgtgacactttgtcagaaatggcggctagttaacgttaagagtcaagatatttttgttgtctgatcagtggaagcatctccaggtgtaaatagttgaaccaattggtagtttgtgttttaccatgaatcaagcgagccaacgagccatgagcatttcgtct

SEQ ID NO: 5025 - DNA, 2883 bp, Zea Mays
caaattttgtggtttcctcccacattcccttcccccgctcccctccaggctccagccgctcgcttcgattcgcttcagctctgccttcccgtctcatggccacctaccagcccacgcccggtgacgccttcccagcccgctgctgactgcaccgattcacccacagttggccttcaggcaaccctagcgtcgccgatccgccgctccggcgagatgccggtgggccacatcgccgtctctcccgccgccgtctatggagaacagggatagcttcactcgccccccagcgccctcctacgcccacggaacccaaaccgctaagggcgtcgcggtccctaccggcggggacacggccgccaccaacctgacgtcgtcgtcagggttgtcctcgtctctcacgctctcccctccccacttcctgcaacagattcatgcagctgtcaagcggcagaggcctttcggtccaatgcagtctaaacttccaagagcaacacgggtcctggtttccggaggtgagcgtgcaaataaaattggtgccaacccttctgtttcgaaagaccaggaacgaattgttacgcagcctcagagaggcatgttgggaccctctatgctgccaaatgtgacgcctgatcaacagaaagtcgatagcacttctaaattagggtcctctgccccagatgagttgatgttgacagcaccctcaatgctaaaaagtaccactgatacctgtgcacaacgtgttggccagcagaaaaacaaggctaatctgttgatggatacagagaagtcagctttcgatgctttgtcatctcaaattacatcatgcaatgcattgatgggggaaagtttcaagaaaggacagcttgattcggttgttaatccacagttgacgtcacaaagagataattttcctgcaaatcaaggagctcagaatgatcaccagaagaaccatcaggagcttcaaactgttgatatagcagctgatatggatatcgaatatgatgcgtctaatttgtctcggagagggatccaagaggctcgtaatcagaatcatggaaagcatatgattcctttctctgccattggttcatctgtgactgctatgtctcttcactcgggacctactgtccaaagttcacagactccacaggttggcggatacacttcaccagtgcagataccagaatctgctgtagaatcctccaagggtgcactgggccatggtgctcaaaaggagcatgctggtgcaactggtgttggtgactggaatccccacaaccagcaggttcaaaatctaggtaatggtgccacggacaaagctgtttctagcattggcagattgcgttctgaaggattacctgcaaatgatcagtctacatctgccagggatggtggtggttcccgaccaaacaagggtgagaaggagcgccgtaaaaagaattatgatcctaatgttttctttaaggtgaacgggaaactttatcagaaacttggtaaaataggatctgggggtagcagtgaagtacataaagttatatcatcagattgcataatatatgccttgaaaaagatcaagcttagaggtcgtgattaccctactgcatatggtttctgtcaagaaattgagtacttaaataagttgaaaggaaggagcaatatcatacaaatgattgattatgaggtcactgataaaagtctacttctagaaagtaccgtgtcacccagggatgggagaattaaggatgatcactacatttacatggttctggaatatggtgaaattgacttggctaacatggttgctcagaagtggaaggagaggaacaactctactatgaaaattgatgaaaattggctgcgcttttattggcagcaaatacttgaagctgtcagtacaatacacgaggaacgaattgtccactctgatttgaagcctgcaaactttatgcttgtgaggggctcacttaaactaattgactttggcatcgccaaggctataatgaatggtacaacaaacattcaacgtgatgctcaggctaattgtggttctcactgcactgagcaggtagggactctcaactacatgtcacctgaagcgttcatgtgcaatgatacagactcggatggtaacattattaagtgcgggctcccctcagatatctggtctcttggctgtattctttaccagatggtgtatggcaagacaccatttgcagactacaagactttctgggacaaatataaaggagtgactgataggaaccacaagatcatgtatgaaccagttgacaacccatggctcattgatttgatgcaaaggtgtctcgcctgggaccgaaatgaacgatggagaacacctcagcttcttaagcacccttttctcaatcctccagttccaagggatttacctccctctgacgatgatccatataggttgctcattgagaggatcagagtccactgggataacccaatggttcaaaaacttcgtagtttaattgaagaactcgatggggatcagtaaaaatgggtttttaacaatcctgattgatactcgatctagggcctgggtagtggtggcacaagtgttttagtttctgtattgttcctgattgatagggtactgttgtaatttgtaattagagagtggcggcatcggttggagacgtcggagcatattatgatgccctggcatttttgcttcctcgtgtttggaggttgatgtgacactttgtcagaaatggcggctagttaacgttaagagtcaagatatttttgttgtctgatcagtggaagcatctccaggtgtaaatagttgaaccaattggtagtttgtgttttaccatgaatcaagcgagccaacgagccatgagcatttcgtct

SEQ ID NO: 5026 - DNA, 2758 bp, Zea Mays
caaattttgtggtttcctcccacattcccttcccccgctcccctccaggctccagccgctcgcttcgattcgcttcagctctgccttcccgtctcatggccacctaccagcccacgcccggtgacgccttcccagcccgctgctgactgcaccgattcacccacagttggccttcaggcaaccctagcgtcgccgatccgccgctccggcgagatgccggtgggccacatcgccgtctctcccgccgccgtctatggagaacagggatagcttcactcgccccccagcgccctcctacgcccacggaacccaaaccgctaagggcgtcgcggtccctaccggcggggacacggccgccaccaacctgacgtcgtcgtcagggttgtcctcgtctctcacgctctcccctccccacttcctgcaacagattcatgcagctgtcaagcggcagaggcctttcgtctaaacttccaagagcaacacgggtcctggtttccggaggtgagcgtgcaaataaaattggtgccaacccttctgtttcgaaagaccaggaacgaattgttacgcagcctcagagaggcatgttgggaccctctatgctgccaaatgtgacgcctgatcaacagaaagtcgatagcacttctaaattagggtcctctgccccagatgagttgatgttgacagcaccctcaatgctaaaaagtaccactgatacctgtgcacaacgtgttggccagcagaaaaacaaggctaatctgttgatggatacagagaagtcagctttcgatgctttgtcatctcaaattacatcatgcaatgcattgatgggggaaagtttcaagaaaggacagcttgattcggttgttaatccacagttgacgtcacaaagtgataatatatgcatcactgtggatagtagaatggacagtatgttgtcttatctacattctgtttcattgacggcaggagataattttcctgcaaatcaaggagctcagaatgatcaccagaagaaccatcaggagcttcaaactgttgatatagcagctgatatggatatcgaatatgatgcgtctaatttgtctcggagagggatccaagaggctcgtaatcagaatcatggaaagcatatgattcctttctctgccattggttcatctgtgactgctatgtctcttcactcgggacctactgtccaaagttcacagactccacaggttggcggatacacttcaccagtgcagataccagaatctgctgtagaatcctccaagggtgcactgggccatggtgctcaaaaggagcatgctggtgcaactggtgttggtgactggaatccccacaaccagcaggttcaaaatctaggtaatggtgccacggacaaagctgtttctagcattggcagattgcgttctgaaggattacctgcaaatgatcagtctacatctgccagggatggtggtggttcccgaccaaacaagggtgagaaggagcgccgtaaaaagaattatgatcctaatgttttctttaaggtgaacgggaaactttatcagaaacttggtaaaataggatctgggggtagcagtgaagtacataaagttatatcatcagattgcataatatatgccttgaaaaagatcaagcttagaggtcgtgattaccctactgcatatggtttctgtcaagaaattgagtacttaaataagttgaaaggaaggagcaatatcatacaaatgattgattatgaggtcactgataaaagtctacttctagaaagtaccgtgtcacccagggatgggagaattaaggatgatcactacatttacatggttctggaatatggtgaaattgacttggctaacatggttgctcagaagtggaaggagaggaacaactctactatgaaaattgatgaaaattggctgcgcttttattggcaggtagggactctcaactacatgtcacctgaagcgttcatgtgcaatgatacagactcggatggtaacattattaagtgcgggctcccctcagatatctggtctcttggctgtattctttaccagatggtgtatggcaagacaccatttgcagactacaagactttctgggacaaatataaaggagtgactgataggaaccacaagatcatgtatgaaccagttgacaacccatggctcattgatttgatgcaaaggtgtctcgcctgggaccgaaatgaacgatggagaacacctcagcttcttaagcacccttttctcaatcctccagttccaagggatttacctccctctgacgatgatccatataggttgctcattgagaggatcagagtccactgggataacccaatggttcaaaaacttcgtagtttaattgaagaactcgatggggatcagtaaaaatgggtttttaacaatcctgattgatactcgatctagggcctgggtagtggtggcacaagtgttttagtttctgtattgttcctgattgatagggtactgttgtaatttgtaattagagagtggcggcatcggttggagacgtcggagcatattatgatgccctggcatttttgcttcctcgtgtttggaggttgatgtgacactttgtcagaaatggcggctagttaacgttaagagtcaagatatttttgttgtctgatcagtggaagcatctccaggtgtaaatagttgaaccaattggtagtttgtgttttaccatgaatcaagcgagccaacgagccatgagcatttcgtct

SEQ ID NO: 5027 - DNA, 2520 bp, Zea Mays
cttcaggcaaccctagcgtcgccgatccgccgctccggcgagatgccggtgggccacatcgccgtctctcccgccgccgtctatggagaacagggatagcttcactcgccccccagcgccctcctacgcccacggaacccaaaccgctaagggcgtcgcggtccctaccggcggggacacggccgccaccaacctgacgtcgtcgtcagggttgtcctcgtctctcacgctctcccctccccacttcctgcaacagattcatgcagctgtcaagcggcagaggcctttcggtccaatgcagtctaaacttccaagagcaacacgggtcctggtttccggaggtgagcgtgcaaataaaattggtgccaacccttctgtttcgaaagaccaggaacgaattgttacgcagcctcagagaggcatgttgggaccctctatgctgccaaatgtgacgcctgatcaacagaaagtcgatagcacttctaaattagggtcctctgccccagatgagttgatgttgacagcaccctcaatgctaaaaagtaccactgatacctgtgcacaacgtgttggccagcagaaaaacaaggctaatctgttgatggatacagagaagtcagctttcgatgctttgtcatctcaaattacatcatgcaatgcattgatgggggaaagtttcaagaaaggacagcttgattcggttgttaatccacagttgacgtcacaaagagataattttcctgcaaatcaaggagctcagaatgatcaccagaagaaccatcaggagcttcaaactgttgatatagcagctgatatggatatcgaatatgatgcgtctaatttgtctcggagagggatccaagaggctcgtaatcagaatcatggaaagcatatgattcctttctctgccattggttcatctgtgactgctatgtctcttcactcgggacctactgtccaaagttcacagactccacaggttggcggatacacttcaccagtgcagataccagaatctgctgtagaatcctccaagggtgcactgggccatggtgctcaaaaggagcatgctggtgcaactggtgttggtgactggaatccccacaaccagcaggttcaaaatctaggtaatggtgccacggacaaagctgtttctagcattggcagattgcgttctgaaggattacctgcaaatgatcagtctacatctgccagggatggtggtggttcccgaccaaacaagggtgagaaggagcgccgtaaaaagaattatgatcctaatgttttctttaaggtgaacgggaaactttatcagaaacttggtaaaataggatctgggggtagcagtgaagtacataaagttatatcatcagattgcataatatatgccttgaaaaagatcaagcttagaggtcgtgattaccctactgcatatggtttctgtcaagaaattgagtacttaaataagttgaaaggaaggagcaatatcatacaaatgattgattatgaggtcactgataaaagtctacttctagaaagtaccgtgtcacccagggatgggagaattaaggatgatcactacatttacatggttctggaatatggtgaaattgacttggctaacatggttgctcagaagtggaaggagaggaacaactctactatgaaaattgatgaaaattggctgcgcttttattggcaggtagggactctcaactacatgtcacctgaagcgttcatgtgcaatgatacagactcggatggtaacattattaagtgcgggctcccctcagatatctggtctcttggctgtattctttaccagatggtgtatggcaagacaccatttgcagactacaagactttctgggacaaatataaaggagtgactgataggaaccacaagatcatgtatgaaccagttgacaacccatggctcattgatttgatgcaaaggtgtctcgcctgggaccgaaatgaacgatggagaacacctcagcttcttaagcacccttttctcaatcctccagttccaagggatttacctccctctgacgatgatccatataggttgctcattgagaggatcagagtccactgggataacccaatggttcaaaaacttcgtagtttaattgaagaactcgatggggatcagtaaaaatgggtttttaacaatcctgattgatactcgatctagggcctgggtagtggtggcacaagtgttttagtttctgtattgttcctgattgatagggtactgttgtaatttgtaattagagagtggcggcatcggttggagacgtcggagcatattatgatgccctggcatttttgcttcctcgtgtttggaggttgatgtgacactttgtcagaaatggcggctagttaacgttaagagtcaagatatttttgttgtctgatcagtggaagcatctccaggtgtaaatagttgaaccaattggtagtttgtgttttaccatgaatcaagcgagccaacgagccatgagcatttcgtct

SEQ ID NO: 5028 - DNA, 2389 bp, Zea Mays
atttaaacctgtctcacccacctccccaaaataaaatgcgtccgttcccggagcaaaaataaaaaaaatcaaaaacacaaaagaattcgctacttcgccggcgacaggggcgaccgcgcgcgccccggccggtgctgatccggactctcccatgcacccattctgctgtgcgccgcgctggttcgctctccacgacggcgtgctctcctactacaagatccacgggcccgaccgcatcatcctatcgcgcgagaccgagcggggcgccaaggtcatcggcgatgattccctccgccgcctcaaccgcccctccacctcctcgtcgtcccactccaacggccaccaccatcctcgaaaccccatcggcgaaatccacctcaaggtgtcgaccgtgagggagagcagatcggacgacaggagattctccatcttctcggggacgaagacgttgcacctgagagcggagaccagggaggacagagctgcgtggctcgaggcgctgcgggcgaccaaggacatgttcccgaggatgtcctccagcgagatggtcgggccaggggacaccgcagcggcagtggccgtctcgaccgagcgcctaaggcagcggctgcagcaggaaggggtcagcgaggcggccattgctgacagcgagatgatcgtgcgggcagaattcgaggctctgcacaagcagcttgtgctctccaagcagaagcacgcgctcctcttggaaactcttcgccagctagagacagaaaaggttgatttggagaatacccttgtcgatgagagtcaaaggcagtcgaaagagtatggatctgcttctaaaccaagacatgagaagtatagtgaaggaagtgctagtgaatctgatgattataatgaaccacaagatcctgctgaagagactgatgatgatgagaacctttattttgatacaagagattttctatcctcaagctcttttaaaagtagtggatctgatttccaaagatctgaagctggttcagatgatgaagacgattatccaatggatggaattgatccttccatgaagtctattgggattagttatccatatgtaagaaggcggaagaagctaccagatccggttgagaaagaaaagggtgtaagtttgtggtcaatgatcaaggacaacataggaaaggatcttacaaaagtttgtctgcctgtttacttcaatgagccactttcatcgttacaaaaatgttttgaagatctggagtattcctaccttattgatcgtgcatctgaatgggggaaaagggggaatagtcttatgaggattcttagcgtagcagcatttgctgtttctggatatgcctctacagatggcaggagctgtaagccttttaacccccttcttggggagacatatgaagcagactatccagacaaaggcctccgttttttctctgaaaaggttagtcatcaccctatggttgttgcttgccactgtgagggaactggctggaggttttgggctgatagcaacctaaagagtaaattctggggtcgttccatccaacttgatcctgttggtgaattaacactggagtttgatgatggggaagttttccaatggagcaaggtgacaacttcaatttacaatctcatattgggcaagctatattgcgatcactatggtactatgcgcattcaaggtaatcgtgagtattcatgtaagcttaagttcaaggagcagtcaattatcgatcgcaaccctcaccaggtgcaaggtgttgttcaagatagaaatggtcgaactgttgctacactatttggaaaatgggatgaaagcatgcactatgtaatgggtgattgctttgggaaaggcaagggaactgaacagttatcggaggcccatttgttgtggaaaagaagcaaaccacctaagtttcccactagatacaatctcactcaatttgcaattacattgaatgaacttacccctggattgaaggagaaactgccacctacagactcaagattacgaccagaccagagatgtctggagaacggtgaatatgaaagggcaaatgctgagaaattgaggcttgaacagagacaacggcaggcacgaaagatgcaggagagcggatggaagcctcggtggtttgcgaaggataaagctactgacacataccgttacgtcggtgggtactgggaatccagagaaaagagcagctgggaaggttgccccgacatcttcggacaagtccctaacgatctgatgggatttcagacaccacccgcttcagttgccgcacctggagatgggtctggtcaggacgacacaacacattcgtgggtgaacaatcttttcagcacgcatagtccagccggaggaggtggcgatggatatgagtga

SEQ ID NO: 5029 - DNA, 2982 bp, Zea Mays
gcgtccgttcccggagcaaaaataaaaaaaatcaaaaacacaaaagaattcgctacttcgccggcgacaggggcgaccgcgcgcgccccggccggtgctgatccggactctcccatgcacccattctgctgtgcgccgctcgtgcctgtatcgcccgtggcctccgccgcggccgcgtcctctgcggtggcgggcgccccggccgtgatgccgccaccgcagcccccgcctcctccgcctcctccgccccgaagcaaccccgcctctggcggtgagaggcgcgcgcgcgcggcgggggtcagcggtggcggaggaggcggttcctcgccgcccgagggggtgaagctgaacgagatcgtcggcggcggcatctcgggaatcctgtacaagtgggtcaactacgggcgcggttggaggccgcgctggttcgctctccacgacggcgtgctctcctactacaagatccacgggcccgaccgcatcatcctatcgcgcgagaccgagcggggcgccaaggtcatcggcgatgattccctccgccgcctcaaccgcccctccacctcctcgtcgtcccactccaacggccaccaccatcctcgaaaccccatcggcgaaatccacctcaaggtgtcgaccgtgagggagagcagatcggacgacaggagattctccatcttctcggggacgaagacgttgcacctgagagcggagaccagggaggacagagctgcgtggctcgaggcgctgcgggcgaccaaggacatgttcccgaggatgtcctccagcgagatggtcgggccaggggacaccgcagcggcagtggccgtctcgaccgagcgcctaaggcagcggctgcagcaggaaggggtcagcgaggcggccattgctgacagcgagatgatcgtgcgggcagaattcgaggctctgcacaagcagcttgtgctctccaagcagaagcacgcgctcctcttggaaactcttcgccagctagagacagaaaaggttgatttggagaatacccttgtcgatgagagtcaaaggcagtcgaaagagtatggatctgcttctaaaccaagacatgagaagtatagtgaaggaagtgctagtgaatctgatgattataatgaaccacaagatcctgctgaagagactgatgatgatgagaacctttattttgatacaagagattttctatcctcaagctcttttaaaagtagtggatctgatttccaaagatctgaagctggttcagatgatgaagacgattatccaatggatggaattgatccttccatgaagtctattgggattagttatccatatgtaagaaggcggaagaagctaccagatccggttgagaaagaaaagggtgtaagtttgtggtcaatgatcaaggacaacataggaaaggatcttacaaaagtttgtctgcctgtttacttcaatgagccactttcatcgttacaaaaatgttttgaagatctggagtattcctaccttattgatcgtgcatctgaatgggggaaaagggggaatagtcttatgaggattcttagcgtagcagcatttgctgtttctggatatgcctctacagatggcaggagctgtaagccttttaacccccttcttggggagacatatgaagcagactatccagacaaaggcctccgttttttctctgaaaaggttagtcatcaccctatggttgttgcttgccactgtgagggaactggctggaggttttgggctgatagcaacctaaagagtaaattctggggtcgttccatccaacttgatcctgttggtgaattaacactggagtttgatgatggggaagttttccaatggagcaaggtgacaacttcaatttacaatctcatattgggcaagctatattgcgatcactatggtactatgcgcattcaaggtaatcgtgagtattcatgtaagcttaagttcaaggagcagtcaattatcgatcgcaaccctcaccagatgtcgttaaggaggatgagcttgccgttgctcgtggaccatcaatccttagctgtttggcgatacggtggcaaggaggtgcaaggtgttgttcaagatagaaatggtcgaactgttgctacactatttggaaaatgggatgaaagcatgcactatgtaatgggtgattgctttgggaaaggcaagggaactgaacagttatcggaggcccatttgttgtggaaaagaagcaaaccacctaagtttcccactagatacaatctcactcaatttgcaattacattgaatgaacttacccctggattgaaggagaaactgccacctacagactcaagattacgaccagaccagagatgtctggagaacggtgaatatgaaagggcaaatgctgagaaattgaggcttgaacagagacaacggcaggcacgaaagatgcaggagagcggatggaagcctcggtggtttgcgaaggataaagctactgacacataccgttacgtcggtgggtactgggaatccagagaaaagagcagctgggaaggttgccccgacatcttcggacaagtccctaacgatctgatggtaactgactaggttcgagtaggttataggtcttttgcttctccttatcggtatcacttgattccggaaattttagtggttcatattatagagcaattaagtgcccgttgacaagtaaacattggcagtgcctccggtaatattggtctcgtacataataagaagaaaatggttcggtctcacatgttaccttatttttttttggcttttggtatagtaatagttttttttccttgtgaggttttcatgctcacaagttcagtcttcaaagtggtgtagcgtgggcgattagtggtcatgactaaatatatgtaactacgctacgcatacaggaggaggccgtgaatttgttcattttggtgctagtggtagttggtcctttgcgtatcgatttttgaatgccgg

SEQ ID NO: 5030 - DNA, 2970 bp, Zea Mays
gcgtccgttcccggagcaaaaataaaaaaaatcaaaaacacaaaagaattcgctacttcgccggcgacaggggcgaccgcgcgcgccccggccggtgctgatccggactctcccatgcacccattctgctgtgcgccgctcgtgcctgtatcgcccgtggcctccgccgcggccgcgtcctctgcggtggcgggcgccccggccgtgatgccgccaccgcagcccccgcctcctccgcctcctccgccccgaagcaaccccgcctctggcggtgagaggcgcgcgcgcgcggcgggggtcagcggtggcggaggaggcggttcctcgccgcccgagggggtgaagctgaacgagatcgtcggcggcggcatctcgggaatcctgtacaagtgggtcaactacgggcgcggttggaggccgcgctggttcgctctccacgacggcgtgctctcctactacaagatccacgggcccgaccgcatcatcctatcgcgcgagaccgagcggggcgccaaggtcatcggcgatgattccctccgccgcctcaaccgcccctccacctcctcgtcgtcccactccaacggccaccaccatcctcgaaaccccatcggcgaaatccacctcaaggtgtcgaccgtgagggagagcagatcggacgacaggagattctccatcttctcggggacgaagacgttgcacctgagagcggagaccagggaggacagagctgcgtggctcgaggcgctgcgggcgaccaaggacatgttcccgaggatgtcctccagcgagatggtcgggccaggggacaccgcagcggcagtggccgtctcgaccgagcgcctaaggcagcggctgcagcaggaaggggtcagcgaggcggccattgctgacagcgagatgatcgtgcgggcagaattcgaggctctgcacaagcagcttgtgctctccaagcagaagcacgcgctcctcttggaaactcttcgccagctagagacagaaaaggttgatttggagaatacccttgtcgatgagagtcaaaggcagtcgaaagagtatggatctgcttctaaaccaagacatgagaagtatagtgaaggaagtgctagtgaatctgatgattataatgaaccacaagatcctgctgaagagactgatgatgatgagaacctttattttgatacaagagattttctatcctcaagctcttttaaaagtagtggatctgatttccaaagatctgaagctggttcagatgatgaagacgattatccaatggatggaattgatccttccatgaagtctattgggattagttatccatatgtaagaaggcggaagaagctaccagatccggttgagaaagaaaagggtgtaagtttgtggtcaatgatcaaggacaacataggaaaggatcttacaaaagtttgtctgcctgtttacttcaatgagccactttcatcgttacaaaaatgttttgaagatctggagtattcctaccttattgatcgtgcatctgaatgggggaaaagggggaatagtcttatgaggattcttagcgtagcagcatttgctgtttctggatatgcctctacagatggcaggagctgtaagccttttaacccccttcttggggagacatatgaagcagactatccagacaaaggcctccgttttttctctgaaaaggttagtcatcaccctatggttgttgcttgccactgtgagggaactggctggaggttttgggctgatagcaacctaaagagtaaattctggggtcgttccatccaacttgatcctgttggtgaattaacactggagtttgatgatggggaagttttccaatggagcaaggtgacaacttcaatttacaatctcatattgggcaagctatattgcgatcactatggtactatgcgcattcaaggtaatcgtgagtattcatgtaagcttaagttcaaggagcagtcaattatcgatcgcaaccctcaccaggtgcaaggtgttgttcaagatagaaatggtcgaactgttgctacactatttggaaaatgggatgaaagcatgcactatgtaatgggtgattgctttgggaaaggcaagggaactgaacagttatcggaggcccatttgttgtggaaaagaagcaaaccacctaagtttcccactagatacaatctcactcaatttgcaattacattgaatgaacttacccctggattgaaggagaaactgccacctacagactcaagattacgaccagaccagagatgtctggagaacggtgaatatgaaagggcaaatgctgagaaattgaggcttgaacagagacaacggcagtgttcctttttgtcgtcctgtatcatgctgtggtcaagtaacatgatcatggccatcacacctcaggcacgaaagatgcaggagagcggatggaagcctcggtggtttgcgaaggataaagctactgacacataccgttacgtcggtgggtactgggaatccagagaaaagagcagctgggaaggttgccccgacatcttcggacaagtccctaacgatctgatggtaactgactaggttcgagtaggttataggtcttttgcttctccttatcggtatcacttgattccggaaattttagtggttcatattatagagcaattaagtgcccgttgacaagtaaacattggcagtgcctccggtaatattggtctcgtacataataagaagaaaatggttcggtctcacatgttaccttatttttttttggcttttggtatagtaatagttttttttccttgtgaggttttcatgctcacaagttcagtcttcaaagtggtgtagcgtgggcgattagtggtcatgactaaatatatgtaactacgctacgcatacaggaggaggccgtgaatttgttcattttggtgctagtggtagttggtcctttgcgtatcgatttttgaatgccgg

SEQ ID NO: 5031 - DNA, 2630 bp, Zea Mays
gcgtccgttcccggagcaaaaataaaaaaaatcaaaaacacaaaagaattcgctacttcgccggcgacaggggcgaccgcgcgcgccccggccggtgctgatccggactctcccatgcacccattctgctgtgcgccgctcgtgcctgtatcgcccgtggcctccgccgcggccgcgtcctctgcggtggcgggcgccccggccgtgatgccgccaccgcagcccccgcctcctccgcctcctccgccccgaagcaaccccgcctctggcggtgagaggcgcgcgcgcgcggcgggggtcagcggtggcggaggaggcggttcctcgccgcccgagggggtgaagctgaacgagatcgtcggcggcggcatctcgggaatcctgtacaagtgggtcaactacgggcgcggttggaggccgcgctggttcgctctccacgacggcgtgctctcctactacaagatccacgggcccgaccgcatcatcctatcgcgcgagaccgagcggggcgccaaggtcatcggcgatgattccctccgccgcctcaaccgcccctccacctcctcgtcgtcccactccaacggccaccaccatcctcgaaaccccatcggcgaaatccacctcaaggtgtcgaccgtgagggagagcagatcggacgacaggagattctccatcttctcggggacgaagacgttgcacctgagagcggagaccagggaggacagagctgcgtggctcgaggcgctgcgggcgaccaaggacatgttcccgaggatgtcctccagcgagatggtcgggccaggggacaccgcagcggcagtggccgtctcgaccgagcgcctaaggcagcggctgcagcaggaaggggtcagcgaggcggccattgctgacagcgagatgatcgtgcgggcagaattcgaggctctgcacaagcagcttgtgctctccaagcagaagcacgcgctcctcttggaaactcttcgccagctagagaaaaggttgatttggagaatacccttgtcgatgagagtcaaaggcagtcgaaagagtatggatctgcttctaaaccaagacatgagaagtatagtgaaggaagtgctagtgaatctgatgattataatgaaccacaagatcctgctgaagagactgatgatgatgagaacctttattttgatacaagagattttctatcctcaagctcttttaaaagtagtggatctgatttccaaagatctgaagctggttcagatgatgaagacgattatccaatggatggaattgatccttccatgaagtctattgggattagttatccatatgtaagaaggcggaagaagctaccagatccggttgagaaagaaaagggtgtaagtttgtggtcaatgatcaaggacaacataggaaaggatcttacaaaagtttgtctgcctgtttacttcaatgagccactttcatcgttacaaaaatgttttgaagatctggagtattcctaccttattgatcgtgcatctgaatgggggaaaagggggaatagtcttatgaggattcttagcgtagcagcatttgctgtttctggatatgcctctacagatggcaggagctgtaagccttttaacccccttcttggggagacatatgaagcagactatccagacaaaggcctccgttttttctctgaaaaggttagtcatcaccctatggttgttgcttgccactgtgagggaactggctggaggttttgggctgatagcaacctaaagagtaaattctggggtcgttccatccaacttgatcctgttggtgaattaacactggagtttgatgatggggaagttttccaatggagcaaggtgacaacttcaatttacaatctcatattgggcaagctatattgcgatcactatggtactatgcgcattcaaggtaatcgtgagtattcatgtaagcttaagttcaaggagcagtcaattatcgatcgcaaccctcaccaggtgcaaggtgttgttcaagatagaaatggtcgaactgttgctacactatttggaaaatgggatgaaagcatgcactatgtaatgggtgattgctttgggaaaggcaagggaactgaacagttatcggaggcccatttgttgtggaaaagaagcaaaccacctaagtttcccactagatacaatctcactcaatttgcaattacattgaatgaacttacccctggattgaaggagaaactgccacctacagactcaagattacgaccagaccagagatgtctggagaacggtgaatatgaaagggcaaatgctgagaaattgaggcttgaacagagacaacggcaggcacgaaagatgcaggagagcggatggaagcctcggtggtttgcgaaggataaagctactgacacataccgttacgtcggtgggtactgggaatccagagaaaagagcagctgggaaggttgccccgacatcttcggacaagtccctaacgatctgatgggatttcagacaccacccgcttcagttgccgcacctggagatgggtctggtcaggacgacacaacacattcgtgggtgaacaatcttttcagcacgcatagtccagccggaggaggtggcgatggatatgagtga

SEQ ID NO: 5032 - DNA, 1661 bp, Zea Mays
tttgactcgcacagatcctatagtctcatccttgttgatggagtatatattaagaaggaagtgctagtgaatctgatgattataatgaaccacaagatcctgctgaagagactgatgatgatgagaacctttattttgatacaagagattttctatcctcaagctcttttaaaagtagtggatctgatttccaaagatctgaagctggttcagatgatgaagacgattatccaatggatggaattgatccttccatgaagtctattgggattagttatccatatgtaagaaggcggaagaagctaccagatccggttgagaaagaaaagggtgtaagtttgtggtcaatgatcaaggacaacataggaaaggatcttacaaaagtttgtctgcctgtttacttcaatgagccactttcatcgttacaaaaatgttttgaagatctggagtattcctaccttattgatcgtgcatctgaatgggggaaaagggggaatagtcttatgaggattcttagcgtagcagcatttgctgtttctggatatgcctctacagatggcaggagctgtaagccttttaacccccttcttggggagacatatgaagcagactatccagacaaaggcctccgttttttctctgaaaaggttagtcatcaccctatggttgttgcttgccactgtgagggaactggctggaggttttgggctgatagcaacctaaagagtaaattctggggtcgttccatccaacttgatcctgttggtgaattaacactggagtttgatgatggggaagttttccaatggagcaaggtgacaacttcaatttacaatctcatattgggcaagctatattgcgatcactatggtactatgcgcattcaaggtaatcgtgagtattcatgtaagcttaagttcaaggagcagtcaattatcgatcgcaaccctcaccaggtgcaaggtgttgttcaagatagaaatggtcgaactgttgctacactatttggaaaatgggatgaaagcatgcactatgtaatgggtgattgctttgggaaaggcaagggaactgaacagttatcggaggcccatttgttgtggaaaagaagcaaaccacctaagtttcccactagatacaatctcactcaatttgcaattacattgaatgaacttacccctggattgaaggagaaactgccacctacagactcaagattacgaccagaccagagatgtctggagaacggtgaatatgaaagggcaaatgctgagaaattgaggcttgaacagagacaacggcagtgttcctttttgtcgtcctgtatcatgctgtggtcaagtaacatgatcatggccatcacacctcaggcacgaaagatgcaggagagcggatggaagcctcggtggtttgcgaaggataaagctactgacacataccgttacgtcggtgggtactgggaatccagagaaaagagcagctgggaaggttgccccgacatcttcggacaagtccctaacgatctgatgggatttcagacaccacccgcttcagttgccgcacctggagatgggtctggtcaggacgacacaacacattcgtgggtgaacaatcttttcagcacgcatagtccagccggaggaggtggcgatggatatgagtga

SEQ ID NO: 5033 - DNA, 1682 bp, Zea Mays
tgtctcactctcacatagtaaaaaaaaaaaacgccccaaggttcttaagcacaattctctagctatcttggtctcctacacagcctatgcacatgagcccatgcctctcctctccttgcgcctgcatagagagctaagcccgtcttccccaaagacggaccaatccagcagcttctactgctacccatgctcccctcccttcgccgccgccgacgccagctttcccctcagctaccagatcggtagtgccgcggccgccgacgccacccctccacaagccgtgatcaactcgccggacctgccggtgcaggcgctgatggaccacgcgccggcgccggctacagagctgggcgcctgcgccagtggtgcagaaggatccggcgccagcctcgacagggcggctgccgcggcgaggaaagaccggcacagcaagatatgcaccgccggcgggatgagggaccgccggatgcggctctcccttgacgtcgcgcgcaaattcttcgcgctgcaggacatgcttggcttcgacaaggcaagcaagacggtacagtggctcctcaacacgtccaagtccgccatccaggagatcatggccgacgacgcgtcttcggagtgcgtggaggacggctccagcagcctctccgtcgacggcaagcacaacccggcagagcagctgggaggaggaggagatcagaagcccaagggtaattgccgcggcgaggggaagaagccggccaaggcaagtaaagcggcggccaccccgaagccgccaagaaaatcggccaataacgcacaccaggtccccgacaaggagacgagggcgaaagcgagggagagggcgagggagcggaccaaggagaagcaccggatgcgctgggtaaagcttgcttcagcaattgacgtggaggcggcggctgcctcggggccgagcgacaggccgagctcgaacaatttgagccaccactcatcgttgtccatgaacatgccgtgtgctgccgctgaattggaggagagggagaggtgttcatcagctctcagcaatagatcagcaggtaggatgcaagaaatcacaggggcgagcgacgtggtcctgggctttggcaacggaggaggaggatacggcgacggcggcggcaactactactgccaagagcaatgggaactcggtggagtcgtctttcagcagaactcacgcttctactgaacactacgggcgcactagacttcgtaattggctgtgtgacgatgaactaagtttggtcatcgcatgatgatgtattatagctagctagcatgcactgtggcgttgattcaataatggaattaatcggtgtcgtcgatttggtgatttccgaactgaatctctgtgatgaacgagatcaaacagtatccgccggtgacggacgttcattactattggcaagcaaagcaagtactaatgtaattcagctgtttgatgacagaatgaaaaaaatgttgaaggctgaagctataacatgctgaaagagaggcttttgctaggtaaaagtctagctcacaaggtcaattccatgatgccgtttgtatgcatgttaaaatctgcacctaatggcgcggctttatatagtcttataattcatggatcaaacatgccgatcatttagttgggttaaaagttcctgttactaatggtttatctaatt

SEQ ID NO: 5034 - DNA, 2227 bp, Zea Mays
aagctcttcaccacaaactgacaaacacgacccaggccttcttcctgcgagtttcatttcatttcatcctaccttacctttttactcctccagtccagtcagagaacaccataagtggccgctacacctgctcactccattgcaccactagcaagtagcaacaggagcgcaggcagaactagagcggtcttggtatggcttcttccctcgcgcccgcgtcgtgggcactgccgctgcagatggtcggggctggggcggcagcggcggggccttcctgccgcgcgacgctagccgtcgtcacggagccccgctgggccgcgtcgctgcgccgggcaagggttctcgtggcgctggcgccccggtgcgtggcgctcgacgggcccggcgccagcggcgaggaggaggcgcccaagatcgaggacgagaggaagaagagcggtgagacgaagaagccggcgcgcggccggccggtgtggagccggatcctcttcgcctccaagaagacacgaagtatcatcatcctcaacgccctcacggtcatctatgcaagtgatattccggttttgaaagaggtcgaagccctgacagagcctgcggtcttcaacatggtgcggttcgttgttgcagccatccccttcgtaccattcgcgctccgttccttcggtgaccgcagtgtacgctacgcgggactggagctgggagtctgggttagcttagcttacctttctcaagcaattggattgctctcatctgatgctggccgagcatccttcatcacggccttcacggtcgtagttgtgcctctaattgatggtcttcttggtgcttcgatccccagactcacatggttcggagccatcatgtctctgttcggaattggcctgctggaatgtggtggatctcctcccagtgttggcgatattttgaacttcttcagtgccgtgtttttcgggatccatatgcttagaacagaacaaatatcaaggagtacggacaagaagaaatttttagctcttcttggcttcgaggtccttgtggttgctttctcctccgttctctggtttatgttcaaagatggctacgttgataccagcggatccagctttgaatcttggacgttcgggatgctctgggataccacagtttcgtttccttggataccagcattgtacactggggttctttctacggtgttatgcatgtgggcagagatggtggcgatgggcgatgtttcagcaaccgaaactgcagttgtttacgggttggagccagtttggggagctgcttttgcttggttcctccttggtgaaagatgggatgacgctgcatggactggagctgctctcgtattatgtggcagtttgacagttcagctatttgggtcagctcctgagaagtccaagaaagtcaaaaaacgcagcagcaatgctttagaaactccagtgaaacgacgagactacttatcgttgtctcccataccagttgattccgggaagatcataggaaggcaattagaaaggaagaacaaagcagtataggtagcccaactacaaggcaagaagaaaggaaacgctgcgatgataggggcgcgcatgtaccaaatcattgtcctgaggcatcgtctgtttggctccgtcaatggccatatggggatgctgctcgattgtccgcatggagttttttttttcctttgtccgtattgaaaatggtcgtatttggatttctgttgtctcggttgaccgcattggtagtggcaactcgaggagaatacttagacacatctactggcgtagtaatgacgttcagtgagataacttagtatgttttgggcactgctaaccgtaaaggttcatgtattaatatagtgggtaaatggttctagagtactgaactgagcataccattgtatagtactgaaataacaaataccacgcatggtattatttggctcccagtcaatagatccaggaatcaggacatgtattgtgttccgttgagattgattttgtggctgtgattttatttttttattttttttttggtcgaaggacataatcttgtattctgctcttgtattatgtaagtctatgcttagttgtttagtcatttgtctttggcggttgcacttttcatattcaaataggccaccttaatatagctgtcggcattcatcctgtctagcgttgcttgagaactgaccatactgaacaaatgaccaagatcattt

SEQ ID NO: 5035 - DNA, 2876 bp, Zea Mays
cgcagctccccacttctcatcgccccctttttttaatttgtggccatctttggggtggtgggcggaggatttctaactggatggtgaagtttgtctggcgaaaaggacggctgcgacgaacccgtccatcgatccaacgctgtgcgcgcgttgggggagggacctgccaggccccacctgcagcgacagactattgatagatgccttcctctctgatcacctgatggctgatgccttcgcggccgtcttcgcctgccgctgctactactagttgccttcctcgcttccccgtctcgccccagccgcttcccccctcccctaccctttccttccccactcgcacttcccaaccctggatccaaatcccaagctatcccagaaccgaaaccgaggcgcgcaagccattattagctggctagctaggcctgtagctccgaaatcatgaagcgcgagtaccaagacgccggcgggagtggcggcgacatgggctcctccaaggacaagatgatggcggcggcggcgggagcaggggaacaggaggaggaggacgtggatgagctgctggccgcgctcgggtacaaggtgcgttcgtcggatatggcggacgtcgcgcagaagctggagcagctcgagatggccatggggatgggcggcgtgggcggcgccggcgctaccgctgatgacgggttcgtgtcgcacctcgccacggacaccgtgcactacaatccctccgacctgtcgtcctgggtcgagagcatgctgtccgagctcaacgcgcccccagcgccgctcccgcccgcgacgccggccccaaggctcgcgtccacctcctcttcctcgtcgtcatccatggatggcggtcgcactaggagctccgtggtcgaagctgcgccgccggcgacgcaagcatccgcggcggccaacgggcccgcggtgccggtggtggtggtggacacgcaggaggccgggatccggctcgtgcacgcgctgctggcgtgcgcggaggccgtgcagcaggagaacttctctgcggcggaggcgctggtcaagcagatccccatgctggcctcgtcgcagggcggtgccatgcgcaaggtcgccgcctacttcggcgaggcgcttgcccgccgcgtgtatcgcttccgcccgccaccggacagctccctcctcgacgccgccttcgccgacctcttgcacgcgcacttctacgagtcctgcccctacctgaagttcgcccacttcaccgcgaaccaggccatcctcgaggccttcgccggctgccgccgcgtccacgtcgtcgacttcggcatcaagcaggggatgcagtggccggctcttctccaggccctcgccctccgccctggcggccccccgtcgttccggctcaccggcgtcgggccgccgcagcccgacgagaccgacgccttgcagcaggtgggctggaaacttgcccagttcgcgcacaccatccgcgtggacttccagtaccgtggcctcgtcgcggccacgctcgccgacctggagccgttcatgctgcaaccggagggcgatgacacggatgacgagcccgaggtgatcgccgtgaactccgtgttcgagctgcaccggcttcttgcgcagcccggtgccctcgagaaggtcctgggcacggtgcgcgcggtgcggccgaggatcgtgaccgtggtcgagcaggaggccaaccacaactccggcacgttcctcgaccgcttcaccgagtcgctgcactactactccaccatgttcgattctctcgagggcgccggcgccggctccggccagtccaccgacgcctccccggccgcggccggcggcacggaccaggtcatgtcggaggtgtacctcggccggcagatctgcaacgtggtggcgtgcgagggcgcggagcgcacggagcgccacgagacgctgggccagtggcgcagccgcctcggcggctccgggttcgcgcccgtgcacctgggctccaatgcctacaagcaggcgagcacgctgctggcgctcttcgccggcggcgacgggtacagggtggaggagaaggacgggtgcctgaccctggggtggcatacgcgcccgctcatcgccacctcggcgtggcgcgtcgccgccgccgccgctccgtgatcagggaggggtggttggggcttctggacgccgatcaaggcacacgtacgtcccctggcatggcgcaccctccctcgagctcgccggcacgggtgaagctagacgtcattgagcgctgaatcgcagttagcgaccgggccaaggttctcgccggcgtgatgagatggaacactttgactcccgcggccggatcggcctgtgttcgttcttgtttccgatctcccttctctttcccgttgcttcgatcccgtcaagtatggtagaccgtagcctattgttatgtttaaatgtcaattattatgtgtaattcctccaagcgccgatatccaataaggacgaaccggattttcgttagctcgacctcgaatgagaattttgtatacaatgcatcctcgttagctatgttcatctgttcgaatgcttgtgccctcatgttttcattccgttcgtcctctacacgaatggtgatcactatgtattgtgaacgagctcagtcatgtaggagctgccagattggaattcgcggcttgctttgcctttgaggagtatgaaaatattatatgtttatctcacaagaactggtaaggtctgtttatttcttttccttgccgtgcccatcctgtaagaaatcctccatggccgatgcggaaacatctcgttgctttgccttgcatgtatcccttcgcctgtgtggccgtcctctgccggggctgttcacgatctaaaaataaaaa

SEQ ID NO: 5036 - DNA, 2948 bp, Zea Mays
cgcagctccccacttctcatcgccccctttttttaatttgtggccatctttggggtggtgggcggaggatttctaactggatggtgaagtttgtctggcgaaaaggacggctgcgacgaacccgtccatcgatccaacgctgtgcgcgcgttgggggagggacctgccaggccccacctgcagcgacagactattgatagatgccttcctctctgatcacctgatggctgatgccttcgcggccgtcttcgcctgccgctgctactactagttgccttcctcgcttccccgtctcgccccagccgcttcccccctcccctaccctttccttccccactcgcacttcccaaccctggatccaaatcccaagctatcccagaaccgaaaccgaggcgcgcaagccattattagctggctagctaggcctgtagctccgaaatcatgaagcgcgagtaccaagacgccggcgggagtggcggcgacatgggctcctccaaggacaagatgatggcggcggcggcgggagcaggggaacaggaggaggaggacgtggatgagctgctggccgcgctcgggtacaaggtgcgttcgtcggatatggcggacgtcgcgcagaagctggagcagctcgagatggccatggggatgggcggcgtgggcggcgccggcgctaccgctgatgacgggttcgtgtcgcacctcgccacggacaccgtgcactacaatccctccgacctgtcgtcctgggtcgagagcatgctgtccgagctcaacgcgcccccagcgccgctcccgcccgcgacgccggccccaaggctcgcgtccacatcgtccaccgtcacaagtggcgccgccgccggtgctggctacttcgatctcccgcccgccgtggactcgtcctcctcttcctcgtcgtcatccatggatggcggtcgcactaggagctccgtggtcgaagctgcgccgccggcgacgcaagcatccgcggcggccaacgggcccgcggtgccggtggtggtggtggacacgcaggaggccgggatccggctcgtgcacgcgctgctggcgtgcgcggaggccgtgcagcaggagaacttctctgcggcggaggcgctggtcaagcagatccccatgctggcctcgtcgcagggcggtgccatgcgcaaggtcgccgcctacttcggcgaggcgcttgcccgccgcgtgtatcgcttccgcccgccaccggacagctccctcctcgacgccgccttcgccgacctcttgcacgcgcacttctacgagtcctgcccctacctgaagttcgcccacttcaccgcgaaccaggccatcctcgaggccttcgccggctgccgccgcgtccacgtcgtcgacttcggcatcaagcaggggatgcagtggccggctcttctccaggccctcgccctccgccctggcggccccccgtcgttccggctcaccggcgtcgggccgccgcagcccgacgagaccgacgccttgcagcaggtgggctggaaacttgcccagttcgcgcacaccatccgcgtggacttccagtaccgtggcctcgtcgcggccacgctcgccgacctggagccgttcatgctgcaaccggagggcgatgacacggatgacgagcccgaggtgatcgccgtgaactccgtgttcgagctgcaccggcttcttgcgcagcccggtgccctcgagaaggtcctgggcacggtgcgcgcggtgcggccgaggatcgtgaccgtggtcgagcaggaggccaaccacaactccggcacgttcctcgaccgcttcaccgagtcgctgcactactactccaccatgttcgattctctcgagggcgccggcgccggctccggccagtccaccgacgcctccccggccgcggccggcggcacggaccaggtcatgtcggaggtgtacctcggccggcagatctgcaacgtggtggcgtgcgagggcgcggagcgcacggagcgccacgagacgctgggccagtggcgcagccgcctcggcggctccgggttcgcgcccgtgcacctgggctccaatgcctacaagcaggcgagcacgctgctggcgctcttcgccggcggcgacgggtacagggtggaggagaaggacgggtgcctgaccctggggtggcatacgcgcccgctcatcgccacctcggcgtggcgcgtcgccgccgccgccgctccgtgatcagggaggggtggttggggcttctggacgccgatcaaggcacacgtacgtcccctggcatggcgcaccctccctcgagctcgccggcacgggtgaagctagacgtcattgagcgctgaatcgcagttagcgaccgggccaaggttctcgccggcgtgatgagatggaacactttgactcccgcggccggatcggcctgtgttcgttcttgtttccgatctcccttctctttcccgttgcttcgatcccgtcaagtatggtagaccgtagcctattgttatgtttaaatgtcaattattatgtgtaattcctccaagcgccgatatccaataaggacgaaccggattttcgttagctcgacctcgaatgagaattttgtatacaatgcatcctcgttagctatgttcatctgttcgaatgcttgtgccctcatgttttcattccgttcgtcctctacacgaatggtgatcactatgtattgtgaacgagctcagtcatgtaggagctgccagattggaattcgcggcttgctttgcctttgaggagtatgaaaatattatatgtttatctcacaagaactggtaaggtctgtttatttcttttccttgccgtgcccatcctgtaagaaatcctccatggccgatgcggaaacatctcgttgctttgccttgcatgtatcccttcgcctgtgtggccgtcctctgccggggctgttcacgatctaaaaataaaaa

SEQ ID NO: 5037 - DNA, 798 bp, Zea Mays
ccgatcttctccaaatcaatccgtgctccaattctgagaacatcgcctcctatcccggaagcctagccctatcctccatctggccattctctctccgactctcccccaccccagccaccgccaccactgtcatctcctctcctcccttttttcgggtattcttttccccacttcttcgcgctcgctaggcgctccctccattcctagctgaacgtgaagacggacaactagacgagcaatatgagagcggttgaccagaggcggtgaagtgagatgggttcttgtgttggatgcatcaaatcttgggatgatcaaaccaaacaccatagcggaaaatggttcaggatatatatgcttgggaactagtgctacatggatgctttcaaggtgccgtgctagggaaacaaccaaaataggatgaaagagtgtcgaatgcttcttcagacactatttcttggttcgtcaattctattaacccaaatgcattttttctcaaatgtggcaaaaaatgattctctcaccaattgtcagcacgcctgtttctagcaaagttctagagaaggaaaagatggaatgaaactcatattttggtggccgcacaagtgtggatacttgaattcatatatatacttagttaggatcgaagttagtgcaaacagttgatgatcaagttttttaattagtattttagtttggattaagagtacatttatgtatgagttatatggcattgctaatttataagatattgaatggtacttataaatattatattaataggaatattattaaatatat

SEQ ID NO: 5038 - DNA, 1646 bp, Zea Mays
ccgatcttctccaaatcaatccgtgctccaattctgagaacatcgcctcctatcccggaagcctagccctatcctccatctggccattctctctccgactctcccccaccccagccaccgccaccactgtcatctcctctcctcccttttttcgggtattcttttccccacttcttcgcgctcgctaggcgctccctccattcctagctgaacgtgaagacggacaactagacgagcaatatgagagcggttgaccagaggcggtgaagtgagatggtactgcggttcggcaataccagcattgttgcaagtgaaagaaaaaacattcgtcttcaatgggacggttgacgccgccgcggcggagtctagaggagccaaccctgtggcggaattccggggcaaggactgcagtgccgccgacctctttcactccttcgtcgaccaagacaaccttgttttttatgttttttggttactttactctgacttgcctatgaatctgaccatctggtgcagtgtgtcaattaatttcaatgcatcaaaaatttgcaacacgccatgtgtttgttttcatattcttaggaccaaagggtctcctttttgcagcatgtactttcgtatcgatatgtaagtgagtcttctaatgtcaaagtaaaactcaattccaggttcttgtgttggatgcatcaaatcttgggatgatcaaaccaaacaccatagcggaaaatggttcaggatatatatgcttgggaactagtgctacatggatgctttcaaggtgccgtgctagggaaacaaccaaaataggtaaacgttcaaatttctacctcccttgtcttactttaagaagtggtggtgacaattgtaggttagctatcccgaaatattatttgtgactgactgatgtttaaaaatgatgcagatacaaatgtattgtttaaccaccttgctactaaggaaataatcctgctactgaacaaataatagatcacatcattcacctagaaaaacagatgatgtcccagaatctaatacgtctagggataagggtcgaatctattcaacatagtcgaaaatgttaattcccatatactgacatactgtattgtgaacaagagataatgtaatccatagtaagagggacagataggagaaacttagaaacccaaagctctaaatggtaattcaatttaacatggaggcacaggatcatataccacacatcgacatcaatattgactaattccttgcttattttcaataggatgaaagagtgtcgaatgcttcttcagacactatttcttggttcgtcaattctattaacccaaatgcattttttctcaaatgtggcaaaaaatgattctctcaccaattgtcagcacgcctgtttctagcaaagttctagagaaggaaaagatggaatgaaactcatattttggtggccgcacaagtgtggatacttgaattcatatatatacttagttaggatcgaagttagtgcaaacagttgatgatcaagttttttaattagtattttagtttggattaagagtacatttatgtatgagttatatggcattgctaatttataagatattgaatggtacttataaatattatattaataggaatattattaaatatat

SEQ ID NO: 5039 - DNA, 819 bp, Zea Mays
gatcttctccaaatcaatccgtgctccaattctgagaacatcgcctcctatcccggaagcctagccctatcctccatctggccattctctctccgactctcccccaccccagccaccgccaccactgtcatctcctctcctcccttttttcgggtattcttttccccacttcttcgcgctcgctaggcgctccctccattcctagctgaacgtgaagacggacaactagacgagcaatatgagagcggttgaccagaggcggtgaagtgagatgggttcttgtgttggatgcatcaaatcttgggatgatcaaaccaaacaccatagcggaaaatggttcaggatatatatgcttgggaactagtgctacatggatgctttcaaggtgccgtgctagggaaacaaccaaaatagcacgcctgtttctagcaaagttctagagaaggtaagttctttagatagatgcaaaatctagtattattttattcttttttcacattcatatgacctttatgatgtcacaatgtgaggtgtttaactgtgtctaactattaattattgccttttcctatttgttgtacaggaaaagatggaatgaaactcatattttggtggccgcacaagtgtggatacttgaattcatatatatacttagttaggatcgaagttagtgcaaacagttgatgatcaagttttttaattagtattttagtttggattaagagtacatttatgtatgagttatatggcattgctaatttataagatattgaatggtacttataaatattatattaataggaatattattaaatatat

SEQ ID NO: 5040 - DNA, 621 bp, Zea Mays
gatcttctccaaatcaatccgtgctccaattctgagaacatcgcctcctatcccggaagcctagccctatcctccatctggccattctctctccgactctcccccaccccagccaccgccaccactgtcatctcctctcctcccttttttcgggtattcttttccccacttcttcgcgctcgctaggcgctccctccattcctagctgaacgtgaagacggacaactagacgagcaatatgagagcggttgaccagaggcggtgaagtgagatgggttcttgtgttggatgcatcaaatcttgggatgatcaaaccaaacaccatagcggaaaatggttcaggatatatatgcttgggaactagtgctacatggatgctttcaaggaaaagatggaatgaaactcatattttggtggccgcacaagtgtggatacttgaattcatatatatacttagttaggatcgaagttagtgcaaacagttgatgatcaagttttttaattagtattttagtttggattaagagtacatttatgtatgagttatatggcattgctaatttataagatattgaatggtacttataaatattatattaataggaatattattaaatatat

SEQ ID NO: 5041 - DNA, 767 bp, Zea Mays
gatcttctccaaatcaatccgtgctccaattctgagaacatcgcctcctatcccggaagcctagccctatcctccatctggccattctctctccgactctcccccaccccagccaccgccaccactgtcatctcctctcctcccttttttcgggtattcttttccccacttcttcgcgctcgctaggcgctccctccattcctagctgaacgtgaagacggacaactagacgagcaatatgagagcggttgaccagaggcggtgaagtgagatgggttcttgtgttggatgcatcaaatcttgggatgatcaaaccaaacaccatagcggaaaatggttcaggatatatatgcttgggaactagtgctacatggatgctttcaaggatgaaagagtgtcgaatgcttcttcagacactatttcttggttcgtcaattctattaacccaaatgcattttttctcaaatgtggcaaaaaatgattctctcaccaattgtcagcacgcctgtttctagcaaagttctagagaaggaaaagatggaatgaaactcatattttggtggccgcacaagtgtggatacttgaattcatatatatacttagttaggatcgaagttagtgcaaacagttgatgatcaagttttttaattagtattttagtttggattaagagtacatttatgtatgagttatatggcattgctaatttataagatattgaatggtacttataaatattatattaataggaatattattaaatatat

SEQ ID NO: 5042 - DNA, 1191 bp, Zea Mays
gatcttctccaaatcaatccgtgctccaattctgagaacatcgcctcctatcccggaagcctagccctatcctccatctggccattctctctccgactctcccccaccccagccaccgccaccactgtcatctcctctcctcccttttttcgggtattcttttccccacttcttcgcgctcgctaggcgctccctccattcctagctgaacgtgaagacggacaactagacgagcaatatgagagcggttgaccagaggcggtgaagtgagatgggttcttgtgttggatgcatcaaatcttgggatgatcaaaccaaacaccatagcggaaaatggttcaggatatatatgcttgggaactagtgctacatggatgctttcaaggtactgaactgaatctctcaagctctggtgattgctattgacagtaagtagtgcctgagcacatgcgagtggattaggtacaaagatgccaaatatttttgccacttagcaattaccaaattttcttttccacaaaactccaatcaaatttgagattagaaatggatttaatcgaatacaaaggaaaataatgtagtggattgcctcttcagttgaagaattagatttgttattccgttacaattaggataatttttaccacttcctatatcttgagcgttactaaacatatgtatccatactaaacacatatgtatccatgatacagataccataagaaccattgagagtttctgcgttagtatcactctgaggcatttctgttactaatgcaggtgccgtgctagggaaacaaccaaaataggatgaaagagtgtcgaatgcttcttcagacactatttcttggttcgtcaattctattaacccaaatgcattttttctcaaatgtggcaaaaaatgattctctcaccaattgtcagcacgcctgtttctagcaaagttctagagaaggaaaagatggaatgaaactcatattttggtggccgcacaagtgtggatacttgaattcatatatatacttagttaggatcgaagttagtgcaaacagttgatgatcaagttttttaattagtattttagtttggattaagagtacatttatgtatgagttatatggcattgctaatttataagatattgaatggtacttataaatattatattaataggaatattattaaatatat

SEQ ID NO: 5043 - DNA, 1320 bp, Zea Mays
gatcttctccaaatcaatccgtgctccaattctgagaacatcgcctcctatcccggaagcctagccctatcctccatctggccattctctctccgactctcccccaccccagccaccgccaccactgtcatctcctctcctcccttttttcgggtattcttttccccacttcttcgcgctcgctaggcgctccctccattcctagctgaacgtgaagacggacaactagacgagcaatatgagagcggttgaccagaggcggtgaagtgagatgggttcttgtgttggatgcatcaaatcttgggatgatcaaaccaaacaccatagcggaaaatggttcaggatatatatgcttgggaactagtgctacatggatgctttcaagataccataagaaccattgagagtttctgcgttagtatcactctgaggcatttctgttactaatgcaggtgccgtgctagggaaacaaccaaaataggtaaacgttcaaatttctacctcccttgtcttactttaagaagtggtggtgacaattgtaggttagctatcccgaaatattatttgtgactgactgatgtttaaaaatgatgcagatacaaatgtattgtttaaccaccttgctactaaggaaataatcctgctactgaacaaataatagatcacatcattcacctagaaaaacagatgatgtcccagaatctaatacgtctagggataagggtcgaatctattcaacatagtcgaaaatgttaattcccatatactgacatactgtattgtgaacaagagataatgtaatccatagtaagagggacagataggagaaacttagaaacccaaagctctaaatggtaattcaatttaacatggaggcacaggatcatataccacacatcgacatcaatattgactaattccttgcttattttcaataggatgaaagagtgtcgaatgcttcttcagacactatttcttggttcgtcaattctattaacccaaatgcattttttctcaaatgtggcaaaaaatgattctctcaccaattgtcagcacgcctgtttctagcaaagttctagagaaggaaaagatggaatgaaactcatattttggtggccgcacaagtgtggatacttgaattcatatatatacttagttaggatcgaagttagtgcaaacagttgatgatcaagttttttaattagtattttagtttggattaagagtacatttatgtatgagttatatggcattgctaatttataagatattgaatggtacttataaatattatattaataggaatattattaaatatat

SEQ ID NO: 5044 - DNA, 1648 bp, Zea Mays
gatcttctccaaatcaatccgtgctccaattctgagaacatcgcctcctatcccggaagcctagccctatcctccatctggccattctctctccgactctcccccaccccagccaccgccaccactgtcatctcctctcctcccttttttcgggtattcttttccccacttcttcgcgctcgctaggcgctccctccattcctagctgaacgtgaagacggacaactagacgagcaatatgagagcggttgaccagaggcggtgaagtgagatgggttcttgtgttggatgcatcaaatcttgggatgatcaaaccaaacaccatagcggaaaatggttcaggatatatatgcttgggaactagtgctacatggatgctttcaaggtactgaactgaatctctcaagctctggtgattgctattgacagtaagtagtgcctgagcacatgcgagtggattaggtacaaagatgccaaatatttttgccacttagcaattaccaaattttcttttccacaaaactccaatcaaatttgagattagaaatggatttaatcgaatacaaaggaaaataatgtagtggattgcctcttcagttgaagaattagatttgttattccgttacaattaggataatttttaccacttcctatatcttgagcgttactaaacatatgtatccatactaaacacatatgtatccatgatacagataccataagaaccattgagagtttctgcgttagtatcactctgaggcatttctgttactaatgcaggtgccgtgctagggaaacaaccaaaataggtaaacgttcaaatttctacctcccttgtcttactttaagaagtggtggtgacaattgtaggttagctatcccgaaatattatttgtgactgactgatgtttaaaaatgatgcagatacaaatgtattgtttaaccaccttgctactaaggaaataatcctgctactgaacaaataatagatcacatcattcacctagaaaaacagatgatgtcccagaatctaatacgtctagggataagggtcgaatctattcaacatagtcgaaaatgttaattcccatatactgacatactgtattgtgaacaagagataatgtaatccatagtaagagggacagataggagaaacttagaaacccaaagctctaaatggtaattcaatttaacatggaggcacaggatcatataccacacatcgacatcaatattgactaattccttgcttattttcaataggatgaaagagtgtcgaatgcttcttcagacactatttcttggttcgtcaattctattaacccaaatgcattttttctcaaatgtggcaaaaaatgattctctcaccaattgtcagcacgcctgtttctagcaaagttctagagaaggaaaagatggaatgaaactcatattttggtggccgcacaagtgtggatacttgaattcatatatatacttagttaggatcgaagttagtgcaaacagttgatgatcaagttttttaattagtattttagtttggattaagagtacatttatgtatgagttatatggcattgctaatttataagatattgaatggtacttataaatattatattaataggaatattattaaatatat

SEQ ID NO: 5045 - DNA, 1253 bp, Zea Mays
gatcttctccaaatcaatccgtgctccaattctgagaacatcgcctcctatcccggaagcctagccctatcctccatctggccattctctctccgactctcccccaccccagccaccgccaccactgtcatctcctctcctcccttttttcgggtattcttttccccacttcttcgcgctcgctaggcgctccctccattcctagctgaacgtgaagacggacaactagacgagcaatatgagagcggttgaccagaggcggtgaagtgagatgggttcttgtgttggatgcatcaaatcttgggatgatcaaaccaaacaccatagcggaaaatggttcaggatatatatgcttgggaactagtgctacatggatgctttcaaggtgccgtgctagggaaacaaccaaaataggtaaacgttcaaatttctacctcccttgtcttactttaagaagtggtggtgacaattgtaggttagctatcccgaaatattatttgtgactgactgatgtttaaaaatgatgcagatacaaatgtattgtttaaccaccttgctactaaggaaataatcctgctactgaacaaataatagatcacatcattcacctagaaaaacagatgatgtcccagaatctaatacgtctagggataagggtcgaatctattcaacatagtcgaaaatgttaattcccatatactgacatactgtattgtgaacaagagataatgtaatccatagtaagagggacagataggagaaacttagaaacccaaagctctaaatggtaattcaatttaacatggaggcacaggatcatataccacacatcgacatcaatattgactaattccttgcttattttcaataggatgaaagagtgtcgaatgcttcttcagacactatttcttggttcgtcaattctattaacccaaatgcattttttctcaaatgtggcaaaaaatgattctctcaccaattgtcagcacgcctgtttctagcaaagttctagagaaggaaaagatggaatgaaactcatattttggtggccgcacaagtgtggatacttgaattcatatatatacttagttaggatcgaagttagtgcaaacagttgatgatcaagttttttaattagtattttagtttggattaagagtacatttatgtatgagttatatggcattgctaatttataagatattgaatggtacttataaatattatattaataggaatattattaaatatat

SEQ ID NO: 5046 - DNA, 1229 bp, Zea Mays
caattctgagaacatcgcctcctatcccggaagcctagccctatcctccatctggccattctctctccgactctcccccaccccagccaccgccaccactgtcatctcctctcctcccttttttcgggtattcttttccccacttcttcgcgctcgctaggcgctccctccattcctagctgaacgtgaagacggacaactagacgagcaatatgagagcggttgaccagaggcggtgaagtgagatggaggttcttgtgttggatgcatcaaatcttgggatgatcaaaccaaacaccatagcggaaaatggttcaggatatatatgcttgggaactagtgctacatggatgctttcaaggtgccgtgctagggaaacaaccaaaataggtaaacgttcaaatttctacctcccttgtcttactttaagaagtggtggtgacaattgtaggttagctatcccgaaatattatttgtgactgactgatgtttaaaaatgatgcagatacaaatgtattgtttaaccaccttgctactaaggaaataatcctgctactgaacaaataatagatcacatcattcacctagaaaaacagatgatgtcccagaatctaatacgtctagggataagggtcgaatctattcaacatagtcgaaaatgttaattcccatatactgacatactgtattgtgaacaagagataatgtaatccatagtaagagggacagataggagaaacttagaaacccaaagctctaaatggtaattcaatttaacatggaggcacaggatcatataccacacatcgacatcaatattgactaattccttgcttattttcaataggatgaaagagtgtcgaatgcttcttcagacactatttcttggttcgtcaattctattaacccaaatgcattttttctcaaatgtggcaaaaaatgattctctcaccaattgtcagcacgcctgtttctagcaaagttctagagaaggaaaagatggaatgaaactcatattttggtggccgcacaagtgtggatacttgaattcatatatatacttagttaggatcgaagttagtgcaaacagttgatgatcaagttttttaattagtattttagtttggattaagagtacatttatgtatgagttatatggcattgctaatttataagatattgaatggtacttataaatattatattaataggaatattattaaatatat

SEQ ID NO: 5047 - DNA, 1156 bp, Zea Mays
ctgagaacatcgcctcctatcccggaagcctagccctatcctccatctggccattctctctccgactctcccccaccccagccaccgccaccactgtcatctcctctcctcccttttttcgggtattcttttccccacttcttcgcgctcgctaggcgctccctccattcctagctgaacgtgaagacggacaactagacgagcaatatgagagcggttgaccagaggcggtgaagtgagatggtactgcggttcggcaataccagcattgttgcaagtgaaagaaaaaacattcgtcttcaatgggacggttgacgccgccgcggcggagtctagaggagccaaccctgtggcggaattccggggcaaggactgcagtgccgccgacctctttcactccttcgtcgaccaagacaaccttgttttttatgttttttggttactttactctgacttgcctatgaatctgaccatctggtgcagtgtgtcaattaatttcaatgcatcaaaaatttgcaacacgccatgtgtttgttttcatattcttaggaccaaagggtctcctttttgcagcatgtactttcgtatcgatatgtaagtgagtcttctaatgtcaaagtaaaactcaattccaggttcttgtgttggatgcatcaaatcttgggatgatcaaaccaaacaccatagcggaaaatggttcaggatatatatgcttgggaactagtgctacatggatgctttcaaggtgccgtgctagggaaacaaccaaaataggatgaaagagtgtcgaatgcttcttcagacactatttcttggttcgtcaattctattaacccaaatgcattttttctcaaatgtggcaaaaaatgattctctcaccaattgtcagcacgcctgtttctagcaaagttctagagaaggaaaagatggaatgaaactcatattttggtggccgcacaagtgtggatacttgaattcatatatatacttagttaggatcgaagttagtgcaaacagttgatgatcaagttttttaattagtattttagtttggattaagagtacatttatgtatgagttatatggcattgctaatttataagatattgaatggtacttataaatattatattaataggaatattattaaatatat

SEQ ID NO: 5048 - DNA, 1000 bp, Zea Mays
cgcctcctatcccggaagcctagccctatcctccatctggccattctctctccgactctcccccaccccagccaccgccaccactgtcatctcctctcctcccttttttcgggtattcttttccccacttcttcgcgctcgctaggcgctccctccattcctagctgaacgtgaagacggacaactagacgagcaatatgagagcggttgaccagaggcggtgaagtgagatggtactgcggttcggcaataccagcattgttgcaagtgaaagaaaaaacattcgtcttcaatgggacggttgacgccgccgcggcggagtctagaggagccaaccctgtggcggaattccggggcaaggactgcagtgccgccgacctctttcactccttcgtcgaccaagacaaccttgttttttatgttttttggttactttactctgacttgcctatgaatctgaccatctggtgcagtgtgtcaattaatttcaatgcatcaaaaatttgcaacacgccatgtgtttgttttcatattcttaggaccaaagggtctcctttttgcagcatgtactttcgtatcgatatgtaagtgagtcttctaatgtcaaagtaaaactcaattccaggttcttgtgttggatgcatcaaatcttgggatgatcaaaccaaacaccatagcggaaaatggttcaggatatatatgcttgggaactagtgctacatggatgctttcaaggtgccgtgctagggaaacaaccaaaataggaaaagatggaatgaaactcatattttggtggccgcacaagtgtggatacttgaattcatatatatacttagttaggatcgaagttagtgcaaacagttgatgatcaagttttttaattagtattttagtttggattaagagtacatttatgtatgagttatatggcattgctaatttataagatattgaatggtacttataaatattatattaataggaatattattaaatatat

SEQ ID NO: 5049 - DNA, 1964 bp, Zea Mays
atctggccattctctctccgactctcccccaccccagccaccgccaccactgtcatctcctctcctcccttttttcgggtattcttttccccacttcttcgcgctcgctaggcgctccctccattcctagctgaacgtgaagacggacaactagacgagcaatatgagagcggttgaccagaggcggtgaagtgagatggtactgcggttcggcaataccagcattgttgcaagtgaaagaaaaaacattcgtcttcaatgggacggttgacgccgccgcggcggagtctagaggagccaaccctgtggcggaattccggggcaaggactgcagtgccgccgacctctttcactccttcgtcgaccaagacaaccttgttttttatgttttttggttactttactctgacttgcctatgaatctgaccatctggtgcagtgtgtcaattaatttcaatgcatcaaaaatttgcaacacgccatgtgtttgttttcatattcttaggaccaaagggtctcctttttgcagcatgtactttcgtatcgatatgtaagtgagtcttctaatgtcaaagtaaaactcaattccaggttcttgtgttggatgcatcaaatcttgggatgatcaaaccaaacaccatagcggaaaatggttcaggatatatatgcttgggaactagtgctacatggatgctttcaaggtactgaactgaatctctcaagctctggtgattgctattgacagtaagtagtgcctgagcacatgcgagtggattaggtacaaagatgccaaatatttttgccacttagcaattaccaaattttcttttccacaaaactccaatcaaatttgagattagaaatggatttaatcgaatacaaaggaaaataatgtagtggattgcctcttcagttgaagaattagatttgttattccgttacaattaggataatttttaccacttcctatatcttgagcgttactaaacatatgtatccatactaaacacatatgtatccatgatacagataccataagaaccattgagagtttctgcgttagtatcactctgaggcatttctgttactaatgcaggtgccgtgctagggaaacaaccaaaataggtaaacgttcaaatttctacctcccttgtcttactttaagaagtggtggtgacaattgtaggttagctatcccgaaatattatttgtgactgactgatgtttaaaaatgatgcagatacaaatgtattgtttaaccaccttgctactaaggaaataatcctgctactgaacaaataatagatcacatcattcacctagaaaaacagatgatgtcccagaatctaatacgtctagggataagggtcgaatctattcaacatagtcgaaaatgttaattcccatatactgacatactgtattgtgaacaagagataatgtaatccatagtaagagggacagataggagaaacttagaaacccaaagctctaaatggtaattcaatttaacatggaggcacaggatcatataccacacatcgacatcaatattgactaattccttgcttattttcaataggatgaaagagtgtcgaatgcttcttcagacactatttcttggttcgtcaattctattaacccaaatgcattttttctcaaatgtggcaaaaaatgattctctcaccaattgtcagcacgcctgtttctagcaaagttctagagaaggaaaagatggaatgaaactcatattttggtggccgcacaagtgtggatacttgaattcatatatatacttagttaggatcgaagttagtgcaaacagttgatgatcaagttttttaattagtattttagtttggattaagagtacatttatgtatgagttatatggcattgctaatttataagatattgaatggtacttataaatattatattaataggaatattattaaatatat

SEQ ID NO: 5050 - DNA, 734 bp, Zea Mays
ctcgtgcctcatgtacatctatagtcatggccgcgtcgagcagccggcagagccccttgactcgatcggcgtcgtcgtccgcggcatcgcagagcatctccaccagctcgctcctcagttgccggaacttgtcccgggggccgggagcgggccccggtggcggtctctatggtggtgtcgatggcggcgaacgccgggaagaagggcttccaccggcggagcgccatcaccgctgcgcgtttggattggctgcagcctgcagggaaccgatgcgcgctcgccaaccatcgatgggggtatggggcaggactgtgaaactgtattggttgaagcgtaataccaaaccgcaggtctcttgtttatatagtgccaaaggccaggcgatcgacatgtacatgatctatctatagctaacaaactagcaactacctgaaggtattcaatggataatcatcgggaatggataatcaccgtaatagacatgaacatcttccatcttcaattccaacaaggacgacgggacaccgggctttatatccatcgtcacgaacaagaatccaactgatgaggagattggttgttcgattcgaacgcgatcaggcattcagttatgcccctctcggtgatcccatcctaggcagtcagaatctctactacttattaagtaagcaatagtagtctgcctccctcgttctgccgtctatcgatctagaccgtccatatcgcatcgtgcg

SEQ ID NO: 5051 - DNA, 1221 bp, Zea Mays
gcgggatccagatccggtgaacgtagctctagggcctcgacacaggcagcttgggaaccgccctcggcctcggtgtcgcacggccccacgaggatcgaccttgccgcatggcggttgtggaggcgtgcgaccccgcaaggatcatccacccacgcgatcttggtccactgcgtaagtgcgacatcttgctcctctgctcccctccatcgtgcctttctcgagcctccccacaactcgcatctaagccacagcctgcggcagcggtgaaatggcggcgctagactgcatcttcttcaagtcgaaagccacccctgacctctcgcccctttcttacagttccttacgggagtgggatttatcattatttagttcttcatgtcttgcatgaggtagacatggaggagctctggatcgaggaagtcgatgacgctgaacatggaggaggctaggagagatcgggacaggacaacggcgtcggaggatcttgggttcgccactaaggttaggtgaacggtacctctacctctgcctctgccaatctattgtatcctctccattagtgttttgtgattagaaggacactgtttggggatctaggggagtaattactgtgccctggcctttgattctgtttcggtgttctcaatttctctggcagtaccaaacactaccaccagcgctagcatcgtcctaattgctctaacgagatgcgtgaaaggatcaatgggattccgtcatgaattactctgcaaatgtatctattatgaaaatcagtacatgaactttagaacagtagtacatagaactgtaaatattaagtttgaaaaccagttctttaattaagtagtacctgaagtattgttctgagaatttgaactagattgggaaggtattcttttatttgacgttcaacaatatgggatttttgttcattatccctttggaccatagataaatgtttatcaagtacttctgcactacaagaaagcaatatggtagcataatactgaagagaataaaaaaatgtcaataaagtaaaagttgagatatacaacaaaattcatctgattgcttttataacccatcttttagagacaatagacatggttgaatttcctgtcaatttttcctactggattacctatctatggtccaaaggggtcatgaacaaaaattacatacctagaagtttgtagattacagattccacatctttaccag

SEQ ID NO: 5052 - DNA, 1467 bp, Zea Mays
gttccattctctgccctaaattagttcttatgcatccattctaacactgcttcaatttcataattgcagcctcatgctctctgtttgaccatttttctaacttgtgtttgcagtctgtaagcaaggagcgtcaggatttcttgggacttgtcaacaaggaggtataatataaagtggtttagacaaagaaattctcatgcaaacatctttgaatgacatatcattatgtacattggatatttaataggacttttgtcttaatgcagatagaactatacaactcaatgcttgaaaaggagggtgcagagggtgaagaagaagctaagagagcatacatagctgctagagaggaatcaggtcgtaggctgctgcagaagaaaacgtctcatcagtacttactaaaaaggtaaggaattctttcggacatgacctgtagttgagcagcgtctacataaaaattgtttatcttcccatattttgttgctactactcttgaactatgctgcctaaatagccttgaatatcgacactgaaaactataaacaaatatcttaaaagttagagatacgagtgcatacttttatttgcaaactgtaactaagttatatattgacaagacttggtaactaaaaggcccctgatatattctgatgatgcaatattagaaagcctacttaaactgaacttctcttttggcattttaaaagtgctgcaaaggatacaagcatcctcacgctttcaggggaggatttggcgattgatagattgcatattggtgcggctttcatgacagtcggtgaatggtgggaacgactgtcgtgttttgtttgcatgattctctctctctctaaatcatcacacgctgacgattttcgtgaatgtgattcgcttcaatttggtccaaatttgcatattgtgacaaaaaatctgtttttagagttcaagcaaaactcatccgtcattgcattaatgtttttccttacgtagcctattctttaaccttatgtactctttactaagtctaaaccggtcgcagacgattaattatatcggtgttcaagttcaaacttgaatatcacaaaggaaactgtggcagaacctcccaagttattaggcccacatgcacctgtctttgtctcaaagacctcagacggctatgcatgtgcaccaaataacttaacaggatccgtccgagtgccccaaggacctcagataaaccacttacaaccagaacgcgggattaagtaacacaaatcacacacaccaatattgttgcaccggaaatcttactaccaaattttacaggttacaaaaatttcacattagtttatcggagtgattacaaaagtataagtttgaaatatatgttagctcaagtgaccatcctcaataagaagataaagacggggtatacttatataagaaggccgagcccaccggcacttaacacgatcacagcagcacaaa

SEQ ID NO: 5053 - DNA, 1430 bp, Zea Mays
taaggatggaagtacttaaatcgagacttgggttaggaacaggtgatgttctacccaggttgattaaggattggatgtgtatgtaggcctgctagcgcaaggactatcttagctagccgcataccttggaaatgggacagggtaagctttgcctcgggcaaactaaggccagaataagataacacgaaatgggcgtggagcggtggcgggagtagcgtgtaccctccgtggaaagaggttggacggtggtgtatctgtgctctcggtttgcgtgaacctgatctggtcttaagaaccctggggtcgagttgacatatgcaagggttaagtgctacatatgtcgtgtggttagagatcctcagctgagtaaatcgattcggatcgccgttatatccccggagagtggagacttgatcactaacctacaacctaagtcaggatgtgaacttcatgaataaaaatgatgttgtattgatgagatgatgaaatttgactagaggctaacagagtctattaatatttaatctggtgttaaaatgttgaaaataaggactcactttagtaagctatttctgcaaaagtatctaagtttgaaatatatgttagctcaagtgaccatcctcaataagaagataaagacggggtatacttatataagaaggccgagcccaccggcacttaacacgatcacagcagcacaaaagttatatcctgaaaaaacaacagggaataaaaccctgagtatggaaattactcagcaagacttacccgactaaagaaaagactctcaagggtatgctggataaataggaatcaaggagagactttagcaagaatcaacttagatacttttgcagaaatagcttactaaagtgagtccttattttcaacattttaacaccagattaaatattaatagactctgtttgcctctagtctaatttcatcatctcatcaatacaacatcatttttattcatgaagttcacatcctgacttaggttgttggttagtgatcaagtctccactctccggggatataacggcgatccgaatcgattaactcagctgaggatctctaaccacacgacatatgtagcacttaacccttgcatatgtcaactcgaccccagcgttcttaagaccagatcaggttcacgcaaaccgagagcacaaatacaccaccgtccagcctcttgccacggagggtacaccctactcccgccaccgctccacgcccatttcgtgttatcttattctggccttagtttgcccgaggcaaagcttactctgtcccatttccaaggtatgcggctagctaagatagtacttgcgctagcaggcctacatacacatccaatccttaatcaacctgggtagaacatcacctgttcctaacccaagtctcgatttaagtacttccatccttag

SEQ ID NO: 5054 - DNA, 929 bp, Zea Mays
aagcaactcctataaacctaatgcacatttcactagacttaagtgtgcaaaaagtatttaaaaacacaaggaaggggttgcatgcaccggggcttgcctgagtaacactaggttagtgttgttaggtgacgtccacttgatgatcatcctttggcttggcactcgttcagattatccatcttccggtttgtccatcagcatcacctcgcgagcggctcacgcgtagcgacatcttgtggccgactcagttctggttctccgcatcgcgtggttaattcacgtgcctgaatgaaatgcattatgcacatgaatgcatatagaccggaatatttcaaacctaaatagtactacgcgatagcgaattaaacacctagcggcgaggcgttgtacaattttagacgaaaatactagttatcgacgtatgactaagcgcaataattacgtttctcgaacctaacgcaaacatcaccaaccacaaactatacacatgaaatacaattagcctaatcacaacttatcaattaattaattaaattctaaacttatcctttgctttataaattatactacatctttataagtgattaaaatatttcatccacacacatgcctactaaaattctactcggtacactaattcaactaattgaccggaatagcaaaataactcgctataactgaatcggtcttgatatcagcaagaacgaccaagtcagtcagggtttcgtatcttagatattttgccaagcacctagcgagcatcacacgagatctcgctattaatactcgatgaaacgggtactatccaaccatgccatttaattagctattaaccaagaaatataactactaaaagggaatatcattgacttaatcatataatttaacctactttcgcgttactaactcatcatacctcacataggttt

SEQ ID NO: 5055 - DNA, 4470 bp, Zea Mays
cgggcagctacgatctctggggaatctttgtaaaagctacgtagtgaggccctgccggaccacctaggtagtggtcaatggggattagctctccccgggtagaaagggaatcatgactcatgggtaaagtgtgcgacctctgcagagggtagtgaaactgatatatcagccgtgctcacggttaagagcagccttgggatcctctttgattagggatacagatggttcgagatacaatggttatgatatggttttggttcgactatgatgatgatgttcctcgatgaggaaatggtttacggattggttaatgctaaaatctggcttctactaatgataaatacttgaccaactaaaagcaactgctggagcctaaccccacataaagctagtccacctcagccaaacgggacatttgctgagtacgttgatgtgtactcatccttgctttaccacaaaacaccaggttgtccgcattgtaaccactgctcgggagaaggcgaagccgtggaaggagacttccaggagttccaagactacgacgaattctaggtgtgggttggcggcaacccccagtcagctgcctgtggaggctttatctttactgcgttttgtttagcactttgatttacctgttaagacaatgactatgtggatgtctatgactctatgatgtaataagtactcttttatgttattattcgagcattgtgtgatgatgttcatttatgtaatcgctgtgtacgtgagttctgatcctggcacatacatagtttgcattcggtttgccctctaaaaccgggtgtgacattactggccgacttaatctcgatttttgtaagtattttctcaggatgggttgaaccaaagtgagttcagacaactcgataaaacgatctctaaactcaacctttgttcattgggcagttacaagttagtaaaaccaacttgttgaactacttttgacattgagtatgtcctctcagtaacatcggtaagccaagagttgagagtccacttttgtatgcacttgagtaaaaatccatttggtcaggttgtttatctgtttcttcatgcgagatgaatcatccacttggtgagggaatacatggattagataggagagcgaatgaacaaactcctgcatctcagcagcaggggaagtcaatctccatttgagagctaattatctgtctctcaatgctaaagagcttcacagcttcacctttacacaaaggacgtaaagggaacttgtataagtagtcactactaagatcaaaggaaagagaccacacaggaaagtggtatgccctttttttcaacggagatgacagatgttgcttggtcactttgacaaacaacaccgaaatcgtttcaaagggaggagtccacggaagatcatacataggtgtaattccacaatggatcatgactagagacttcgataccagcatgcgccaagcagcataaccttgcgtgtacattcacaaggggctctcagtttcgctgcggcaccataagtcgttaatcgtgacaccatttccgaactagcaccaataatgaatctcacatggtaaggacaatttgtgacaagataacacattgatatagtctcataatggattataactactaaccgtgataccagcgcgtgccgagtagcgcaaccatgtgtatgcatccacaggaggccctcggtttcgtcgcggcaccatcagttttagtcacaacaccattatcagacgtaaccaataacaaatctcgcacggcacaaatagactgagtctgaatgacaatattcaaaagagactccacctgtaagaatggttacaagtagagagccaaatagatcatggcccgatgaagtgaacacgacatggccataacctaaactggggggtgagggagtacgatgggagactgatacttcagccccaagcatatttctatgcccatcgcagaggtcacaaggtcaagaattagtatctgattagatacagaggggaaacaatcataagattaagttggtatgccttcgataggtatgggggaaatcaaaggcatcaaattcaagaaaatggtcggacatacttttcctaggttgggttgataattcaacatggcgatccttaagaacaggcaaactggttaaggtacatcagcttgcaccaataaacaagggaatggttttagaaggaaactgactcaagattcttgtttaagtctaggcacatttatttccaacaaagaaatatctacgcatttattgcatgggctttgtcatggagtgataatggaccattcaatttggggcatggttcactaaataagaacatggcctaaattttggtttaaacaaacaggtcacaaccttctatcggtacatccagtacaagggaaaacacatatgacacctaaatagattatctaaagaacggaggacagctattttatcgaagtccataataccgcattacactacattatctacaatcaatggttgctggaataaagatgagagaagcattttgggtgtataggtgacaaacatgatgcaacaatcgggatgcatgctcgtcctattcgtcctcactgattttgccaacacattgtggcaataatgttatatgtcggtggcatacgttctctcacggtatttttctagtcgtcagctacacatatgttttcgaggttagtgtacctgcagaaaattccaatgatgcaagtcacacatgacagtatatcatagtttatactccatatattgctatatagaggccagctcatcattaagcgccgagccacgcataggcgccgttgccacactttaaccatagggcaactcattatggtaactcaccttcttacctgagcgtaggtgcatcgttataagtacattacacttctcagtattcccatgtttgtatacccatacacatccatggggtaccgaattcccagaaaagtaattactccacatcgcagccttcatatatacatatgtaaaacatgtatataatcaagcgccacaagtaagcacttccctagaccgacgtttgttcggtcatgctctcatatctcaccttaccttgagcgtcgatccattcaaaactgaatggcctcaaaaataacaatacacatgtatgcaatacccacccggttgtgggttagtggttttgaactaagccacctgatagtccttaacttagggcttaatagaggatgtcactagcattatagttattcaaaactgtttttttcaaaaccaaacaatgtgtttagttgaaaataggttttctaaaaccaaaactttgtttttaaaatacgtatgtgactgtatttacttaatcctgctccgataccagctgtggcagaacctcccaagttattgggcccacatgcacctgtctttgtctcaaagacctcagacggctatgcatgtgcaccaaataacttaacaggatccgtccgagtgccccaaggacctcagataaaccacttacaaccagaaccgcgggattaagtaacacaaatcacacacaccaatattgttgcagcggaaatcttactaccaaattttacaggttacaaaaatttcacattagtttatcggagtgattacaaaagtataagtttgaaatatatgttagctcaagtgaccatcctcaataagaagataaagacggggtatacttatataagaaggccgagcccaccggcacttaacacgatcacagcagcacaaagttatatcctgaaaaacaacagggaataaagccctgagtatggaattactcagcaagacttacccgactaaagaaaagactctcaagggtatgctggataaataggaatcaaggagaggctttagcaagaatcaacttagatacttttgcagaaatagcttactaaagtgagtccttattttcaacattttaacaccagattaaatattaatagactctgttagcctctagtcaaatttcatcatctcatcaatacaacatcatttttattcatgaagttcacatcctgacttaggttgtaggttagtgatcaagtctccactctccggggatataacggcgatccgaatcgatttactcagctgaggatctctaaccacacgacatatgtagcacttaacccttgcatatgtcaactcgaccccagggttcttaagaccagatcaggttcacgcaaaccgagagcacagatacaccaccgtccaacctctttccacggagggtacacgctactcccgccaccgctccacgcccatttcgtgttatcttattctggccttagtttgcccgaggcaaagcttaccctgtcccatttccaaggtatgcggctagctaagatagtccttgcgctagcaggcctacatacacatccaatccttaatcaacctgggtagaacatcacctgttcctaacccaagtctcgatttaagtacttccatcctta

SEQ ID NO: 5056 - DNA, 1401 bp, Zea Mays
gcagccagggctcgcctcgggggaccgcgtgttgctagcgagctcggtgctgccggctgccgccccagtgcgaggcgatggggaggaggctggacgtgctgctggggcggacgacgaagcagacggcgcggctcaagtcgctgctggggctggcggcgacgcgcctcggcgtggtgcggggccaccgccaggtgcggtgcgggcaggcgcgcggggacgtggagcagcttctccgcctcggccacgcggaccgcgcgctggcccgcgccgagcacgtcgtgcgggagcagaacgcgctcgacgtcctcgccgagctcgaggcctgctgcaacctcatcgccgagcgggccgcgctcgtcgacgacgcgcacaggggggagtgccccgaggagctgcgggaggcggcggcggggctggtatacgccgccgccaggtgcggggaccttccggagctgcaagaggtccgggccatcctcgccgccaagttcggcagggagttcgtctccgccgcgtccaacctccgcagcgggtgcggggtcaaccccaagaagctgtcgaccaagcagccgagcctggagagccgacagctggtgctacaggagatcgccgccgacaaagggatcgccgtgcgcatctacgagccgcctcctccctacgaggactcggggagctccaaccacagccacaggaagacggagcacgatggcgagaggatcagtaggacgccaccagttgatggccgggacgaagacatctccggccactcggcgcagaggtacaaggacgtggaagcggcagctcaggccgcgttcgagtcggccgcctcggcagccgccgccgcgaaggcggccatggagctctcgcgtggggagcccagggggcccggtgacaggaggagggcagggaggacgcaaatggatgatcctgagatcgagaaacaagatgaggtgcttcatggaaacaaacccgagaagattgggcatggccggaattacagttcagatgttgagatcacgccggaggacgacgaggcaaaccacggcaacgttgcagtggacgaaccgaaacagcgggagcctgccaggggaaagccggcatcggtcagaacaaagtggggattttagcggcatccagatcgcaacggaggagatggtttcttcgtcttgtcaatatattggcatggaagttgttttttttcactgtagtagtatgtaattaacgacggttaccaaaaaaacacatgagcgatttgatttattgccaacagtttgcacactagtacactatgcctgtactaatgctatgttctgttaatgtgtagcgttaattgtagtacatgttctttggaggaaaaatattgatgttgcaattcaaatgatctgcttggaaaggatgagattg

SEQ ID NO: 5057 - DNA, 4267 bp, Zea Mays
cacactgttcctggttttgttaagctctcgcttaacctaaccgccgggagcagaagtgttcgacgaaatgacgaacgccggggcggcgacaggcgccgcgctaggcgcgcgcacggcgcggtcctgcgatagctgcatgcggcggagggcgcgctggcactgccccgcggacaacgcgttcctgtgccagtcctgcgacgtctccgtccactcggcgaacccgctcgcgcggcgccaccaccgcgtccgcctcccctcggcgtcctgctcgtccccaccgcgcgatcccgacgcgccgacgtggctccacggcctcaagcgacggccgcgcacgccgcggtccaagcccgggggaagcaataagcatgaggcggcgcccagctctatcgccgcggccgcgtcggcagcggtccccgacctcgaggcggaggcggaggcggaggcggaggagtccggctccggtatcctgggcgataacgacgacgaccacgggttccaggacgacgacgagaaccttctgtactgcgtgccggtgttcgatcctatgctcgccgagttctacaaccccgtggccgacgagggggagcagaagccggcctgcctgatgctgcctctcgtggaaacatcgccggagttcgcctccggcggcttggcagaggcggacgggctctccggcttcgacgtcccggacatggatctcgctagcttcgcggcggacatggagagcctcctcatgggagtcgacgacgggtttgacgatctgggtttcttggacgaacagaagcctcaggtgaacgcggacgtggacttggaggccatggcggcgccggagcctgaacgagaggacaagaaaaggaagcgggacggctttgattatctgggtttcttggacgaagagaagccacaggtgaacgcggacgtagacttggaggccatggtggcgccggagcctgaacgagaggacaagaaaaggaagcgaacagatatgatactcaagctgaactacgagggcgtcatcgcctcgtgggttcgtgacggcggatcaccgtggtaccacggcgagcgtcctcacctcgacgatccttacgagctatggttggagttcccggcaacggggagccggggacttttcggcggcaccatgacagcggtgaccggcggcgagcgtgaggcacgggtgtcgcggtacagggagaagcggcggaggcggctgttcgccaagaagatccggtacgaggtgcgcaagctcaacgccgagaaacggccgcggatgaagggccggttcgtgaagcgcaccacgctcccgccgctgccgaggccgccaccgccgtcacagcagcaacagaagaagaagcaactgccacgctcattgccacacgtgggcatggtgctcgcgccacctccaggagcggacgggcgcttccggttttgagtctttgagatcacgcacgcaagcacggaaggctcggtatcaggacatcaggtgcacaacggagggatagtgcacaaatgcacaaacttgatcctgaccttccatctcccaatgaacggtcaccgccaaaattgcaagaaggcccctccgcacctcctcctcctttcatatatgttttgcgaaaaccccctcggacgtgcttcctctctcccccaacgctgcaaggcagcagacacacgatgccgcgaatcggactcaggcagagccaccgacctcaccgtccacggcctagtcaccctcgacgtcatcgtccaccgcccacacgccgccgaccgccttgactagtcacagctgtacgcaggctctccgcagcggctggttgcagcgcgcgctggtgcccgtcaccgtgcccgccggcaccagcgcacagggccgcggcgcgctcgcgcacatcttcaggctcgcgatcagcaccaatggtgtgtttgtgctgatgaatgttcgataaaatgagttaaataagcaccattcagctaacattcaatggtaaaatttagaaccaacattgaactaatattgaagcaaaatacaaagccaattcagctatcattcaagcaatactcaaagccaacattcagctatacatcggtgcatcattctcgctctggtagcatgtcctttctactctagtattaaatttgggatgacgaattagcttgggctccccacaagatgctcactactttacgcctcaaatcagtggcagacgcaagacgagaattcatgggacccaaaaacccacatgacaaatcaagcaaaagatcgtaaaaaccagtgttgcatttaattcaagttatatatcaaaacacgatataaattcaaagaaaaaataaatgaacaaaagaagtaaacataatagcctaataaaaattgggtgtaccttgtcgaatattgatctcttcgatgggcaggtgtgccgagaaagtggtgggtcaagggacgtctctagttgagagatggggctcgttggttcgacaagctctgacctccaaggacgggtcacatcatcgcgacgaacgaaatctgacctatcgagcaagctcgctcatgaggatgacgagcgaggcgggggcaccgggaaggggtggggttgtgtagtgtcgcgacataaggaacgagacatcgaagcggactggatcaggcggtgtcgataagaatgggactgggtcatagtcaaaatgttcctagatcgattggattgagaagcggggtcatgggtcgtgggtcgacactttaaaaggagaagtatacatctatgagacgagaatattatgaatttgatatgttgagtctaatgggccgatgatcttgggtcgattctatgggtcaagggtcgtgttctaaaatttcaataacaacctaacaccagtctaatattatctcattctaccattgaaactttaggctatctctatcagattccatatcttatcctttattttaaactttactctacaaacagtgtcatctacagtcatgcatcccctattttacaccacctgctggagacagtgttatatttatgcaaacagaaaaacttcaaccgacctaaaactttaatttttctatactaacattaaatgaacattagatatataagagagaaaattaagggggacatggcccactttgcccccctctcggtctgcccctgcctcaaatatatctatatgtagtacttggcatcaacctagctcgcgatagactgagcatgggggcagacctgctctttgataacgttcagctcctcgtcactccggccggtggtgtatccctcggtgattacatcggcaccaatctcatcaaaatgggagaccatctgcccaagggccagactgcctccttgacaaatgccctagtgaccatgcactccacatggtcaggaagcccccgcaaaagatcaactagagacgcctcgatcgatggcagggtcgagagacgggtgcacgccgtgccggcaaccaaacgaagctctcggagtttggcgctcctttctcacagcaggacgtccacctggcgcgttgcagcgatgacgctatcatgggcgagcaagagctcgcgcgctttccccgctgtcaatgtgtcacacccagttctagaaggtaaaccgaatgcgaaccatgtacgtgtcaggatcagaaattcacgtactcaacgattacacaattggacatcatcacacaatgctcaaaataatagcggaaataattataactttattacatcatgatgtccaaaacattcacatagtcattaacttaaacataaatcaaagtgttgaacgagacgcggtaagataaggccttcataggcagccgactgggagtttgccgctagtctagattagaattccttgaagatctgaaactcctagaaatccttagcatttccttcatcttctcctgagcaatggttgcaatagggacaacctggtgtttggtgtttaagcaagagtgagtacacatcaacgtactcaacaaatgtcatgtttggttgaagtgaactagctgtatgtggggttaagctcaaagcagttgcttttagttggtcaggtatttatcattaatagaagccaagtttaatcacaaacccaagctgatattccaagttttatatacatattgtacatatgtatatatatgaaggatgtgatgttgagtatttacttttctaggattcaatatcccatggatgtgtatgggtatacagacatggaaatgctgagaagtgtaatgtacttgcaatgatgcacctacactcaggtaagaaggtgag

SEQ ID NO: 5058 - DNA, 4924 bp, Zea Mays
ctgattccactcatattctcctctctctatattacaaatctctaacattataaatctacaacatcgcgtgtttactaccaattttaggctctgtttgaaagtatcccgtatttaataaatcaatttttatcttttagatacgagagactaacttcttgatttttaagaaataagctggtctttctaactaaaagataaaaactattttcttaaaaactgtgttgcttctaaacaggtccttattagcacacaatctacgtctctctatctaaatatagtgtaaatattgtaatttgttgcaactttaagttctctgtgtacgctacactgctacttgcatctagcctgctagtctctccttgggtgattgggtccttcagtccttgcaatttcctcccgcactcccggttctcccgcacgctcccctctgcctgtccgtgtcgcttgcttcgcttctgcaaacctcggccccggcctcggcatccgcggcgtcgccggcgtcgtcgtcgtcgtctagatccgacaagaagaagactaaatcggagactcctaagaagcgcgacaagctcttcggttccgcggccaccgcacccaagagcgccgcatcgtcggcctcgtcaagcccggcgggtgatgggaggaaggggtccgtgccgcatcatagggatgcgggcgtcgggggcgggggtggcgcgtcggcggccgcgctgtcgccgatcctggcgtcctcgctggggctcaaccggatcaagacgagatccgggccgctgccgcaggagggccaacgcatggctgccgtgatcgggagcagcaacctctcgcgcgggcagggccaagcggaaccgtcggctgcctcagccggcgtcggcggtagaaagggcgtcacctcctgggcggatactagtagtagcagccgcggaaaagggaagacgaccgagctgccgatgcgaagtacagctgggacgagcttgggaccagtagggaagagcgctgtaaaagctaaacctagtgcacagcggaaccattctggagatttgaggacacctactcacatacctgaggctgcgtgtgcatatgatccgtgtgagacaccaaaggaatccgagtccccacgctttaaagccattatgcaggctactagtgcaccgaggaagagactccctgcagatataaaaagtttttcacacgagctgaactccaaaggggtgcgcccatttccttttttgaaacctcggggcatttacaacttaaaggaggtaataaaagttatccatgtgagatttgagaaggcaaaggaagaggtaaattcagatttggcagtttttgcaggagacttggttagcgtaatggaaaagtatgcagactctcatcctgagtggaaagatgccctggaggacttgctaatacttgcacgtacctgctgtgtcatgacacctggggaattctggcttcagtgtgaaggtatagtgcaagatttggatgaccatcgtcaggaactctcaatgggtgtgctgaagaaactatacacccggatgctttttatccttacaagatgcacaaggctgctccagttccacaaagaaagtggttttgctgaggatgaagttgttattgatcagcgtgataagattatacaatctgcagataggcagattttaactcaatcaggtgtgggtgacacaacatccagagccagtaaaagtgaggcaagaaaatcatacagtcaggagcagcataatttgaaatggaagcgtagccaggagataaagcctgttaaccttcttccaccacttgatacggatgttaagaaagtggctgattctccaaccaaagaacgaatatcttcctggaaaccttttccatctcctgttacgaaggtcccaaaagaatctactcctactaaattggaatcacctaataagaaaacagatgcacactctacagttagtagccatgttgaattaagcagtccagttgaatctttaccacaacaacagcttcctgtcaagcatcaacataaaacttcatggggccactggtctgaccagccaaatatttctgaagagggttcaataatgtgtcgcatatgtgaagagtatgttccaacacagtatgtagaagaccattcaagggtctgtgcaattgctgacaggtgcgataaaaaaggtgttagtgttgatgaacgcttaatcagagttgcggaaatgctagaaaagatggtagaatcttattcaccgaaagacctgccaaatgctgcagtcagcccagatgttgcaaaagtttcaagttcaagcatcaatgaagaatctgatggtccctctcctaaactctctgattggtctagaagaggatctgctgatatgcttgactatctccaagagactgataacactatttcattggatgacattaaaaatcttccttcaatgacatgtaagactcgttttggaccaaaatctgatcatggaatggccacatcatccgctggaagtatgactcctaggtctccattaactccaagatcaaatcatatagacatgcttttagctggtaaaaatgcaattaatgagagtggtgatcttccgcagattgtcgaacttgctgatattgcacgatgcatagcaaatacccctctggatgaagaaagcgcattatcccaaatggttacctgcatagaagatcttcaagaaattgtcaaccgcaggaagcatgaggccctcacagtccagacatttggaacacgcatagaaaaactacacagggagaagtatctgcagctctgtgactcagttgatatggacaaggttgattcagcaagcaccataatggatgaagaagatgatgttgttcgtagcttgcgcgcaagtcctgtccatccagtcaaggatcgcacttcaattgatgactttgaaatcatgaaacctattagccgtggagcatttggacgtgttttcttggccaagaaaagaactacaggagatctttttgctataaaggttcttaggaaggcagatatgattcggaaaaatgctgtcgagagtatattggctgaacgtgatatcttgattacagtcaggaacccttttgtggtacgctttttctattcgtttacctcacgggagaatttgtatctggtcatggagtacctgaatggaggggacctttactcattactgaggaatttagggtgcctggatgaagacgttgctcgtgtatatcttgcagaagttgtactagctttggaatatttgcactctatgcacatagtccatagggatctaaagcctgacaacttgttgatagcccatgatggacatattaagttgacagattttgggttgtccaaggttggtttgatcaacagcacagatctgtctggtcctgctgttagtggggcttcactgtatggagatgatgagcctcagatgaatgagctcgaacaaatggatcaccgagcacggagacaaaatcgttctgctgttggaactcctgattatttagcaccagaaatccttttggggacaggacatggttgcagtgcagattggtggtctgttggtgtcattctgtttgagctcattgttggcatacctccattcaatgcagaacaccccgaggcaatttttgaaaatattatgaatcgcaaaataccttggccacatgtcccagaagagatgagttttgatgcacaagatttaattgacagattattgacagaagatcctcatcaacgactaggagcaaatggtgcctcagaggttaaacaacatccatttttcaaagacattagctgggatacccttgctaggcagaaggctgcctttgttccttcctccgatagtgcatttgatactagctacttcaccagtcgctattcttggaatcaatcagatgaaaacatatatgaagcatatgagttagaggactccagtgataatggaagccttagtggaagcagtagttgtgtgagtaaccaagatgacatgggggaggacagcactggcctcaatgagtttgaatctagtgcaaatgtcaattattctttcagcaacttctcgttcaagaatctatcacaacttgcttccatcaactacgatctgctcaccaaaggattgaaggatgatccaccgccaagaacagaaatgtagcagttaatctaaatttggatggactcatttgagtactcagacagtctacaaggtgctcgtgggatgtaggtcttgtacatatcaaagtgtgaggcatggtctgttcctattgaggctgttcctacatctcgcggatccgagtacagttttggtgttgccttgttttcatgactattgccatgccatcatcagtgaaatcacccttgaccaaatttggcattcgacctaggagcgctgtctttttggttcgtctttcctttttttttagtcctattatgagccttgggtttacggagattggtcaaggttactgtattcagaatacagctcctgaagacgtaggcgggtttcagagaattgccattctggcatacagttgactctggttcgttaagctggtagcccgctggacttcctgcggccagaactgtccacaacattttgatggccgtggaatataacattttgcttaatgtgtccagtgtccaacagaatcagggacattttaagaagaatattaaccgattgacattataaggatatcaaatggaagcggcgttttatgcaattcaaaattcgatgggcatcgcccagtagtcatattgtgagtatctgtaggctagtcggaatcgtaacggtttgtccgatgtcatgtcgcttgcaaaatgctgtagtagcactacctgctgtttattaaactcagaactcgaactcttttaatagccctcgtagactatttttaacatcgccaagagcactgccatgtcacggatgag

SEQ ID NO: 5059 - DNA, 3392 bp, Zea Mays
cttgcatctagcctgctagtctctccttgggtgattgggtccttcagtccttgcaatttcctcccgcactcccggttctcccgcacgctcccctctgcctgtccgtgtcgcttgcttcgcttctgcaaacctcggccccggcctcggcatccgcggcgtcgccggcgtcgtcgtcgtcgtctagatccgacaagaagaagactaaatcggagactcctaagaagcgcgacaagctcttcggttccgcggccaccgcacccaagagcgccgcatcgtcggcctcgtcaagcccggcgggtgatgggaggaaggggtccgtgccgcatcatagggatgcgggcgtcgggggcgggggtggcgcgtcggcggccgcgctgtcgccgatcctggcgtcctcgctggggctcaaccggatcaagacgagatccgggccgctgccgcaggagggccaacgcatggctgccgtgatcgggagcagcaacctctcgcgcgggcagggccaagcggaaccgtcggctgcctcagccggcgtcggcggtagaaagggcgtcacctcctgggcggatactagtagtagcagccgcggaaaagggaagacgaccgagctgccgatgcgaagtacagctgggacgagcttgggaccagtagggaagagcgctgtaaaagctaaacctagtgcacagcggaaccattctggagatttgaggacacctactcacatacctgaggctgcgtgtgcatatgatccgtgtgagacaccaaaggaatccgagtccccacgctttaaagccattatgcaggctactagtgcaccgaggaagagactccctgcagatataaaaagtttttcacacgagctgaactccaaaggggtgcgcccatttccttttttgaaacctcggggcatttacaacttaaaggaggtaataaaagttatccatgtgagatttgagaaggcaaaggaagaggtaaattcagatttggcagtttttgcaggagacttggttagcgtaatggaaaagtatgcagactctcatcctgagtggaaagatgccctggaggacttgctaatacttgcacgtacctgctgtgtcatgacacctggggaattctggcttcagtgtgaaggtatagtgcaagatttggatgaccatcgtcaggaactctcaatgggtgtgctgaagaaactatacacccggatgctttttatccttacaagatgcacaaggctgctccagttccacaaagaaagtggttttgctgaggatgaagttgttattgatcagcgtgataagattatacaatctgcagataggcagattttaactcaatcaggtgtgggtgacacaacatccagagccagtaaaagtgaggcaagaaaatcatacagtcaggagcagcataatttgaaatggaagcgtagccaggagataaagcctgttaaccttcttccaccacttgatacggatgttaagaaagtggctgattctccaaccaaagaacgaatatcttcctggaaaccttttccatctcctgttacgaaggtcccaaaagaatctactcctactaaattggaatcacctaataagaaaacagatgcacactctacagttagtagccatgttgaattaagcagtccagttgaatctttaccacaacaacagcttcctgtcaagcatcaacataaaacttcatggggccactggtctgaccagccaaatatttctgaagagggttcaataatgtgtcgcatatgtgaagagtatgttccaacacagtatgtagaagaccattcaagggtctgtgcaattgctgacaggtgcgataaaaaaggtgttagtgttgatgaacgcttaatcagagttgcggaaatgctagaaaagatggtagaatcttattcaccgaaagacctgccaaatgctgcagtcagcccagatgttgcaaaagtttcaagttcaagcatcaatgaagaatctgatggtccctctcctaaactctctgattggtctagaagaggatctgctgatatgcttgactatctccaagagactgataacactatttcattggatgacattaaaaatcttccttcaatgacatgtaagactcgttttggaccaaaatctgatcatggaatggccacatcatccgctggaagtatgactcctaggtctccattaactccaagatcaaatcatatagacatgcttttagctggtaaaaatgcaattaatgagagtggtgatcttccgcagattgtcgaacttgctgatattgcacgatgcatagcaaatacccctctggatgaagaaagcgcattatcccaaatggttacctgcatagaagatcttcaagaaattgtcaaccgcaggaagcatgaggccctcacagtccagacatttggaacacgcatagaaaaactacacagggagaagtatctgcagctctgtgactcagttgatatggacaaggttgattcagcaagcaccataatggatgaagaagatgatgttgttcgtagcttgcgcgcaagtcctgtccatccagtcaaggatcgcacttcaattgatgactttgaaatcatgaaacctattagccgtggagcatttggacgtgttttcttggccaagaaaagaactacaggagatctttttgctataaaggttcttaggaaggcagatatgattcggaaaaatgctgtcgagagtatattggctgaacgtgatatcttgattacagtcaggaacccttttgtggtacgctttttctattcgtttacctcacgggagaatttgtatctggtcatggagtacctgaatggaggggacctttactcattactgaggaatttagggtgcctggatgaagacgttgctcgtgtatatcttgcagaagttgtactagctttggaatatttgcactctatgcacatagtccatagggatctaaagcctgacaacttgttgatagcccatgatggacatattaagttgacagattttgggttgtccaaggttggtttgatcaacagcacagatctgtctggtcctgctgttagtggggcttcactgtatggagatgatgagcctcagatgaatgagctcgaacaaatggatcaccgagcacggagacaaaatcgttctgctgttggaactcctgattatttagcaccagaaatccttttggggacaggacatggttgcagtgcagattggtggtctgttggtgtcattctgtttgagctcattgttggcatacctccattcaatgcagaacaccccgaggcaatttttgaaaatattatgaatcgcaaaataccttggccacatgtcccagaagagatgagttttgatgcacaagatttaattgacaggattaggatgcaatctgca

SEQ ID NO: 5060 - DNA, 4534 bp, Zea Mays
cttgcatctagcctgctagtctctccttgggtgattgggtccttcagtccttgcaatttcctcccgcactcccggttctcccgcacgctcccctctgcctgtccgtgtcgcttgcttcgcttctgcaaacctcggccccggcctcggcatccgcggcgtcgccggcgtcgtcgtcgtcgtctagatccgacaagaagaagactaaatcggagactcctaagaagcgcgacaagctcttcggttccgcggccaccgcacccaagagcgccgcatcgtcggcctcgtcaagcccggcgggtgatgggaggaaggggtccgtgccgcatcatagggatgcgggcgtcgggggcgggggtggcgcgtcggcggccgcgctgtcgccgatcctggcgtcctcgctggggctcaaccggatcaagacgagatccgggccgctgccgcaggagggccaacgcatggctgccgtgatcgggagcagcaacctctcgcgcgggcagggccaagcggaaccgtcggctgcctcagccggcgtcggcggtagaaagggcgtcacctcctgggcggatactagtagtagcagccgcggaaaagggaagacgaccgagctgccgatgcgaagtacagctgggacgagcttgggaccagtagggaagagcgctgtaaaagctaaacctagtgcacagcggaaccattctggagatttgaggacacctactcacatacctgaggctgcgtgtgcatatgatccgtgtgagacaccaaaggaatccgagtccccacgctttaaagccattatgcaggctactagtgcaccgaggaagagactccctgcagatataaaaagtttttcacacgagctgaactccaaaggggtgcgcccatttccttttttgaaacctcggggcatttacaacttaaaggaggtaataaaagttatccatgtgagatttgagaaggcaaaggaagaggtaaattcagatttggcagtttttgcaggagacttggttagcgtaatggaaaagtatgcagactctcatcctgagtggaaagatgccctggaggacttgctaatacttgcacgtacctgctgtgtcatgacacctggggaattctggcttcagtgtgaaggtatagtgcaagatttggatgaccatcgtcaggaactctcaatgggtgtgctgaagaaactatacacccggatgctttttatccttacaagatgcacaaggctgctccagttccacaaagaaagtggttttgctgaggatgaagttgttattgatcagcgtgataagattatacaatctgcagataggcagattttaactcaatcaggtgtgggtgacacaacatccagagccagtaaaagtgaggcaagaaaatcatacagtcaggagcagcataatttgaaatggaagcgtagccaggagataaagcctgttaaccttcttccaccacttgatacggatgttaagaaagtggctgattctccaaccaaagaacgaatatcttcctggaaaccttttccatctcctgttacgaaggtcccaaaagaatctactcctactaaattggaatcacctaataagaaaacagatgcacactctacagttagtagccatgttgaattaagcagtccagttgaatctttaccacaacaacagcttcctgtcaagcatcaacataaaacttcatggggccactggtctgaccagccaaatatttctgaagagggttcaataatgtgtcgcatatgtgaagagtatgttccaacacagtatgtagaagaccattcaagggtctgtgcaattgctgacaggtgcgataaaaaaggtgttagtgttgatgaacgcttaatcagagttgcggaaatgctagaaaagatggtagaatcttattcaccgaaagacctgccaaatgctgcagtcagcccagatgttgcaaaagtttcaagttcaagcatcaatgaagaatctgatggtccctctcctaaactctctgattggtctagaagaggatctgctgatatgcttgactatctccaagagactgataacactatttcattggatgacattaaaaatcttccttcaatgacatgtaagactcgttttggaccaaaatctgatcatggaatggccacatcatccgctggaagtatgactcctaggtctccattaactccaagatcaaatcatatagacatgcttttagctggtaaaaatgcaattaatgagagtggtgatcttccgcagattgtcgaacttgctgatattgcacgatgcatagcaaatacccctctggatgaagaaagcgcattatcccaaatggttacctgcatagaagatcttcaagaaattgtcaaccgcaggaagcatgaggccctcacagtccagacatttggaacacgcatagaaaaactacacagggagaagtatctgcagctctgtgactcagttgatatggacaaggttgattcagcaagcaccataatggatgaagaagatgatgttgttcgtagcttgcgcgcaagtcctgtccatccagtcaaggatcgcacttcaattgatgactttgaaatcatgaaacctattagccgtggagcatttggacgtgttttcttggccaagaaaagaactacaggagatctttttgctataaaggttcttaggaaggcagatatgattcggaaaaatgctgtcgagagtatattggctgaacgtgatatcttgattacagtcaggaacccttttgtggtacgctttttctattcgtttacctcacgggagaatttgtatctggtcatggagtacctgaatggaggggacctttactcattactgaggaatttagggtgcctggatgaagacgttgctcgtgtatatcttgcagaagttgtactagctttggaatatttgcactctatgcacatagtccatagggatctaaagcctgacaacttgttgatagcccatgatggacatattaagttgacagattttgggttgtccaaggttggtttgatcaacagcacagatctgtctggtcctgctgttagtggggcttcactgtatggagatgatgagcctcagatgaatgagctcgaacaaatggatcaccgagcacggagacaaaatcgttctgctgttggaactcctgattatttagcaccagaaatccttttggggacaggacatggttgcagtgcagattggtggtctgttggtgtcattctgtttgagctcattgttggcatacctccattcaatgcagaacaccccgaggcaatttttgaaaatattatgaatcgcaaaataccttggccacatgtcccagaagagatgagttttgatgcacaagatttaattgacagattattgacagaagatcctcatcaacgactaggagcaaatggtgcctcagaggctgcctttgttccttcctccgatagtgcatttgatactagctacttcaccagtcgctattcttggaatcaatcagatgaaaacatatatgaagcatatgagttagaggactccagtgataatggaagccttagtggaagcagtagttgtgtgagtaaccaagatgacatgggggaggacagcactggcctcaatgagtttgaatctagtgcaaatgtcaattattctttcagcaacttctcgttcaagaatctatcacaacttgcttccatcaactacgatctgctcaccaaaggattgaaggatgatccaccgccaagaacagaaatgtagcagttaatctaaatttggatggactcatttgagtactcagacagtctacaaggtgctcgtgggatgtaggtcttgtacatatcaaagtgtgaggcatggtctgttcctattgaggctgttcctacatctcgcggatccgagtacagttttggtgttgccttgttttcatgactattgccatgccatcatcagtgaaatcacccttgaccaaatttggcattcgacctaggagcgctgtctttttggttcgtctttcctttttttttagtcctattatgagccttgggtttacggagattggtcaaggttactgtattcagaatacagctcctgaagacgtaggcgggtttcagagaattgccattctggcatacagttgactctggttcgttaagctggtagcccgctggacttcctgcggccagaactgtccacaacattttgatggccgtggaatataacattttgcttaatgtgtccagtgtccaacagaatcagggacattttaagaagaatattaaccgattgacattataaggatatcaaatggaagcggcgttttatgcaattcaaaattcgatgggcatcgcccagtagtcatattgtgagtatctgtaggctagtcggaatcgtaacggtttgtccgatgtcatgtcgcttgcaaaatgctgtagtagcactacctgctgtttattaaactcagaactcgaactcttttaatagccctcgtagactatttttaacatcgccaagagcactgccatgtcacggatgag

SEQ ID NO: 5061 - DNA, 4523 bp, Zea Mays
cttgcatctagcctgctagtctctccttgggtgattgggtccttcagtccttgcaatttcctcccgcactcccggttctcccgcacgctcccctctgcctgtccgtgtcgcttgcttcgcttctgcaaacctcggccccggcctcggcatccgcggcgtcgccggcgtcgtcgtcgtcgtctagatccgacaagaagaagactaaatcggagactcctaagaagcgcgacaagctcttcggttccgcggccaccgcacccaagagcgccgcatcgtcggcctcgtcaagcccggcgggtgatgggaggaaggggtccgtgccgcatcatagggatgcgggcgtcgggggcgggggtggcgcgtcggcggccgcgctgtcgccgatcctggcgtcctcgctggggctcaaccggatcaagacgagatccgggccgctgccgcaggagggccaacgcatggctgccgtgatcgggagcagcaacctctcgcgcgggcagggccaagcggaaccgtcggctgcctcagccggcgtcggcggtagaaagggcgtcacctcctgggcggatactagtagtagcagccgcggaaaagggaagacgaccgagctgccgatgcgaagtacagctgggacgagcttgggaccagtagggaagagcgctgtaaaagctaaacctagtgcacagcggaaccattctggagatttgaggacacctactcacatacctgaggctgcgtgtgcatatgatccgtgtgagacaccaaaggaatccgagtccccacgctttaaagccattatgcaggctactagtgcaccgaggaagagactccctgcagatataaaaagtttttcacacgagctgaactccaaaggggtgcgcccatttccttttttgaaacctcggggcatttacaacttaaaggaggtaataaaagttatccatgtgagatttgagaaggcaaaggaagaggtaaattcagatttggcagtttttgcaggagacttggttagcgtaatggaaaagtatgcagactctcatcctgagtggaaagatgccctggaggacttgctaatacttgcacgtacctgctgtgtcatgacacctggggaattctggcttcagtgtgaaggtatagtgcaagatttggatgaccatcgtcaggaactctcaatgggtgtgctgaagaaactatacacccggatgctttttatccttacaagatgcacaaggctgctccagttccacaaagaaagtggttttgctgaggatgaagttgttattgatcagcgtgataagattatacaatctgcagataggcagattttaactcaatcaggtgtgggtgacacaacatccagagccagtaaaagtgaggcaagaaaatcatacagtcaggagcagcataatttgaaatggaagcgtagccaggagataaagcctgttaaccttcttccaccacttgatacggatgttaagaaagtggctgattctccaaccaaagaacgaatatcttcctggaaaccttttccatctcctgttacgaaggtcccaaaagaatctactcctactaaattggaatcacctaataagaaaacagatgcacactctacagttagtagccatgttgaattaagcagtccagttgaatctttaccacaacaacagcttcctgtcaagcatcaacataaaacttcatggggccactggtctgaccagccaaatatttctgaagagggttcaataatgtgtcgcatatgtgaagagtatgttccaacacagtatgtagaagaccattcaagggtctgtgcaattgctgacaggtgcgataaaaaaggtgttagtgttgatgaacgcttaatcagagttgcggaaatgctagaaaagatggtagaatcttattcaccgaaagacctgccaaatgctgcagtcagcccagatgttgcaaaagtttcaagttcaagcatcaatgaagaatctgatggtccctctcctaaactctctgattggtctagaagaggatctgctgatatgcttgactatctccaagagactgataacactatttcattggatgacattaaaaatcttccttcaatgacatgtaagactcgttttggaccaaaatctgatcatggaatggccacatcatccgctggaagtatgactcctaggtctccattaactccaagatcaaatcatatagacatgcttttagctggtaaaaatgcaattaatgagagtggtgatcttccgcagattgtcgaacttgctgatattgcacgatgcatagcaaatacccctctggatgaagaaagcgcattatcccaaatggttacctgcatagaagatcttcaagaaattgtcaaccgcaggaagcatgaggccctcacagtccagacatttggaacacgcatagaaaaactacacagggagaagtatctgcagctctgtgactcagttgatatggacaaggttgattcagcaagcaccataatggatgaagaagatgatgttgttcgtagcttgcgcgcaagtcctgtccatccagtcaaggatcgcacttcaattgatgactttgaaatcatgaaacctattagccgtggagcatttggacgtgttttcttggccaagaaaagaactacaggagatctttttgctataaaggttcttaggaaggcagatatgattcggaaaaatgctgtcgagagtatattggctgaacgtgatatcttgattacagtcaggaacccttttgtggtacgctttttctattcgtttacctcacgggagaatttgtatctggtcatggagtacctgaatggaggggacctttactcattactgaggaatttagggtgcctggatgaagacgttgctcgtgtatatcttgcagaagttgtactagctttggaatatttgcactctatgcacatagtccatagggatctaaagcctgacaacttgttgatagcccatgatggacatattaagtggggcttcactgtatggagatgatgagcctcagatgaatgagctcgaacaaatggatcaccgagcacggagacaaaatcgttctgctgttggaactcctgattatttagcaccagaaatccttttggggacaggacatggttgcagtgcagattggtggtctgttggtgtcattctgtttgagctcattgttggcatacctccattcaatgcagaacaccccgaggcaatttttgaaaatattatgaatcgcaaaataccttggccacatgtcccagaagagatgagttttgatgcacaagatttaattgacagattattgacagaagatcctcatcaacgactaggagcaaatggtgcctcagaggttaaacaacatccatttttcaaagacattagctgggatacccttgctaggcagaaggctgcctttgttccttcctccgatagtgcatttgatactagctacttcaccagtcgctattcttggaatcaatcagatgaaaacatatatgaagcatatgagttagaggactccagtgataatggaagccttagtggaagcagtagttgtgtgagtaaccaagatgacatgggggaggacagcactggcctcaatgagtttgaatctagtgcaaatgtcaattattctttcagcaacttctcgttcaagaatctatcacaacttgcttccatcaactacgatctgctcaccaaaggattgaaggatgatccaccgccaagaacagaaatgtagcagttaatctaaatttggatggactcatttgagtactcagacagtctacaaggtgctcgtgggatgtaggtcttgtacatatcaaagtgtgaggcatggtctgttcctattgaggctgttcctacatctcgcggatccgagtacagttttggtgttgccttgttttcatgactattgccatgccatcatcagtgaaatcacccttgaccaaatttggcattcgacctaggagcgctgtctttttggttcgtctttcctttttttttagtcctattatgagccttgggtttacggagattggtcaaggttactgtattcagaatacagctcctgaagacgtaggcgggtttcagagaattgccattctggcatacagttgactctggttcgttaagctggtagcccgctggacttcctgcggccagaactgtccacaacattttgatggccgtggaatataacattttgcttaatgtgtccagtgtccaacagaatcagggacattttaagaagaatattaaccgattgacattataaggatatcaaatggaagcggcgttttatgcaattcaaaattcgatgggcatcgcccagtagtcatattgtgagtatctgtaggctagtcggaatcgtaacggtttgtccgatgtcatgtcgcttgcaaaatgctgtagtagcactacctgctgtttattaaactcagaactcgaactcttttaatagccctcgtagactatttttaacatcgccaagagcactgccatgtcacggatgag

SEQ ID NO: 5062 - DNA, 4567 bp, Zea Mays
cttgcatctagcctgctagtctctccttgggtgattgggtccttcagtccttgcaatttcctcccgcactcccggttctcccgcacgctcccctctgcctgtccgtgtcgcttgcttcgcttctgcaaacctcggccccggcctcggcatccgcggcgtcgccggcgtcgtcgtcgtcgtctagatccgacaagaagaagactaaatcggagactcctaagaagcgcgacaagctcttcggttccgcggccaccgcacccaagagcgccgcatcgtcggcctcgtcaagcccggcgggtgatgggaggaaggggtccgtgccgcatcatagggatgcgggcgtcgggggcgggggtggcgcgtcggcggccgcgctgtcgccgatcctggcgtcctcgctggggctcaaccggatcaagacgagatccgggccgctgccgcaggagggccaacgcatggctgccgtgatcgggagcagcaacctctcgcgcgggcagggccaagcggaaccgtcggctgcctcagccggcgtcggcggtagaaagggcgtcacctcctgggcggatactagtagtagcagccgcggaaaagggaagacgaccgagctgccgatgcgaagtacagctgggacgagcttgggaccagtagggaagagcgctgtaaaagctaaacctagtgcacagcggaaccattctggagatttgaggacacctactcacatacctgaggctgcgtgtgcatatgatccgtgtgagacaccaaaggaatccgagtccccacgctttaaagccattatgcaggctactagtgcaccgaggaagagactccctgcagatataaaaagtttttcacacgagctgaactccaaaggggtgcgcccatttccttttttgaaacctcggggcatttacaacttaaaggaggtaataaaagttatccatgtgagatttgagaaggcaaaggaagaggtaaattcagatttggcagtttttgcaggagacttggttagcgtaatggaaaagtatgcagactctcatcctgagtggaaagatgccctggaggacttgctaatacttgcacgtacctgctgtgtcatgacacctggggaattctggcttcagtgtgaaggtatagtgcaagatttggatgaccatcgtcaggaactctcaatgggtgtgctgaagaaactatacacccggatgctttttatccttacaagatgcacaaggctgctccagttccacaaagaaagtggttttgctgaggatgaagttgttattgatcagcgtgataagattatacaatctgcagataggcagattttaactcaatcaggtgtgggtgacacaacatccagagccagtaaaagtgaggcaagaaaatcatacagtcaggagcagcataatttgaaatggaagcgtagccaggagataaagcctgttaaccttcttccaccacttgatacggatgttaagaaagtggctgattctccaaccaaagaacgaatatcttcctggaaaccttttccatctcctgttacgaaggtcccaaaagaatctactcctactaaattggaatcacctaataagaaaacagatgcacactctacagttagtagccatgttgaattaagcagtccagttgaatctttaccacaacaacagcttcctgtcaagcatcaacataaaacttcatggggccactggtctgaccagccaaatatttctgaagagggttcaataatgtgtcgcatatgtgaagagtatgttccaacacagtatgtagaagaccattcaagggtctgtgcaattgctgacaggtgcgataaaaaaggtgttagtgttgatgaacgcttaatcagagttgcggaaatgctagaaaagatggtagaatcttattcaccgaaagacctgccaaatgctgcagtcagcccagatgttgcaaaagtttcaagttcaagcatcaatgaagaatctgatggtccctctcctaaactctctgattggtctagaagaggatctgctgatatgcttgactatctccaagagactgataacactatttcattggatgacattaaaaatcttccttcaatgacatgtaagactcgttttggaccaaaatctgatcatggaatggccacatcatccgctggaagtatgactcctaggtctccattaactccaagatcaaatcatatagacatgcttttagctggtaaaaatgcaattaatgagagtggtgatcttccgcagattgtcgaacttgctgatattgcacgatgcatagcaaatacccctctggatgaagaaagcgcattatcccaaatggttacctgcatagaagatcttcaagaaattgtcaaccgcaggaagcatgaggccctcacagtccagacatttggaacacgcatagaaaaactacacagggagaagtatctgcagctctgtgactcagttgatatggacaaggttgattcagcaagcaccataatggatgaagaagatgatgttgttcgtagcttgcgcgcaagtcctgtccatccagtcaaggatcgcacttcaattgatgactttgaaatcatgaaacctattagccgtggagcatttggacgtgttttcttggccaagaaaagaactacaggagatctttttgctataaaggttcttaggaaggcagatatgattcggaaaaatgctgtcgagagtatattggctgaacgtgatatcttgattacagtcaggaacccttttgtggtacgctttttctattcgtttacctcacgggagaatttgtatctggtcatggagtacctgaatggaggggacctttactcattactgaggaatttagggtgcctggatgaagacgttgctcgtgtatatcttgcagaagttgtactagctttggaatatttgcactctatgcacatagtccatagggatctaaagcctgacaacttgttgatagcccatgatggacatattaaggttggtttgatcaacagcacagatctgtctggtcctgctgttagtggggcttcactgtatggagatgatgagcctcagatgaatgagctcgaacaaatggatcaccgagcacggagacaaaatcgttctgctgttggaactcctgattatttagcaccagaaatccttttggggacaggacatggttgcagtgcagattggtggtctgttggtgtcattctgtttgagctcattgttggcatacctccattcaatgcagaacaccccgaggcaatttttgaaaatattatgaatcgcaaaataccttggccacatgtcccagaagagatgagttttgatgcacaagatttaattgacagattattgacagaagatcctcatcaacgactaggagcaaatggtgcctcagaggttaaacaacatccatttttcaaagacattagctgggatacccttgctaggcagaaggctgcctttgttccttcctccgatagtgcatttgatactagctacttcaccagtcgctattcttggaatcaatcagatgaaaacatatatgaagcatatgagttagaggactccagtgataatggaagccttagtggaagcagtagttgtgtgagtaaccaagatgacatgggggaggacagcactggcctcaatgagtttgaatctagtgcaaatgtcaattattctttcagcaacttctcgttcaagaatctatcacaacttgcttccatcaactacgatctgctcaccaaaggattgaaggatgatccaccgccaagaacagaaatgtagcagttaatctaaatttggatggactcatttgagtactcagacagtctacaaggtgctcgtgggatgtaggtcttgtacatatcaaagtgtgaggcatggtctgttcctattgaggctgttcctacatctcgcggatccgagtacagttttggtgttgccttgttttcatgactattgccatgccatcatcagtgaaatcacccttgaccaaatttggcattcgacctaggagcgctgtctttttggttcgtctttcctttttttttagtcctattatgagccttgggtttacggagattggtcaaggttactgtattcagaatacagctcctgaagacgtaggcgggtttcagagaattgccattctggcatacagttgactctggttcgttaagctggtagcccgctggacttcctgcggccagaactgtccacaacattttgatggccgtggaatataacattttgcttaatgtgtccagtgtccaacagaatcagggacattttaagaagaatattaaccgattgacattataaggatatcaaatggaagcggcgttttatgcaattcaaaattcgatgggcatcgcccagtagtcatattgtgagtatctgtaggctagtcggaatcgtaacggtttgtccgatgtcatgtcgcttgcaaaatgctgtagtagcactacctgctgtttattaaactcagaactcgaactcttttaatagccctcgtagactatttttaacatcgccaagagcactgccatgtcacggatgag

SEQ ID NO: 5063 - DNA, 4541 bp, Zea Mays
cttgcatctagcctgctagtctctccttgggtgattgggtccttcagtccttgcaatttcctcccgcactcccggttctcccgcacgctcccctctgcctgtccgtgtcgcttgcttcgcttctgcaaacctcggccccggcctcggcatccgcggcgtcgccggcgtcgtcgtcgtcgtctagatccgacaagaagaagactaaatcggagactcctaagaagcgcgacaagctcttcggttccgcggccaccgcacccaagagcgccgcatcgtcggcctcgtcaagcccggcgggtgatgggaggaaggggtccgtgccgcatcatagggatgcgggcgtcgggggcgggggtggcgcgtcggcggccgcgctgtcgccgatcctggcgtcctcgctggggctcaaccggatcaagacgagatccgggccgctgccgcaggagggccaacgcatggctgccgtgatcgggagcagcaacctctcgcgcgggcagggccaagcggaaccgtcggctgcctcagccggcgtcggcggtagaaagggcgtcacctcctgggcggatactagtagtagcagccgcggaaaagggaagacgaccgagctgccgatgcgaagtacagctgggacgagcttgggaccagtagggaagagcgctgtaaaagctaaacctagtgcacagcggaaccattctggagatttgaggacacctactcacatacctgaggctgcgtgtgcatatgatccgtgtgagacaccaaaggaatccgagtccccacgctttaaagccattatgcaggctactagtgcaccgaggaagagactccctgcagatataaaaagtttttcacacgagctgaactccaaaggggtgcgcccatttccttttttgaaacctcggggcatttacaacttaaaggaggtaataaaagttatccatgtgagatttgagaaggcaaaggaagaggtaaattcagatttggcagtttttgcaggagacttggttagcgtaatggaaaagtatgcagactctcatcctgagtggaaagatgccctggaggacttgctaatacttgcacgtacctgctgtgtcatgacacctggggaattctggcttcagtgtgaaggtatagtgcaagatttggatgaccatcgtcaggaactctcaatgggtgtgctgaagaaactatacacccggatgctttttatccttacaagatgcacaaggctgctccagttccacaaagaaagtggttttgctgaggatgaagttgttattgatcagcgtgataagattatacaatctgcagataggcagattttaactcaatcaggtgtgggtgacacaacatccagagccagtaaaagtgaggcaagaaaatcatacagtcaggagcagcataatttgaaatggaagcgtagccaggagataaagcctgttaaccttcttccaccacttgatacggatgttaagaaagtggctgattctccaaccaaagaacgaatatcttcctggaaaccttttccatctcctgttacgaaggtcccaaaagaatctactcctactaaattggaatcacctaataagaaaacagatgcacactctacagttagtagccatgttgaattaagcagtccagttgaatctttaccacaacaacagcttcctgtcaagcatcaacataaaacttcatggggccactggtctgaccagccaaatatttctgaagagggttcaataatgtgtcgcatatgtgaagagtatgttccaacacagtatgtagaagaccattcaagggtctgtgcaattgctgacaggtgcgataaaaaaggtgttagtgttgatgaacgcttaatcagagttgcggaaatgctagaaaagatggtagaatcttattcaccgaaagacctgccaaatgctgcagtcagcccagatgttgcaaaagtttcaagttcaagcatcaatgaagaatctgatggtccctctcctaaactctctgattggtctagaagaggatctgctgatatgcttgactatctccaagagactgataacactatttcattggatgacattaaaaatcttccttcaatgacatgtaagactcgttttggaccaaaatctgatcatggaatggccacatcatccgctggaagtatgactcctaggtctccattaactccaagatcaaatcatatagacatgcttttagctggtaaaaatgcaattaatgagagtggtgatcttccgcagattgtcgaacttgctgatattgcacgatgcatagcaaatacccctctggatgaagaaagcgcattatcccaaatggttacctgcatagaagatcttcaagaaattgtcaaccgcaggaagcatgaggccctcacagtccagacatttggaacacgcatagaaaaactacacagggagaagtatctgcagctctgtgactcagttgatatggacaaggttgattcagcaagcaccataatggatgaagaagatgatgttgttcgtagcttgcgcgcaagtcctgtccatccagtcaaggatcgcacttcaattgatgactttgaaatcatgaaacctattagccgtggagcatttggacgtgttttcttggccaagaaaagaactacaggagatctttttgctataaaggttcttaggaaggcagatatgattcggaaaaatgctgtcgagagtatattggctgaacgtgatatcttgattacagtcaggaacccttttgtggtacgctttttctattcgtttacctcacgggagaatttgtatctggtcatggagtacctgaatggaggggacctttactcattactgaggaatttagggtgcctggatgaagacgttgctcgtgtatatcttgcagaagttgtactagctttggaatatttgcactctatgcacatagtccatagggatctaaagcctgacaacttgttgatagcccatgatggacatattaagttgacagattttgggttgtccaaggttggtttgatcaacagcacagatctgtctggtcctgctgttagtggggcttcactgtatggagatgatgagcctcagatgaatgagctcgaacaaatggatcaccgagcacggagacaaaatcgttctgctgttggaactcctgattatttagcaccagaaatccttttggggacaggacatggttgcagtgcagattggtggtctgttggtgtcattctgtttgagctcattgttggcatacctccattcaatgtggccacatgtcccagaagagatgagttttgatgcacaagatttaattgacagattattgacagaagatcctcatcaacgactaggagcaaatggtgcctcagaggttaaacaacatccatttttcaaagacattagctgggatacccttgctaggcagaaggctgcctttgttccttcctccgatagtgcatttgatactagctacttcaccagtcgctattcttggaatcaatcagatgaaaacatatatgaagcatatgagttagaggactccagtgataatggaagccttagtggaagcagtagttgtgtgagtaaccaagatgacatgggggaggacagcactggcctcaatgagtttgaatctagtgcaaatgtcaattattctttcagcaacttctcgttcaagaatctatcacaacttgcttccatcaactacgatctgctcaccaaaggattgaaggatgatccaccgccaagaacagaaatgtagcagttaatctaaatttggatggactcatttgagtactcagacagtctacaaggtgctcgtgggatgtaggtcttgtacatatcaaagtgtgaggcatggtctgttcctattgaggctgttcctacatctcgcggatccgagtacagttttggtgttgccttgttttcatgactattgccatgccatcatcagtgaaatcacccttgaccaaatttggcattcgacctaggagcgctgtctttttggttcgtctttcctttttttttagtcctattatgagccttgggtttacggagattggtcaaggttactgtattcagaatacagctcctgaagacgtaggcgggtttcagagaattgccattctggcatacagttgactctggttcgttaagctggtagcccgctggacttcctgcggccagaactgtccacaacattttgatggccgtggaatataacattttgcttaatgtgtccagtgtccaacagaatcagggacattttaagaagaatattaaccgattgacattataaggatatcaaatggaagcggcgttttatgcaattcaaaattcgatgggcatcgcccagtagtcatattgtgagtatctgtaggctagtcggaatcgtaacggtttgtccgatgtcatgtcgcttgcaaaatgctgtagtagcactacctgctgtttattaaactcagaactcgaactcttttaatagccctcgtagactatttttaacatcgccaagagcactgccatgtcacggatgag

SEQ ID NO: 5064 - DNA, 4570 bp, Zea Mays
cttgcatctagcctgctagtctctccttgggtgattgggtccttcagtccttgcaatttcctcccgcactcccggttctcccgcacgctcccctctgcctgtccgtgtcgcttgcttcgcttctgcaaacctcggccccggcctcggcatccgcggcgtcgccggcgtcgtcgtcgtcgtctagatccgacaagaagaagactaaatcggagactcctaagaagcgcgacaagctcttcggttccgcggccaccgcacccaagagcgccgcatcgtcggcctcgtcaagcccggcgggtgatgggaggaaggggtccgtgccgcatcatagggatgcgggcgtcgggggcgggggtggcgcgtcggcggccgcgctgtcgccgatcctggcgtcctcgctggggctcaaccggatcaagacgagatccgggccgctgccgcaggagggccaacgcatggctgccgtgatcgggagcagcaacctctcgcgcgggcagggccaagcggaaccgtcggctgcctcagccggcgtcggcggtagaaagggcgtcacctcctgggcggatactagtagtagcagccgcggaaaagggaagacgaccgagctgccgatgcgaagtacagctgggacgagcttgggaccagtagggaagagcgctgtaaaagctaaacctagtgcacagcggaaccattctggagatttgaggacacctactcacatacctgaggctgcgtgtgcatatgatccgtgtgagacaccaaaggaatccgagtccccacgctttaaagccattatgcaggctactagtgcaccgaggaagagactccctgcagatataaaaagtttttcacacgagctgaactccaaaggggtgcgcccatttccttttttgaaacctcggggcatttacaacttaaaggaggtaataaaagttatccatgtgagatttgagaaggcaaaggaagaggtaaattcagatttggcagtttttgcaggagacttggttagcgtaatggaaaagtatgcagactctcatcctgagtggaaagatgccctggaggacttgctaatacttgcacgtacctgctgtgtcatgacacctggggaattctggcttcagtgtgaaggtatagtgcaagatttggatgaccatcgtcaggaactctcaatgggtgtgctgaagaaactatacacccggatgctttttatccttacaagatgcacaaggctgctccagttccacaaagaaagtggttttgctgaggatgaagttgttattgatcagcgtgataagattatacaatctgcagataggcagattttaactcaatcaggtgtgggtgacacaacatccagagccagtaaaagtgaggcaagaaaatcatacagtcaggagcagcataatttgaaatggaagcgtagccaggagataaagcctgttaaccttcttccaccacttgatacggatgttaagaaagtggctgattctccaaccaaagaacgaatatcttcctggaaaccttttccatctcctgttacgaaggtcccaaaagaatctactcctactaaattggaatcacctaataagaaaacagatgcacactctacagttagtagccatgttgaattaagcagtccagttgaatctttaccacaacaacagcttcctgtcaagcatcaacataaaacttcatggggccactggtctgaccagccaaatatttctgaagagggttcaataatgtgtcgcatatgtgaagagtatgttccaacacagtatgtagaagaccattcaagggtctgtgcaattgctgacaggtgcgataaaaaaggtgttagtgttgatgaacgcttaatcagagttgcggaaatgctagaaaagatggtagaatcttattcaccgaaagacctgccaaatgctgcagtcagcccagatgttgcaaaagtttcaagttcaagcatcaatgaagaatctgatggtccctctcctaaactctctgattggtctagaagaggatctgctgatatgcttgactatctccaagagactgataacactatttcattggatgacattaaaaatcttccttcaatgacatgtaagactcgttttggaccaaaatctgatcatggaatggccacatcatccgctggaagtatgactcctaggtctccattaactccaagatcaaatcatatagacatgcttttagctggtaaaaatgcaattaatgagagtggtgatcttccgcagattgtcgaacttgctgatattgcacgatgcatagcaaatacccctctggatgaagaaagcgcattatcccaaatggttacctgcatagaagatcttcaagaaattgtcaaccgcaggaagcatgaggccctcacagtccagacatttggaacacgcatagaaaaactacacagggagaagtatctgcagctctgtgactcagttgatatggacaaggttgattcagcaagcaccataatggatgaagaagatgatgttgttcgtagcttgcgcgcaagtcctgtccatccagtcaaggatcgcacttcaattgatgactttgaaatcatgaaacctattagccgtggagcatttggacgtgttttcttggccaagaaaagaactacaggagatctttttgctataaaggttcttaggaaggcagatatgattcggaaaaatgctgtcgagagtatattggctgaacgtgatatcttgattacagtcaggaacccttttgtggtacgctttttctattcgtttacctcacgggagaatttgtatctggtcatggagtacctgaatggaggggacctttactcattactgaggaatttagggtgcctggatgaagacgttgctcgtgtatatcttgcagaagttgtactagctttggaatatttgcactctatgcacatagtccatagggatctaaagcctgacaacttgttgatagcccatgatggacatattaagttgacagattttgggttgtccaaggttggtttgatcaacagcacagatctgtctggtcctgctgttagtggggcttcactgtatggagatgatgagcctcagatgaatgagctcgaacaaatggatcaccgagcacggagacaaaatcgttctgctgttggaactcctgattatttagcaccagaaatccttttggggacaggacatggttgcagtgcagattggtggtctgttggtgtcattctgtttgagctcattgttggcatacctccattcaatgcagaacaccccgaggcaatttttgaaaatattatgaatcgcaaaataccttggccacatgtcccagaagagatgagttttgatgcacaagatttaattgacagattattgacagaagatcctcatcaacgactaggagcaaatggtgcctcagaggttaaacaacatccatttttcaaagacattagctgggatacccttgctaggcagaaggctgcctttgttccttcctccgatagtgcatttgatactagctacttcaccagtcgctattcttggaatcaatcagatgaaaacatatatgaagcatatgagttagaggactccagtgataatggaagccttagtggaagcagtagttgtggggaggacagcactggcctcaatgagtttgaatctagtgcaaatgtcaattattctttcagcaacttctcgttcaagaatctatcacaacttgcttccatcaactacgatctgctcaccaaaggattgaaggatgatccaccgccaagaacagaaatgtagcagttaatctaaatttggatggactcatttgagtactcagacagtctacaaggtgctcgtgggatgtaggtcttgtacatatcaaagtgtgaggcatggtctgttcctattgaggctgttcctacatctcgcggatccgagtacagttttggtgttgccttgttttcatgactattgccatgccatcatcagtgaaatcacccttgaccaaatttggcattcgacctaggagcgctgtctttttggttcgtctttcctttttttttagtcctattatgagccttgggtttacggagattggtcaaggttactgtattcagaatacagctcctgaagacgtaggcgggtttcagagaattgccattctggcatacagttgactctggttcgttaagctggtagcccgctggacttcctgcggccagaactgtccacaacattttgatggccgtggaatataacattttgcttaatgtgtccagtgtccaacagaatcagggacattttaagaagaatattaaccgattgacattataaggatatcaaatggaagcggcgttttatgcaattcaaaattcgatgggcatcgcccagtagtcatattgtgagtatctgtaggctagtcggaatcgtaacggtttgtccgatgtcatgtcgcttgcaaaatgctgtagtagcactacctgctgtttattaaactcagaactcgaactcttttaatagccctcgtagactatttttaacatcgccaagagcactgccatgtcacggatgag

SEQ ID NO: 5065 - DNA, 4413 bp, Zea Mays
cttgcatctagcctgctagtctctccttgggtgattgggtccttcagtccttgcaatttcctcccgcactcccggttctcccgcacgctcccctctgcctgtccgtgtcgcttgcttcgcttctgcaaacctcggccccggcctcggcatccgcggcgtcgccggcgtcgtcgtcgtcgtctagatccgacaagaagaagactaaatcggagactcctaagaagcgcgacaagctcttcggttccgcggccaccgcacccaagagcgccgcatcgtcggcctcgtcaagcccggcgggtgatgggaggaaggggtccgtgccgcatcatagggatgcgggcgtcgggggcgggggtggcgcgtcggcggccgcgctgtcgccgatcctggcgtcctcgctggggctcaaccggatcaagacgagatccgggccgctgccgcaggagggccaacgcatggctgccgtgatcgggagcagcaacctctcgcgcgggcagggccaagcggaaccgtcggctgcctcagccggcgtcggcggtagaaagggcgtcacctcctgggcggatactagtagtagcagccgcggaaaagggaagacgaccgagctgccgatgcgaagtacagctgggacgagcttgggaccagtagggaagagcgctgtaaaagctaaacctagtgcacagcggaaccattctggagatttgaggacacctactcacatacctgaggctgcgtgtgcatatgatccgtgtgagacaccaaaggaatccgagtccccacgctttaaagccattatgcaggctactagtgcaccgaggaagagactccctgcagatataaaaagtttttcacacgagctgaactccaaaggggtgcgcccatttccttttttgaaacctcggggcatttacaacttaaaggaggtaataaaagttatccatgtgagatttgagaaggcaaaggaagaggtaaattcagatttggcagtttttgcaggagacttggttagcgtaatggaaaagtatgcagactctcatcctgagtggaaagatgccctggaggacttgctaatacttgcacgtacctgctgtgtcatgacacctggggaattctggcttcagtgtgaaggtatagtgcaagatttggatgaccatcgtcaggaactctcaatgggtgtgctgaagaaactatacacccggatgctttttatccttacaagatgcacaaggctgctccagttccacaaagaaagtggttttgctgaggatgaagttgttattgatcagcgtgataagattatacaatctgcagataggcagattttaactcaatcaggtgtgggtgacacaacatccagagccagtaaaagtgaggcaagaaaatcatacagtcaggagcagcataatttgaaatggaagcgtagccaggagataaagcctgttaaccttcttccaccacttgatacggatgttaagaaagtggctgattctccaaccaaagaacgaatatcttcctggaaaccttttccatctcctgttacgaaggtcccaaaagaatctactcctactaaattggaatcacctaataagaaaacagatgcacactctacagttagtagccatgttgaattaagcagtccagttgaatctttaccacaacaacagcttcctgtcaagcatcaacataaaacttcatggggccactggtctgaccagccaaatatttctgaagagggttcaataatgtgtcgcatatgtgaagagtatgttccaacacagtatgtagaagaccattcaagggtctgtgcaattgctgacaggtgcgataaaaaaggtgttagtgttgatgaacgcttaatcagagttgcggaaatgctagaaaagatggtagaatcttattcaccgaaagacctgccaaatgctgcagtcagcccagatgttgcaaaagtttcaagttcaagcatcaatgaagaatctgatggtccctctcctaaactctctgattggtctagaagaggatctgctgatatgcttgactatctccaagagactgataacactatttcattggatgacattaaaaatcttccttcaatgacatgtaagactcgttttggaccaaaatctgatcatggaatggccacatcatccgctggaagtatgactcctaggtctccattaactccaagatcaaatcatatagacatgcttttagctggtaaaaatgcaattaatgagagtggtgatcttccgcagattgtcgaacttgctgatattgcacgatgcatagcaaatacccctctggatgaagaaagcgcattatcccaaatggttacctgcatagaagatcttcaagaaattgtcaaccgcaggaagcatgaggccctcacagtccagacatttggaacacgcatagaaaaactacacagggagaagtatctgcagctctgtgactcagttgatatggacaaggttgattcagcaagcaccataatggatgaagaagatgatgttgttcgtagcttgcgcgcaagtcctgtccatccagtcaaggatcgcacttcaattgatgactttgaaatcatgaaacctattagccgtggagcatttggacgtgttttcttggccaagaaaagaactacaggagatctttttgctataaaggttcttaggaaggcagatatgattcggaaaaatgctgtcgagagtatattggctgaacgtgatatcttgattacagtcaggaacccttttgtggtacgctttttctattcgtttacctcacgggagaatttgtatctggtcatggagtacctgaatggaggggacctttactcattactgaggaatttagggtgcctggatgaagacgttgctcgtgtatatcttgcagaagttgtactagctttggaatatttgcactctatgcacatagtccatagggatctaaagcctgacaacttgttgatagcccatgatggacatattaagtggggcttcactgtatggagatgatgagcctcagatgaatgagctcgaacaaatggatcaccgagcacggagacaaaatcgttctgctgttggaactcctgattatttagcaccagaaatccttttggggacaggacatggttgcagtgcagattggtggtctgttggtgtcattctgtttgagctcattgttggcatacctccattcaatgcagaacaccccgaggcaatttttgaaaatattatgaatcgcaaaataccttggccacatgtcccagaagagatgagttttgatgcacaagatttaattgacagattattgacagaagatcctcatcaacgactaggagcaaatggtgcctcagagtcgctattcttggaatcaatcagatgaaaacatatatgaagcatatgagttagaggactccagtgataatggaagccttagtggaagcagtagttgtgtgagtaaccaagatgacatgggggaggacagcactggcctcaatgagtttgaatctagtgcaaatgtcaattattctttcagcaacttctcgttcaagaatctatcacaacttgcttccatcaactacgatctgctcaccaaaggattgaaggatgatccaccgccaagaacagaaatgtagcagttaatctaaatttggatggactcatttgagtactcagacagtctacaaggtgctcgtgggatgtaggtcttgtacatatcaaagtgtgaggcatggtctgttcctattgaggctgttcctacatctcgcggatccgagtacagttttggtgttgccttgttttcatgactattgccatgccatcatcagtgaaatcacccttgaccaaatttggcattcgacctaggagcgctgtctttttggttcgtctttcctttttttttagtcctattatgagccttgggtttacggagattggtcaaggttactgtattcagaatacagctcctgaagacgtaggcgggtttcagagaattgccattctggcatacagttgactctggttcgttaagctggtagcccgctggacttcctgcggccagaactgtccacaacattttgatggccgtggaatataacattttgcttaatgtgtccagtgtccaacagaatcagggacattttaagaagaatattaaccgattgacattataaggatatcaaatggaagcggcgttttatgcaattcaaaattcgatgggcatcgcccagtagtcatattgtgagtatctgtaggctagtcggaatcgtaacggtttgtccgatgtcatgtcgcttgcaaaatgctgtagtagcactacctgctgtttattaaactcagaactcgaactcttttaatagccctcgtagactatttttaacatcgccaagagcactgccatgtcacggatgag

SEQ ID NO: 5066 - DNA, 4363 bp, Zea Mays
cttgcatctagcctgctagtctctccttgggtgattgggtccttcagtccttgcaatttcctcccgcactcccggttctcccgcacgctcccctctgcctgtccgtgtcgcttgcttcgcttctgcaaacctcggccccggcctcggcatccgcggcgtcgccggcgtcgtcgtcgtcgtctagatccgacaagaagaagactaaatcggagactcctaagaagcgcgacaagctcttcggttccgcggccaccgcacccaagagcgccgcatcgtcggcctcgtcaagcccggcgggtgatgggaggaaggggtccgtgccgcatcatagggatgcgggcgtcgggggcgggggtggcgcgtcggcggccgcgctgtcgccgatcctggcgtcctcgctggggctcaaccggatcaagacgagatccgggccgctgccgcaggagggccaacgcatggctgccgtgatcgggagcagcaacctctcgcgcgggcagggccaagcggaaccgtcggctgcctcagccggcgtcggcggtagaaagggcgtcacctcctgggcggatactagtagtagcagccgcggaaaagggaagacgaccgagctgccgatgcgaagtacagctgggacgagcttgggaccagtagggaagagcgctgtaaaagctaaacctagtgcacagcggaaccattctggagatttgaggacacctactcacatacctgaggctgcgtgtgcatatgatccgtgtgagacaccaaaggaatccgagtccccacgctttaaagccattatgcaggctactagtgcaccgaggaagagactccctgcagatataaaaagtttttcacacgagctgaactccaaaggggtgcgcccatttccttttttgaaacctcggggcatttacaacttaaaggaggtaataaaagttatccatgtgagatttgagaaggcaaaggaagaggtaaattcagatttggcagtttttgcaggagacttggttagcgtaatggaaaagtatgcagactctcatcctgagtggaaagatgccctggaggacttgctaatacttgcacgtacctgctgtgtcatgacacctggggaattctggcttcagtgtgaaggtatagtgcaagatttggatgaccatcgtcaggaactctcaatgggtgtgctgaagaaactatacacccggatgctttttatccttacaagatgcacaaggctgctccagttccacaaagaaagtggttttgctgaggatgaagttgttattgatcagcgtgataagattatacaatctgcagataggcagattttaactcaatcaggtgtgggtgacacaacatccagagccagtaaaagtgaggcaagaaaatcatacagtcaggagcagcataatttgaaatggaagcgtagccaggagataaagcctgttaaccttcttccaccacttgatacggatgttaagaaagtggctgattctccaaccaaagaacgaatatcttcctggaaaccttttccatctcctgttacgaaggtcccaaaagaatctactcctactaaattggaatcacctaataagaaaacagatgcacactctacagttagtagccatgttgaattaagcagtccagttgaatctttaccacaacaacagcttcctgtcaagcatcaacataaaacttcatggggccactggtctgaccagccaaatatttctgaagagggttcaataatgtgtcgcatatgtgaagagtatgttccaacacagtatgtagaagaccattcaagggtctgtgcaattgctgacaggtgcgataaaaaaggtgttagtgttgatgaacgcttaatcagagttgcggaaatgctagaaaagatggtagaatcttattcaccgaaagacctgccaaatgctgcagtcagcccagatgttgcaaaagtttcaagttcaagcatcaatgaagaatctgatggtccctctcctaaactctctgattggtctagaagaggatctgctgatatgcttgactatctccaagagactgataacactatttcattggatgacattaaaaatcttccttcaatgacatgtaagactcgttttggaccaaaatctgatcatggaatggccacatcatccgctggaagtatgactcctaggtctccattaactccaagatcaaatcatatagacatgcttttagctggtaaaaatgcaattaatgagagtggtgatcttccgcagattgtcgaacttgctgatattgcacgatgcatagcaaatacccctctggatgaagaaagcgcattatcccaaatggttacctgcatagaagatcttcaagaaattgtcaaccgcaggaagcatgaggccctcacagtccagacatttggaacacgcatagaaaaactacacagggagaagtatctgcagctctgtgactcagttgatatggacaaggttgattcagcaagcaccataatggatgaagaagatgatgttgttcgtagcttgcgcgcaagtcctgtccatccagtcaaggatcgcacttcaattgatgactttgaaatcatgaaacctattagccgtggagcatttggacgtgttttcttggccaagaaaagaactacaggagatctttttgctataaaggttcttaggaaggcagatatgattcggaaaaatgctgtcgagagtatattggctgaacgtgatatcttgattacagtcaggaacccttttgtggtacgctttttctattcgtttacctcacgggagaatttgtatctggtcatggagtacctgaatggaggggacctttactcattactgaggaatttagggtgcctggatgaagacgttgctcgtgtatatcttgcagaagttgtactagctttggaatatttgcactctatgcacatagtccatagggatctaaagcctgacaacttgttgatagcccatgatggacatattaagttgacagattttgggttgtccaaggttggtttgatcaacagcacagatctgtctggtcctgctgttagtggggcttcactgtatggagatgatgagcctcagatgaatgagctcgaacaaatggatcaccgagcacggagacaaaatcgttctgctgttggaactcctgattatttagcaccagaaatccttttggggacaggacatggttgcagtgcagattggtggtctgttggtgtcattctgtttgagctcattgttggcatacctccattcaatgcagaacaccccgaggcaatttttgaaaatattatgaatcgcaaaataccttggccacatgtcccagaagagatgagttttgatgcacaagatttaattgacagattattgacagaagatcctcatcaacgactaggagcaaatggtgcctcagagggggaggacagcactggcctcaatgagtttgaatctagtgcaaatgtcaattattctttcagcaacttctcgttcaagaatctatcacaacttgcttccatcaactacgatctgctcaccaaaggattgaaggatgatccaccgccaagaacagaaatgtagcagttaatctaaatttggatggactcatttgagtactcagacagtctacaaggtgctcgtgggatgtaggtcttgtacatatcaaagtgtgaggcatggtctgttcctattgaggctgttcctacatctcgcggatccgagtacagttttggtgttgccttgttttcatgactattgccatgccatcatcagtgaaatcacccttgaccaaatttggcattcgacctaggagcgctgtctttttggttcgtctttcctttttttttagtcctattatgagccttgggtttacggagattggtcaaggttactgtattcagaatacagctcctgaagacgtaggcgggtttcagagaattgccattctggcatacagttgactctggttcgttaagctggtagcccgctggacttcctgcggccagaactgtccacaacattttgatggccgtggaatataacattttgcttaatgtgtccagtgtccaacagaatcagggacattttaagaagaatattaaccgattgacattataaggatatcaaatggaagcggcgttttatgcaattcaaaattcgatgggcatcgcccagtagtcatattgtgagtatctgtaggctagtcggaatcgtaacggtttgtccgatgtcatgtcgcttgcaaaatgctgtagtagcactacctgctgtttattaaactcagaactcgaactcttttaatagccctcgtagactatttttaacatcgccaagagcactgccatgtcacggatgag

SEQ ID NO: 5067 - DNA, 4584 bp, Zea Mays
cttgcatctagcctgctagtctctccttgggtgattgggtccttcagtccttgcaatttcctcccgcactcccggttctcccgcacgctcccctctgcctgtccgtgtcgcttgcttcgcttctgcaaacctcggccccggcctcggcatccgcggcgtcgccggcgtcgtcgtcgtcgtctagatccgacaagaagaagactaaatcggagactcctaagaagcgcgacaagctcttcggttccgcggccaccgcacccaagagcgccgcatcgtcggcctcgtcaagcccggcgggtgatgggaggaaggggtccgtgccgcatcatagggatgcgggcgtcgggggcgggggtggcgcgtcggcggccgcgctgtcgccgatcctggcgtcctcgctggggctcaaccggatcaagacgagatccgggccgctgccgcaggagggccaacgcatggctgccgtgatcgggagcagcaacctctcgcgcgggcagggccaagcggaaccgtcggctgcctcagccggcgtcggcggtagaaagggcgtcacctcctgggcggatactagtagtagcagccgcggaaaagggaagacgaccgagctgccgatgcgaagtacagctgggacgagcttgggaccagtagggaagagcgctgtaaaagctaaacctagtgcacagcggaaccattctggagatttgaggacacctactcacatacctgaggctgcgtgtgcatatgatccgtgtgagacaccaaaggaatccgagtccccacgctttaaagccattatgcaggctactagtgcaccgaggaagagactccctgcagatataaaaagtttttcacacgagctgaactccaaaggggtgcgcccatttccttttttgaaacctcggggcatttacaacttaaaggaggtaataaaagttatccatgtgagatttgagaaggcaaaggaagaggtaaattcagatttggcagtttttgcaggagacttggttagcgtaatggaaaagtatgcagactctcatcctgagtggaaagatgccctggaggacttgctaatacttgcacgtacctgctgtgtcatgacacctggggaattctggcttcagtgtgaaggtatagtgcaagatttggatgaccatcgtcaggaactctcaatgggtgtgctgaagaaactatacacccggatgctttttatccttacaagatgcacaaggctgctccagttccacaaagaaagtggttttgctgaggatgaagttgttattgatcagcgtgataagattatacaatctgcagataggcagattttaactcaatcaggtgtgggtgacacaacatccagagccagtaaaagtgaggcaagaaaatcatacagtcaggagcagcataatttgaaatggaagcgtagccaggagataaagcctgttaaccttcttccaccacttgatacggatgttaagaaagtggctgattctccaaccaaagaacgaatatcttcctggaaaccttttccatctcctgttacgaaggtcccaaaagaatctactcctactaaattggaatcacctaataagaaaacagatgcacactctacagttagtagccatgttgaattaagcagtccagttgaatctttaccacaacaacagcttcctgtcaagcatcaacataaaacttcatggggccactggtctgaccagccaaatatttctgaagagggttcaataatgtgtcgcatatgtgaagagtatgttccaacacagtatgtagaagaccattcaagggtctgtgcaattgctgacaggtgcgataaaaaaggtgttagtgttgatgaacgcttaatcagagttgcggaaatgctagaaaagatggtagaatcttattcaccgaaagacctgccaaatgctgcagtcagcccagatgttgcaaaagtttcaagttcaagcatcaatgaagaatctgatggtccctctcctaaactctctgattggtctagaagaggatctgctgatatgcttgactatctccaagagactgataacactatttcattggatgacattaaaaatcttccttcaatgacatgtaagactcgttttggaccaaaatctgatcatggaatggccacatcatccgctggaagtatgactcctaggtctccattaactccaagatcaaatcatatagacatgcttttagctggtaaaaatgcaattaatgagagtggtgatcttccgcagattgtcgaacttgctgatattgcacgatgcatagcaaatacccctctggatgaagaaagcgcattatcccaaatggttacctgcatagaagatcttcaagaaattgtcaaccgcaggaagcatgaggccctcacagtccagacatttggaacacgcatagaaaaactacacagggagaagtatctgcagctctgtgactcagttgatatggacaaggttgattcagcaagcaccataatggatgaagaagatgatgttgttcgtagcttgcgcgcaagtcctgtccatccagtcaaggatcgcacttcaattgatgactttgaaatcatgaaacctattagccgtggagcatttggacgtgttttcttggccaagaaaagaactacaggagatctttttgctataaaggttcttaggaaggcagatatgattcggaaaaatgctgtcgagagtatattggctgaacgtgatatcttgattacagtcaggaacccttttgtggtacgctttttctattcgtttacctcacgggagaatttgtatctggtcatggagtacctgaatggaggggacctttactcattactgaggaatttagggtgcctggatgaagacgttgctcgtgtatatcttgcagaagttgtactagctttggaatatttgcactctatgcacatagtccatagggatctaaagcctgacaacttgttgatagcccatgatggacatattaagattttgggttgtccaaggttggtttgatcaacagcacagatctgtctggtcctgctgttagtggggcttcactgtatggagatgatgagcctcagatgaatgagctcgaacaaatggatcaccgagcacggagacaaaatcgttctgctgttggaactcctgattatttagcaccagaaatccttttggggacaggacatggttgcagtgcagattggtggtctgttggtgtcattctgtttgagctcattgttggcatacctccattcaatgcagaacaccccgaggcaatttttgaaaatattatgaatcgcaaaataccttggccacatgtcccagaagagatgagttttgatgcacaagatttaattgacagattattgacagaagatcctcatcaacgactaggagcaaatggtgcctcagaggttaaacaacatccatttttcaaagacattagctgggatacccttgctaggcagaaggctgcctttgttccttcctccgatagtgcatttgatactagctacttcaccagtcgctattcttggaatcaatcagatgaaaacatatatgaagcatatgagttagaggactccagtgataatggaagccttagtggaagcagtagttgtgtgagtaaccaagatgacatgggggaggacagcactggcctcaatgagtttgaatctagtgcaaatgtcaattattctttcagcaacttctcgttcaagaatctatcacaacttgcttccatcaactacgatctgctcaccaaaggattgaaggatgatccaccgccaagaacagaaatgtagcagttaatctaaatttggatggactcatttgagtactcagacagtctacaaggtgctcgtgggatgtaggtcttgtacatatcaaagtgtgaggcatggtctgttcctattgaggctgttcctacatctcgcggatccgagtacagttttggtgttgccttgttttcatgactattgccatgccatcatcagtgaaatcacccttgaccaaatttggcattcgacctaggagcgctgtctttttggttcgtctttcctttttttttagtcctattatgagccttgggtttacggagattggtcaaggttactgtattcagaatacagctcctgaagacgtaggcgggtttcagagaattgccattctggcatacagttgactctggttcgttaagctggtagcccgctggacttcctgcggccagaactgtccacaacattttgatggccgtggaatataacattttgcttaatgtgtccagtgtccaacagaatcagggacattttaagaagaatattaaccgattgacattataaggatatcaaatggaagcggcgttttatgcaattcaaaattcgatgggcatcgcccagtagtcatattgtgagtatctgtaggctagtcggaatcgtaacggtttgtccgatgtcatgtcgcttgcaaaatgctgtagtagcactacctgctgtttattaaactcagaactcgaactcttttaatagccctcgtagactatttttaacatcgccaagagcactgccatgtcacggatgag

SEQ ID NO: 5068 - DNA, 1949 bp, Zea Mays
ctctccttgggtgattgggtccttcagtccttgcaatttcctcccgcactcccggttctcccgcacgctcccctctgcctgtccgtgtcgcttgcttcgcttctgcaaacctcggccccggcctcggcatccgcggcgtcgccggcgtcgtcgtcgtcgtctagatccgacaagaagaagactaaatcggagactcctaagaagcgcgacaagctcttcggttccgcggccaccgcacccaagagcgccgcatcgtcggcctcgtcaagcccggcgggtgatgggaggaaggggtccgtgccgcatcatagggatgcgggcgtcgggggcgggggtggcgcgtcggcggccgcgctgtcgccgatcctggcgtcctcgctggggctcaaccggatcaagacgagatccgggccgctgccgcaggagggccaacgcatggctgccgtgatcgggagcagcaacctctcgcgcgggcagggccaagcggaaccgtcggctgcctcagccggcgtcggcggtagaaagggcgtcacctcctgggcggatactagtagtagcagccgcggaaaagggaagacgaccgagctgccgatgcgaagtacagctgggacgagcttgggaccagtagggaagagcgctgtaaaagctaaacctagtgcacagcggaaccattctggagatttgaggacacctactcacatacctgaggctgcgtgtgcatatgatccgtgtgagacaccaaaggaatccgagtccccacgctttaaagccattatgcaggctactagtgcaccgaggaagagactccctgcagatataaaaagtttttcacacgagctgaactccaaaggggtgcgcccatttccttttttgaaacctcggggcatttacaacttaaaggaggtaataaaagttatccatgtgagatttgagaaggcaaaggaagaggtaaattcagatttggcagtttttgcaggagacttggttagcgtaatggaaaagtatgcagactctcatcctgagtggaaagatgccctggaggacttgctaatacttgcacgtacctgctgtgtcatgacacctggggaattctggcttcagtgtgaaggtatagtgcaagatttggatgaccatcgtcaggaactctcaatgggtgtgctgaagaaactatacacccggatgctttttatccttacaagatgcacaaggctgctccagttccacaaagaaagtggttttgctgaggatgaagttgttattgatcagcgtgataagattatacaatctgcagataggcagattttaactcaatcaggtgtgggtgacacaacatccagagccagtaaaagtgaggcaagaaaatcatacagtcaggagcagcataatttgaaatggaagcgtagccaggagataaagcctgttaaccttcttccaccacttgatacggatgttaagaaagtggctgattctccaaccaaagaacgaatatcttcctggaaaccttttccatctcctgttacgaaggtcccaaaagaatctactcctactaaattggaatcacctaataagaaaacagatgcacactctacagttagtagccatgttgaattaagcagtccagttgaatctttaccacaacaacagcttcctgtcaagcatcaacataaaacttcatggggccactggtctgaccagccaaatatttctgaagagggttcaataatgtgtcgcatatgtgaagagtatgttccaacacagtatgtagaagaccattcaaggattgtcgaacttgctgatattgcacgatgcatagcaaatacccctctggatgaagaaagcgcattatcccaaatggttacctgcatagaagatcttcaagaaattgtcaaccgcaggaagcatgaggccctcacagtccagacatttggaacacgcatagaaaaactaca

SEQ ID NO: 5069 - DNA, 1394 bp, Zea Mays
aggggaagggtacgagcagcttcggcaagcgccggaacaagacgcacacgctctgcatccgctgcagccgccacagcttccacctccagaagagcacctgctcctcctgcgattacactgccgcccgcatccgcaagtaaggacaagcctccacatcgatagaagcaaatcaatccatttcgtttgacaagtagaagattatatatgttcaaccaaatggacataattagtgctgttttgcaaaagcattttggattttccagtctcaaagcattccaaaaggaagtcttggatgcttggtttggtcatgaggattgtgttctcctagcagccataggatcaggatcacatgaaaattattgaagacgacggtccaggtgcagccttctatgccagtgctaaggccatgactaatggaaatcacactttctatgtgagcaaactgatacagaggttggctagattaagtaaatatgatacaatgtatcacatgcacaggtaatggtgaaatccaaaatctgggagagccgacttctattttttgcatgctggatataccataccttttccacctatatatacttcaaaacttgttttttagtgtttcattttgtttttgtgattccaagggatctgtctcacaacaatctaaatggaccaataccagatttctatgtcaaatgccatcacttacatttctatataagctttcttgctgatcgacctacatactttaatattgctcaaaactcctctttttatgtttacttcctcttattttgtagggacctctcaagcaacaacctcaatggataaggcatattaaatagtaatgctccttccatttcataatgtcatcatgggagaaaatcttactgtcagggttcagaggatgttgtacggaatgaagttggttgatttgacgaagaagaaaacatttttagtcttgtggctgtgcgtctagctgttgatgcagctgatgagaagtcggctatagccgagagaattttagtcatcctgcagaaatatgtcttcccatatgacttatttcgttgttggatttatcatcaagtggagagtggcaatacttagtctggccactacttgtgcttgccaactttgcttagcaacttttaatgaagggctttgctggtgttgcgacaaagatacatgccaagagcagtatggttgcaggtgaagcagtgagtaacatctgcgttatagtggcattcaacgttcaaagcaagaaatgtatttggtttaattattgcaagcagtgatctgaaatatgtaaattatctttatatggtctttgcaagggaacacattttctggctctataccatcagtgattagccctgtacaaattttattgaaagaaaaactaaaggaat

SEQ ID NO: 5070 - DNA, 1016 bp, Zea Mays
aggggaagggtacgagcagcttcggcaagcgccggaacaagacgcacacgctctgcatccgctgcagccgccacagcttccacctccagaagagcacctgctcctcctgcgattacactgccgcccgcatccgcaagtaaggacaagcctccacatcgatagaagcaaatcaatccatttcgtttgacaagtagaagattatatatgttcaaccaaatggacataattagtgctgttttgcaaaagcattttggattttccagtctcaaagcattccaaaaggaagtcttggatgcttggtttggtcatgaggattgtgttctcctagcagccataggatcaggatcacatgaaaattattgaagacgacggtccaggtgcagccttctatgccagtgctaaggccatgactaatggaaatcacactttctatggacctctcaagcaacaacctcaatggataaggcatattaaatacatcatgggagaaaatcttactgtcagggttcagaggatgttgtacggaatgaagttggttgatttgacgaagaagaaaacatttttagtcttgtggctgtgcgtctagctgttgatgcagctgatgagaagtcggctatagccgagagaattttagtcatcctgcagaaatatgtcttcccatatgacttatttcgttgttggatttatcatcaagtggagagtggcaatacttagtctggccactacttgtgcttgccaactttgcttagcaacttttaatgaagggctttgctggtgttgcgacaaagatacatgccaagagcagtatggttgcaggtgaagcagtgagtaacatctgcgttatagtggcattcaacgttcaaagcaagaaatgtatttggtttaattattgcaagcagtgatctgaaatatgtaaattatctttatatggtctttgcaagggaacacattttctggctctataccatcagtgattagccctgtacaaattttattgaaagaaaaactaaaggaat

SEQ ID NO: 5071 - DNA, 1051 bp, Zea Mays
aggggaagggtacgagcagcttcggcaagcgccggaacaagacgcacacgctctgcatccgctgcagccgccacagcttccacctccagaagagcacctgctcctcctgcgattacactgccgcccgcatccgcaagtaaggacaagcctccacatcgatagaagcaaatcaatccatttcgtttgacaagtagaagattatatatgttcaaccaaatggacataattagtgctgttttgcaaaagcattttggattttccagtctcaaagcattccaaaaggaagtcttggatgcttggtttggtcatgaggattgtgttctcctagcagccataggatcaggatcacatgaaaattattgaagacgacggtccaggtgcagccttctatgccagtgctaaggccatgactaatggaaatcacactttctatgtgagcaaactgatacagaggttggctagattaagtaaatatgatacaatgtatcacatgcacagcattacttcttcagcatcatgggagaaaatcttactgtcagggttcagaggatgttgtacggaatgaagttggttgatttgacgaagaagaaaacatttttagtcttgtggctgtgcgtctagctgttgatgcagctgatgagaagtcggctatagccgagagaattttagtcatcctgcagaaatatgtcttcccatatgacttatttcgttgttggatttatcatcaagtggagagtggcaatacttagtctggccactacttgtgcttgccaactttgcttagcaacttttaatgaagggctttgctggtgttgcgacaaagatacatgccaagagcagtatggttgcaggtgaagcagtgagtaacatctgcgttatagtggcattcaacgttcaaagcaagaaatgtatttggtttaattattgcaagcagtgatctgaaatatgtaaattatctttatatggtctttgcaagggaacacattttctggctctataccatcagtgattagccctgtacaaattttattgaaagaaaaactaaaggaat

SEQ ID NO: 5072 - DNA, 1052 bp, Zea Mays
aggggaagggtacgagcagcttcggcaagcgccggaacaagacgcacacgctctgcatccgctgcagccgccacagcttccacctccagaagagcacctgctcctcctgcgattacactgccgcccgcatccgcaagtaaggacaagcctccacatcgatagaagcaaatcaatccatttcgtttgacaagcattttggattttccagtctcaaagcattccaaaaggaagtcttggatgcttggtttggtcatgaggattgtgttctcctagcagccataggatcaggatcacatgaaaattattgaagacgacggtccaggtgcagccttctatgccagtgctaaggccatgactaatggaaatcacactttctatgtgagcaaactgatacagaggttggctagattaagtaaatatgatacaatgtatcacatgcacagggacctctcaagcaacaacctcaatggataaggcatattaaatagtaatgctccttccatttcataatgtcatcatgggagaaaatcttactgtcagggttcagaggatgttgtacggaatgaagttggttgatttgacgaagaagaaaacatttttagtcttgtggctgtgcgtctagctgttgatgcagctgatgagaagtcggctatagccgagagaattttagtcatcctgcagaaatatgtcttcccatatgacttatttcgttgttggatttatcatcaagtggagagtggcaatacttagtctggccactacttgtgcttgccaactttgcttagcaacttttaatgaagggctttgctggtgttgcgacaaagatacatgccaagagcagtatggttgcaggtgaagcagtgagtaacatctgcgttatagtggcattcaacgttcaaagcaagaaatgtatttggtttaattattgcaagcagtgatctgaaatatgtaaattatctttatatggtctttgcaagggaacacattttctggctctataccatcagtgattagccctgtacaaattttattgaaagaaaaactaaaggaat

SEQ ID NO: 5073 - DNA, 3798 bp, Zea Mays
ctttactttaccaagttgggctaggcccgccgctagttgggcaacttgaaaacggccggagctcgatgcgttttagacaatctccacctgcccacctgcaactgcaagcggatgcaccgccgccttgccaccgcagccgcatcgcccgcgctccggcgcttctcgcaccacagcgtccctatagggaacagtgccaggtgtagaagagctaagaagcggtcttgctcttgctggagacgctccggcagctgtggatatagcgcatccgtggccgcagtgggttgcgctgatggaactcctcctccgtcggggccatgttgacccctccgccttcgccgccgcctcgctgtcttctaagcatgccaacgctgtccgcaccgcctgcctccgattcgggcgccagcgaccggagctcatccggcatatatcaagatgtgatattcaggttgccctacgatgtggttgtcccagcattgacaggaaggttgtaaactctgggaagcgactgcgggcttatgtagggcttgttgaaggagagcttgcaaagaagcttcatccagacacgaataaaggtgatgcggatgcagaaccgaagtttcaagaggttcagcgagcttatgagttctttaggaacattttcagggatagggattttggaagccatgatattaaggttgcacttgaactatcatttatggaagcagttcaaggatgcagcaaaacgatcaacttccaaacgtctgtcacgtgcgaaacctgcaatggagccggcgtgcctcctggaaccaaacctgaaacatgtctagcttgcaggggttcaggatttatgttcatgcaaactggacccttcaggatgcaatcaacttgcacaaaatgtggtggttctgggaagactgtgaaggatttctgccggttcctcgggcgggcctcgcctggtcgccccgttatgtgtagccagtggctgcctgcttctccctcctcaaggcgcagcgtagcacagcggctgcgttgctggcggccaaagatgatggcgcgtcgcgatgtacaacttctggtggcacgggggatctcctcatcaccgcgcctttctcggaggatcaaccaaacggaaagtgaaattgttcgaatgtttcatcctccaattcgtaagagtgaggaagcaatagcaaccattgcgccaagatacacacattctgtgcgtgtcttggatgagaggttcattaggatcctgaagatattcaagtggggccctgatgctgagaaggcgctggaggttctcatgcttagagttgatcactggttggtacgagaggttatgaaaactgacgttggggtcaatgtgaagatgcagttcttcagatgggctgcaaagcggaggaattatgagcatgacacatccacttacatggcattgatacattgtttggaagtagtggagcagtatggtgagatgtggaagatgatccaagaaatggtacggaatcccatttgtgttgttaccccaacagaactttcagatgtagttcgaatgctggggaatgctaagatggtcagacaggcaattacaatcttctaccagatcaaaacgcggaagtgtcagccaattgcacaggcatataacagcatgataataatgttgatgcatgagggccaatatgagaaagtccatcaactatacaatgagatgagcactgagggtcattgcttcccagacactgtgacatatagtgcattgatttccgccttttgcaaattaggtcgacgtgattcagcaattcagttgttgaatgagatgaaggagatcggtatgcagccaactactaagatatatacaatgttaatagctttgttcttcaaattcaatgatgctcatggagcattgagtttgtttgaagaaatgaggcatcagtattgccgaccggatgtgtttacttacacagagctaatcagaggccttggtaaagctggtagaatagatgaagcatatcacttcttctgtgaaatgcagcgagaaggctgcaggccagacacagtttttatgaataatatgataaatttcttaggcaaggctggccgtttggatgatgctatgaagctgtttcaggagatggaaacattgaggtgcattcctagtgtggtgacatacaatactatcataaaagcactttttgaatcaaaatctcgtgcttctgaggttccatcttggtttgagagaatgaaggaaagtggaatatccccaagttcgttcacctattctatccttattgatggattctgcaaaaccaacaggatggagaaggccatgatgctactggaagagatggatgaaaagggtttccctccatgtccagcggcatattgtagcctgattgatgctcttggaaaagctaagcgttatgatcttgcttgcgagctttttcaggaactaaaggaaaattgtggctcgtctagtgctcgggtatacgcagttatgattaaacacttaggaaaggctggacggcttgatgatgctataaatatgtttgacgaaatgaacaaacttggttgtgctcctgatgtttatgcgtacaatgctctcatgtctggattagcaagaacaggcatgcttgatgaagctcttagtacgatgagaagaatgcaagagcatgggtgtattcctgatatcaattcatacaatattatccttaatgggctggcaaaaacgggaggacctcaccgtgcaatggaaatgctttctaacatgaaacaatctacagtaagacctgatgtagtctcgtataatactgtccttggtgccttgagtcatgctggcatgtttgaggaggcatcaaagctgatgaaagagatgaatacactggggtttgagtacgatcttattacatattcatctatacttgaggctattggaaaggttgatcatgaatatactgaccaaggttgatcatgaatgtgaccctcaaagttggaggcgtatcatgtgcaatcactcatttggtgcaagcatgcgatcaaaccatccagagcatccaatctagatccagcggtttcatatggaagagattaaaccaaaaatgggtactaggtttcagtaaatgtaaatagccgtcaccattggattttgattagatgcactacatcaatatgattgattgcactgtatatcttcccctcaaggttcgtgaggatcatcgtgtattttgaagagtgaaaggtgatattcatgttggtgctgtcctgaatgtgacacggcttgcaaaagaaagaaaagagaagaaaaggtttctttatgaccactcagacacccagcaatattcttacttcgatcacactggcttgatcaagtcactgctaccgacatggtgcttgggattttgtagctggaataatgctggaccgccctgcctgatgtgtaatcatgcacgtaaatgctatcagtcgtgcagggactcttgtagtacaactttgtggatcagggtgaccatgtaaagaacacacggtacctgtgtcaattcatgttttctgttgaggtttcagcttttaattaaggtaaactagtgtagtgtctggctaaactttgtccttgttcttgacgaatgatgtaactctgatcgctttttacatgtttccatcttccaagaacgtgcacatatttccttattattaaagccagatggaaacggtgcctcagagcctatccacgtcgctccaaaatttcgtagccgttagatttgtctttaacgcttaggatttcagacgttaggatttcagacgttggttttcctggcgtttgaatcttct

SEQ ID NO: 5074 - DNA, 4468 bp, Zea Mays
cgccttgccaccgcagccgcatcgcccgcgctccggcgcttctcgcaccacagcgtccctatagggaacagtgccaggtgtagaagagctaagaagcggtcttgctcttgctggagacgctccggcagctgtggatatagcgcatccgtggccgcagtgggttgcgctgatggaactcctcctccgtcggggccatgttgacccctccgccttcgccgccgcctcgctgtcttctaagcatgccaacgctgtccgcaccgcctgcctccgattcgggcgccagcgaccggagctcatccggtgaggtagccgtggtcggagtagtcgttttgggcttggtttcctgacctgggttggtgatcacattgatggcaatatctctgttggggctatgattttagctgaaacctaggtgtttgttgaaatgtgctagccattcgcgttacttttgtttttctttcaggcactccacctgtgcatgtaaaggtagttgcgtcattgcgtatttaccataaaggtagttgcggttgttgcaatattttggctaattgcatgtgtcggactttaatagcaactcgcggagcaaagcttgcctagtactagtagtaaccatttttggggataccgtacagcaactcttagatgtgacacatctaagagtagtactgctttggtttgttttcatgtgtgcgattacaaagcattgtttcagcaactcttagatgtgaaatcgcacacatcatgtgtgcgattacaaagcattgtttcagcacgtagagtagtactgctttggtttgttttcatgagtctcaacttttgactaaatgacttggacgctggaagcaagttgaaagtcttttgttgcaggcatatatcaagatgtgatattcaggttgccctacgatgtggttgtcccagcattgacaggaaggttgtaaactctgggaagcgactgcgggcttatgtagggcttgttgaaggagagcttgcaaagaagcttcatccagacacgaataaaggtgatgcggatgcagaaccgaagtttcaagaggttcagcgagcttatgagttctttaggaacattttcagggatagggattttggaagccatgatattaaggttgcacttgaactatcatttatggaagcagttcaaggatgcagcaaaacgatcaacttccaaacgtctgtcacgtgcgaaacctgcaatggagccggcgtgcctcctggaaccaaacctgaaacatgtctagcttgcaggggttcaggatttgttagttcttcatcacattgcttttgtctatccagtttaactagtattcttatttgtgttagtttttaaaaatattgttgacagatgttcatgcaaactggacccttcaggatgcaatcaacttgcacaaaatgtggtggttctgggaagactgtgaaggatttctgccggttcctcgggcgggcctcgcctggtcgccccgttatgtgtagccagtggctgcctgcttctccctcctcaaggcgcagcgtagcacagcggctgcgttgctggcggccaaagatgatggcgcgtcgcgatgtacaacttctggtggcacgggggatctcctcatcaccgcgcctttctcggaggatcaaccaaacggaaagtgaaattgttcgaatgtttcatcctccaattcgtaagagtgaggaagcaatagcaaccattgcgccaagatacacacattctgtgcgtgtcttggatgagaggttcattaggatcctgaagatattcaagtggggccctgatgctgagaaggcgctggaggttctcatgcttagagttgatcactggttggtacgagaggttatgaaaactgacgttggggtcaatgtgaagatgcagttcttcagatgggctgcaaagcggaggaattatgagcatgacacatccacttacatggcattgatacattgtttggaagtagtggagcagtatggtgagatgtggaagatgatccaagaaatggtacggaatcccatttgtgttgttaccccaacagaactttcagatgtagttcgaatgctggggaatgctaagatggtcagacaggcaattacaatcttctaccagatcaaaacgcggaagtgtcagccaattgcacaggcatataacagcatgataataatgttgatgcatgagggccaatatgagaaagtccatcaactatacaatgagatgagcactgagggtcattgcttcccagacactgtgacatatagtgcattgatttccgccttttgcaaattaggtcgacgtgattcagcaattcagttgttgaatgagatgaaggagatcggtatgcagccaactactaagatatatacaatgttaatagctttgttcttcaaattcaatgatgctcatggagcattgagtttgtttgaagaaatgaggcatcagtattgccgaccggatgtgtttacttacacagagctaatcagaggccttggtaaagctggtagaatagatgaagcatatcacttcttctgtgaaatgcagcgagaaggctgcaggccagacacagtttttatgaataatatgataaatttcttaggcaaggctggccgtttggatgatgctatgaagctgtttcaggagatggaaacattgaggtgcattcctagtgtggtgacatacaatactatcataaaagcactttttgaatcaaaatctcgtgcttctgaggttccatcttggtttgagagaatgaaggaaagtggaatatccccaagttcgttcacctattctatccttattgatggattctgcaaaaccaacaggatggagaaggccatgatgctactggaagagatggatgaaaagggtttccctccatgtccagcggcatattgtagcctgattgatgctcttggaaaagctaagcgttatgatcttgcttgcgagctttttcaggaactaaaggaaaattgtggctcgtctagtgctcgggtatacgcagttatgattaaacacttaggaaaggctggacggcttgatgatgctataaatatgtttgacgaaatgaacaaacttggttgtgctcctgatgtttatgcgtacaatgctctcatgtctggattagcaagaacaggcatgcttgatgaagctcttagtacgatgagaagaatgcaagagcatgggtgtattcctgatatcaattcatacaatattatccttaatgggctggcaaaaacgggaggacctcaccgtgcaatggaaatgctttctaacatgaaacaatctacagtaagacctgatgtagtctcgtataatactgtccttggtgccttgagtcatgctggcatgtttgaggaggcatcaaagctgatgaaagagatgaatacactggggtttgagtacgatcttattacatattcatctatacttgaggctattggaaaggttgatcatgaatatactgaccaaggttgatcatgaatgtgaccctcaaagttggaggcgtatcatgtgcaatcactcatttggtgcaagcatgcgatcaaaccatccagagcatccaatctagatccagcggtttcatatggaagagattaaaccaaaaatgggtactaggtttcagtaaatgtaaatagccgtcaccattggattttgattagatgcactacatcaatatgattgattgcactgtatatcttcccctcaaggttcgtgaggatcatcgtgtattttgaagagtgaaaggtgatattcatgttggtgctgtcctgaatgtgacacgggtaatttggtgcattttccaacaatctgttcattttgcaccctaagaatatagttaaaacgatgaagtgtccatatggtgctaaccacctttccatagtgctatgatgtgaacttcattctgatacatgaatacatcagcttgcaaaagaaagaaaagagaagaaaaggtttctttatgaccactcagacacccagcaatattcttacttcgatcacactggcttgatcaagtcactgctaccgacatggtgcttgggattttgtagctggaataatgctggaccgccctgcctgatgtgtaatcatgcacgtaaatgctatcagtcgtgcagggactcttgtagtacaactttgtggatcagggtgaccatgtaaagaacacacggtacctgtgtcaattcatgttttctgttgaggtttcagcttttaattaaggtaaactagtgtagtgtctggctaaactttgtccttgttcttgacgaatgatgtaactctgatcgctttttacatgtttccatcttccaagaacgtgcacatatttccttattattaaagccagatggaaacggtgcctcagagcctatccacgtcgctccaaaatttcgtagccgttagatttgtctttaacgcttaggatttcagacgttaggatttcagacgttggttttcctggcgtttgaatcttct

SEQ ID NO: 5075 - DNA, 1125 bp, Zea Mays
gaccctgtctctctgttgtatcctttcccctgtctctgcagcagagcagttcctttcttgttgtcttgctctactccccagtccccagaccccagtcccccactcggacctggggggcatcgcaccgaggacgacctcacgctggggcgggccttgggtgcagcggctcgaagctggaggaagcggacgggttcgccatggggtccgagggatcctcgggtccagttgtcgttcccagaaactttaggctgctagaagaactagaacgtggtgagaagggcattggtgatggaactgtgagctatgggatggacgatgctgatgacatatttatgcggtcctggacaggaactatcattggtcctcccaacactgttcacgagggacgaatctatcagttaaagctgttttgtgatacagattatccagataaaccaccgactgtccgattccagactcggatcaatatgacatgtgtgaaccaagaaactggattggttgaaccaagtctatttcctatgcttggaaagtgggaaagggaacatacgatggaggacattctgaccagcttaaaaagggagatgtcaactccacagaatcgcaggctgtaccaacctcatgaaggcaatgaagaccaaagagtagagcagaaaggggtgtctcttagatgtgtcatcatgtaatctatgtgcgttgcaatgtacagcattattgaattgagcagcgagatgccgaggtgagagaccctctcaggaaatcatgtggttcgccttaatgttaatggtgccaccatcgcaataaaagcgtcgatgattgttaaagtgcctgcacaccatgtaacgtgtaacccagttcgttcagattctgtgaaagacaacgagttcagtgtctgtttgttaagggctggctctaggcctggttattttctcgaggaaacaccgtgctctttcgaccatgcgtaacgaattgtaccgattctgaacaagtcgcgaaaggctgataaagtaccagagacacgcacgcatcaccttgagaagtcgggatgagctgagttaggcttgttcgtttgtgccggattggtggatcggaacgatttttatctagattgtttctttaatttatata

SEQ ID NO: 5076 - DNA, 1050 bp, Zea Mays
gaccctgtctctctgttgtatcctttcccctgtctctgcagcagagcagttcctttcttgttgtcttgctctactccccagtccccagaccccagtcccccactcggacctggggggcatcgcaccgaggacgacctcacgctggggcgggccttgttcccagaaactttaggctgctagaagaactagaacgtggtgagaagggcattggtgatggaactgtgagctatgggatggacgatgctgatgacatatttatgcggtcctggacaggaactatcattggtcctcccaacactgttcacgagggacgaatctatcagttaaagctgttttgtgatacagattatccagataaaccaccgactgtccgattccagactcggatcaatatgacatgtgtgaaccaagaaactggattggttgaaccaagtctatttcctatgcttggaaagtgggaaagggaacatacgatggaggacattctgaccagcttaaaaagggagatgtcaactccacagaatcgcaggctgtaccaacctcatgaaggcaatgaagaccaaagagtagagcagaaaggggtgtctcttagatgtgtcatcatgtaatctatgtgcgttgcaatgtacagcattattgaattgagcagcgagatgccgaggtgagagaccctctcaggaaatcatgtggttcgccttaatgttaatggtgccaccatcgcaataaaagcgtcgatgattgttaaagtgcctgcacaccatgtaacgtgtaacccagttcgttcagattctgtgaaagacaacgagttcagtgtctgtttgttaagggctggctctaggcctggttattttctcgaggaaacaccgtgctctttcgaccatgcgtaacgaattgtaccgattctgaacaagtcgcgaaaggctgataaagtaccagagacacgcacgcatcaccttgagaagtcgggatgagctgagttaggcttgttcgtttgtgccggattggtggatcggaacgatttttatctagattgtttctttaatttatata

SEQ ID NO: 5077 - DNA, 1160 bp, Zea Mays
gaccctgtctctctgttgtatcctttcccctgtctctgcagcagagcagttcctttcttgttgtcttgctctactccccagtccccagaccccagtcccccactcggacctggggggcatcgcaccgaggacgacctcacgctggggcgggccttggtatattccttctcctccctgctcggtttagcacgcccgcttccagcacgcatcctcccctcctcccgtctcaagggatagcagggtgcagcggctcgaagctggaggaagcggacgggttcgccatggggtccgagggatcctcgggtccagttgtcgttcccagaaactttaggctgctagaagaactagaacgtggtgagaagggcattggtgatggaactgtgagctatgggatggacgatgctgatgacatatttatgcggtcctggacaggaactatcattggtcctcccaacattatccagataaaccaccgactgtccgattccagactcggatcaatatgacatgtgtgaaccaagaaactggattggttgaaccaagtctatttcctatgcttggaaagtgggaaagggaacatacgatggaggacattctgaccagcttaaaaagggagatgtcaactccacagaatcgcaggctgtaccaacctcatgaaggcaatgaagaccaaagagtagagcagaaaggggtgtctcttagatgtgtcatcatgtaatctatgtgcgttgcaatgtacagcattattgaattgagcagcgagatgccgaggtgagagaccctctcaggaaatcatgtggttcgccttaatgttaatggtgccaccatcgcaataaaagcgtcgatgattgttaaagtgcctgcacaccatgtaacgtgtaacccagttcgttcagattctgtgaaagacaacgagttcagtgtctgtttgttaagggctggctctaggcctggttattttctcgaggaaacaccgtgctctttcgaccatgcgtaacgaattgtaccgattctgaacaagtcgcgaaaggctgataaagtaccagagacacgcacgcatcaccttgagaagtcgggatgagctgagttaggcttgttcgtttgtgccggattggtggatcggaacgatttttatctagattgtttctttaatttatata

SEQ ID NO: 5078 - DNA, 932 bp, Zea Mays
ctccctccagcctctctctcccctgcctgcttttcactccactgtcccacgccgcctcccgcttccccctcgcgctcgctggcggcttaagcatctaccggcgcccgcttccccctcgcgctcgctgcggcctgcttgctgcatgtcaccgtgggaggcgagattagccgatctggtgttcttgccactcggagaggtggttctggggaggcgtaggaggtacctcgttgtcgacacaccaccaagcccctcggatctccttcgtccccaccaccgtcaccgacacacggctccaggttcaggcctcatcctaatggatgcttcggggcgatttggatggtgacctctgctttattacttgggatgacaaactgattccaaagaaggtcgatcctatggactactgcaatgaggtcacacataatggaccatgctgttacactagagatgcggtgtcgtgtttgctatttttaggcttcagaagaagagaaaactccttcagattaccagaagacaggagagaaatgtttgagttgcttctgcatagattaagaacgaagtcgatcatggaggcaatggatgcactaccgagtatctttggagcttgccggttgaagaacaggccccactgcaaatcaacatctatgagcttagttttttagatatttcttttgtctcataggttaatccacaatcggtggcatgttgttgtttgttacttagaatttgagtcctctttgtgtaatgttctggagatatatgatcacaacatgaatggagatatatgatcacaacatgaatgaacttgaggaaagtgattaggaggcaatagaaggtattatatctaacaatggttattttactttagctggattgtttaggacactaaataatttcaagtgtatttgaaaaggttggttttttgcctttac

SEQ ID NO: 5079 - DNA, 905 bp, Zea Mays
ctccctccagcctctctctcccctgcctgcttttcactccactgtcccacgccgcctcccgcttccccctcgcgctcgctggcggcttaagcatctaccggcgcccgcttccccctcgcgctcgctgcggcctgcttgctgcatgtcaccgtgggaggcgagattagccgatctggtgttcttgccactcggagaggtggttctggggaggcgtaggaggtacctcgttgtcgacacaccaccaagcccctcggatctccttcgtccccaccaccgtcaccgacacacggctccaggttcaggcctcatcctaatggatgcttcggggcgatttggatggtgacctctgctttattacttgggatgacaaactgattccaaagaaggtcgatcctatggactactgcaatgaggtcacacataatggaccatgctgttacactagaggcttcagaagaagagaaaactccttcagattaccagaagacaggagagaaatgtttgagttgcttctgcatagattaagaacgaagtcgatcatggaggcaatggatgcactaccgagtatctttggagcttgccggttgaagaacaggccccactgcaaatcaacatctatgagcttagttttttagatatttcttttgtctcataggttaatccacaatcggtggcatgttgttgtttgttacttagaatttgagtcctctttgtgtaatgttctggagatatatgatcacaacatgaatggagatatatgatcacaacatgaatgaacttgaggaaagtgattaggaggcaatagaaggtattatatctaacaatggttattttactttagctggattgtttaggacactaaataatttcaagtgtatttgaaaaggttggttttttgcctttac

SEQ ID NO: 5080 - DNA, 1005 bp, Zea Mays
ccagcctctctctcccctgcctgcttttcactccactgtcccacgccgcctcccgcttccccctcgcgctcgctggcggcttaagcatctaccggcgcccgcttccccctcgcgctcgctgcggcctgcttgctgcatgtcaccgtgggaggcgagattagccgatctggtgttcttgccactcggagaggtggttctggggaggcgtaggaggtacctcgttgtcgacacaccaccaagcccctcggatctccttcgtccccaccaccgtcaccgacacacggctccaggcctcatcctaatggatgcttcggggcgatttggatggtgacctctgctttattacttgggatgacaaactgattccaaagaaggtcgatcctatggactactgcaatgaggtcacacataatggaccatgctgttacactagagatgcggtgtcgtgtttgctatttttaggtgatgtatatgttcaagaaaaaaacatggaattgagtgtggaatagcagtagtcttctcattggaataccttcttccttttcaggcttcagaagaagagaaaactccttcagattaccagaagacaggagagaaatgtttgagttgcttctgcatagattaagaacgaagtcgatcatggaggcaatggatgcactaccgagtatctttggagcttgccggttgaagaacaggccccactgcaaatcaacatctatgagcttagttttttagatatttcttttgtctcataggttaatccacaatcggtggcatgttgttgtttgttacttagaatttgagtcctctttgtgtaatgttctggagatatatgatcacaacatgaatggagatatatgatcacaacatgaatgaacttgaggaaagtgattaggaggcaatagaaggtattatatctaacaatggttattttactttagctggattgtttaggacactaaataatttcaagtgtatttgaaaaggttggttttttgcctttac

SEQ ID NO: 5081 - DNA, 844 bp, Zea Mays
tgtatggatgagccgagagtggcttgttcagtgcattggcaagttgaaattggtgaatggagcgcctgaaatcgttcggcccatagaagagctaatttcttgctgtcagtttcgacgacctctgaaactttttcagcctgcttctccataaaattgggagggaaatcaagtgaaaccgagagtccaaaaaagaggtttctcgggctctctttagttctcccctctcccacgaaaataagaggcctcatcctaatggatgcttcggggcgatttggatggtgacctctgctttattacttgggatgacaaactgattccaaagaaggtcgatcctatggactactgcaatgaggtcacacataatggaccatgctgttacactagaggcttcagaagaagagaaaactccttcagattaccagaagacaggagagaaatgtttgagttgcttctgcatagattaagaacgaagtcgatcatggaggcaatggatgcactaccgagtatctttggagcttgccggttgaagaacaggccccactgcaaatcaacatctatgagcttagttttttagatatttcttttgtctcataggttaatccacaatcggtggcatgttgttgtttgttacttagaatttgagtcctctttgtgtaatgttctggagatatatgatcacaacatgaatggagatatatgatcacaacatgaatgaacttgaggaaagtgattaggaggcaatagaaggtattatatctaacaatggttattttactttagctggattgtttaggacactaaataatttcaagtgtatttgaaaaggttggttttttgcctttac

SEQ ID NO: 5082 - DNA, 923 bp, Zea Mays
gttcagtgcattggcaagttgaaattggtgaatggagcgcctgaaatcgttcggcccatagaagagctaatttcttgctgtcagtttcgacgacctctgaaaccctgcttctccataaaattgggagggaaatcaagtgaaaccgagagtccaaaaaagaggtttctcgggctctctttagttctcccctctcccacgaaaataagaggcctcatcctaatggatgcttcggggcgatttggatggtgacctctgctttattacttgggatgacaaactgattccaaagaaggtcgatcctatggactactgcaatgaggtcacacataatggaccatgctgttacactagagatgcggtgtcgtgtttgctatttttaggtgatgtatatgttcaagaaaaaaacatggaattgagtgtggaatagcagtagtcttctcattggaataccttcttccttttcaggcttcagaagaagagaaaactccttcagattaccagaagacaggagagaaatgtttgagttgcttctgcatagattaagaacgaagtcgatcatggaggcaatggatgcactaccgagtatctttggagcttgccggttgaagaacaggccccactgcaaatcaacatctatgagcttagttttttagatatttcttttgtctcataggttaatccacaatcggtggcatgttgttgtttgttacttagaatttgagtcctctttgtgtaatgttctggagatatatgatcacaacatgaatggagatatatgatcacaacatgaatgaacttgaggaaagtgattaggaggcaatagaaggtattatatctaacaatggttattttactttagctggattgtttaggacactaaataatttcaagtgtatttgaaaaggttggttttttgcctttac

SEQ ID NO: 5083 - DNA, 2342 bp, Zea Mays
aaatcaccaaagaaatcactccagaattttgaaaaggtgacggaaatagtgaggagcggagaacaccggaatgatccatcctcttgtgctttccctgcccttccccgctataatatcgcgccctcgtcgccatcgtcaccacaccaccactccctcactgccctctcactcccgatccctgcaccactaccgcctcctccgcttcacccctctcgtcgcctcttgcggcgaccggcggcggatcgtccgcggcgcaagcgcaaccatggggctcttcaccgtgacgaagaaggttactgtattccagcagcctcattatctgcagaactttgtccagtcaacattcaatgcccttcctgcagaccaagtaaaaggtgcaaccattgttgtctctggtgatggccgctatttctcaaaagatgctgttcagatcataacaaaaatggctgctgccaatggagtaagacgtgtttgggttggacaaaacagtctcatgtctactcctgctgtatctgctgtcatccgtgaaagaattggtgcagatggatcaaaggctactggtgccttcatcttgacagcgagccataacccaggtggtcctacggaggactttggtatcaaatacaatatgggaaatggtggacctgcccctgaatccgttaccgacaagattttctctaatacaacgacaatctctgaatacctcatctctgaagaccttccagatgttgatatttctgttgtcggtgtcaccagcttcagtggacccgaaggcccctttgatgtggatgtctttgactctagtgtaaattacataaagttaatgaagacaatttttgacttcgaagcaataaaaaagctactgacctccccaaagtttacattctgttatgatgcgctccatggtgttgctggagcttatgccaaacacatctttgtggaagagcttggtgctgatgaaagctcactgttgaattgtgtcccaaaagaggactttggaggtggtcatccggatcctaacctcacctatgcaaaagagttggttgaacggatgggtcttggaaagtcatcctcaaatgttgaacctcctgaatttggtgctgcagctgatggagatgctgaccgcaacatgattctgggtaaaagattctttgtgacaccatcggactctgttgccattatagcggccaatgctgttcaatcaattccttactttgcttctggcctgaagggagttgccaggagcatgccaacatcagctgcccttgatgttgttgcaaagaatttgaatctcaagttctttgaggtgcctactgggtggaaattttttgggaatttgatggatgctggaatgtgctcaatctgtggtgaagaaagctttggcactgggtctgaccacattcgtgagaaagatggcatctgggctgtgcttgcatggctttctattattgctttcaagaataaggacaaccttggaggagataagcttgtcactgttgaagatattgtccgtcagcattgggccacatatggtcgccattattacacacgctatgactatgagaatgtcgatgctggggctgctaaggagctgatggcaaacctagtaagcatgcagtcatcactttctgatgttaacaagttgatcaaggagatccggtctgatgtttctgaagtagttgcagctgacgagtttgagtacaaggatccagttgatggctctgtgtccaagcaccagggcatccgatacctcttcggagatggttcacgactggtgttccgtctatccggaaccggttctgttggtgccaccatccgtgtctacatcgagcaatacgagaaggattcctccaagaccggcagggattcacaggaggcccttgctccactggttgatgttgcgctcaagctctccaagatgcaagagtacactggccgctctgcccccaccgttatcacataaatttttgaagagtgatttacaatgagttgaggcgcttacacaaattttcattcaagcctcttgttctatagttctacttcctgttgcatctcaccaatgaataaaatggaacctgggttatgattcgtcgattactgattaaccgttccctgtgtggttacgggctacggcaggggattgtgactgcttgagggttcggttagcttgtgtgctttgtaagggtgagtgtgtgtttgtgtttagagtgtgtgtttgtgttgtgtgtgttctgtttgtcctgggccataggtcctttttctctctactttaatttaatgatatgtagccctcctttgtattcggaaaaaaaaaatccacatggattgagtgagattgtgtg

SEQ ID NO: 5084 - DNA, 3061 bp, Zea Mays
acactagcgcggcatgccgctcgggctggccgctgccgctcccatcggccgacggctctcgaccgcggcccccacgccgctgtccagcctcaccgacgcgctcctcgccacccgcctcgctagccatctcctcaccacgccgcacctgcccgccgcgctgctgccgacggcgccgctgccgctacccgtccacctccacatcctccgccacccggcgctcccgccggcctccaagctctccttcttcctcgccgccacgccgcccgcctccccgcttcttgaatccaccttccccgtcctcctccgcgcgctcgccgcggggtccccgccgctcctcgacgcgctcctcccgttcgcgctctccgcgtccccgtccaccctcctccccgcactcctctcatttctcctctccgcttcgcgcctcgacgccgcgctctccctcttggactccgcgccgccagacctcctcccccgcctcgccgcagctgctctcccttccctcatagcctcccagaacctcagcgccgccgtccccgccatccgcaggctgcttcccatcgcctcgcacccaccacccgtccgggaaacgaaccgcctcctcctggcattatcgaaggagaacctctccgatgacttccgctatgtgttcgaagaaatgtcgaggaggggccttccttcgaatgtaaggttatacaacatttgcatccacgcgtttggcaagtggaggcagctggacatgtcgctggggcttttcgcagcaatgaaggccgccactcctccagttgagccggacatatgcacctataattcagtcatccgggcccttgttgttggtgggcgggtacctgatgctttggtgatctatgatgaaatgaaatcttctggaatcgagccagatgtattcacttatcgagcagtcatgaatgggtgctgcaagagttttcggatggatgatgcactgcgtgtgtttcatgagatgcggggcatcattggggtgagtgacgtggtggtgtacaattcacttcttgatgggctgtttaaagtgaagaagcttgatgaggcatgcagtttttttgagacaatggtggctgatggaatccaatgctcagcaagcacacacaacactgtgatagatgggctgtttaataatgggagggcagaagcagcatgtcggcttttttacgagctaaggaggaaagggcaactgttggatggaattgcttatagtatcatggtgagggagttctgcaaggaggggattggggaccaagttgcagaggctgtagagttggtgaaggagatggagcagcaaggcttcagtgttgatttggttacaataacatcattgttgataggttttaacaagagtaaacgctgggacttggaagagcaaatagtaaagtttataagggacagcactgtattgccggatgccattcggtggaaatcaaacatgatggttgccttgagaggacctcacggcagagagaaagatgggacaccattgttttcctttgatggcaatatggaggatgtgatgagtttggttaaccatgtgggacatacaggtactgatgaagaaatcccaaacagtgatcccaaggatgattggacactatcaccacacttggaccatcttgctaaacatgctgacagtttgaacagctctgttgtatttacaatgcacagagggcagagggtggaaggtatgggccccaagacttttgatgctgacatgatcaatacatacttgtcaatttttttagccaaagggaagttgagtgttgcttgcaagttatttgagatctttacgaatctaggaaacaaagggacaagttatacatacaattcactgatgacctcgtttgtcaagaagggctatttgaaacaggtgtgggcagttcttcatgagaggggtggacagctctgccctaatgatgtagcaacatataatctaatcattcaaggtctcggcctgatggggaaagcagatgttgctaggacaattattgatcggttgtcaaagaaaggtgtttacatggacattgtcatgtataacactttgatcagtcagttgggaaaggtcggaaaggttgaagaagcaggctgcttgtttgagcagatcatcagaagtggcatgaagccagatgttgttacttttaatacgttaattagtattaatgcgaaagctggtaggctaaaggaagctggcaaatatttgaggaggatgatcagagaaggcattgcaccaaaccatgccacagaaacaatattgattttccttgataaggagattgaaaagacaaggtagcagcacaaattagctggcaaaaaaaaaggaacgaaaacagtgtgatatctgttatttgtattaaccattacaaggattgtgatgattgatgctgaattttttattcctcagcgtacagaacagcatcacgctatcaggtatggacaaaaggtagcgaaatatatacgctatgcactagcatatttatcatgttcaaccaaaaaaatactgtatgagtagagggtcatgaatcattactatatgatgcacgacacatcgaaagaagagcgcgtcgacatacgccctcatgtaacagcaacaacacattcgtccgtgttcgtcaagctagttgttgattgacactgtaacaacaacaacaacagtgtctttacggtatccacatgtgcagaaataaaatgttgtgacgtgagtgtgctcgcatcacacatgcaacaagagaaacaacggtggtgtcttgggtgcccgcaaccttatagagagaggtgccaacgatggccctctctagcatgtcaacccttttgtatatataaactcctgctaatctactaatctaaaggctcattagtattcttttagatcatgattgcctcttcgacatatattcaacaatctctcatgtgtacaagagtcaatcatctatgtgactgttcttaccccttaagtgtacgatccattagccacccttgtaatagctcaacatttcacccgatcttctagtaaattacaacttgtgactaaatctttagtcat

SEQ ID NO: 5085 - DNA, 1812 bp, Zea Mays
cgacgcattaggctttaccggactccggacgcataacgagaggaaaacaaatcagaggaattcgacgagggcaccagccaccagcaccaccatggcggccgcctccaccgccaccgccgcctcgcactcagcctccttccccgcggcctccctccgccacgacgcgcgcaggccctcctgcgtagcccccgccgccgccgcggcgacgacggccgctgagacggggctcacggccgtcccggcgccgccgccgacgccgatgttgcgggtggtgccggagtcgctgcagcgggacagcgggtgcctcgtggcgggcttccgggagcgcggcgcgggcgcggcggatggggaagggttcggggacgccgtgggggaaggaggaggccccggtgcgatggagtacctcaccagcgtgctgtcgtccaaggtgtacgatgtggcaatcgagtcgccgctgcagctcgccaccaagctctccgatcgccttggggtcaacctctggatcaagcgcgaggacctgcagccggtattctcgttcaagttgcggggagcatacaacatgatggcaaagctctcccgtgagcagttagagaggggtgtcatctgctcctctgctggaaatcatgcccagggcgttgctctttccgctcagagactgggatgtgatgctgtcatcgtcatgcccgtgacaacaccagaaatcaagtggaaatcagtggagaggttgggtgcaacagtggtccttgagggggactcatatgatgaagctcagtcatatgcaaaattgcgttgccagcaggaaggccgcacatttgtacctccttttgaccatcctgatgtcatcactggacaaggaactatcggcatggaaattgttaggcagctgcaaggtccactgcatgcaatatttgtacctgttggaggtggtggattaattgctggaattgctgcctatgtaaaacgggttcgcccagaggtgaaaataattggagtggaaccctcagatgcaaatgcaatggcattatccttgtgtcatggtaagagggtcatgttggagcatgttggtgggtttgctgatggtgtagctgtcaaagctgttggggaagaaacatttcgcctgtgcagagagctagtagatggcattgttatggtcagtcgagatgctatttgtgcttcaataaaggatatgtttgaggagaaaagaagtatccttgaacctgctggtgcccttgcattggctggggctgaagcctactgcaaatactataacttgaaaggagaaactgtggttgcaataactagtggggcaaatatgaactttgatcgacttagactagtaaccgagctagctgatgttggccgaaaacgggaagcagtgttagctacatttctgccagagcggcagggaagcttcaaaaaattcacagaattggttggcaggatgaatattactgaattcaaatacagatacgattctaatgcaaaagatgcccttgttctttacagtgttggcatctacactgacaatgagcttggagcaatgatggatcgcatggaatctgcgaaactgaggactgttaaccttactgacaatgatttggcaaaggaccaccttagatactttattggaggaagatcagaaataaaagatgaactggtttaccggttcattttcccggaaaggcctggggcccttatgaaatttttggacacgtttagtcctcgttggaacatcagccttttccattaccgtgcacaggcctaatttactagcacaatttgcgacgaggagtcagacgatgatggagaaag

SEQ ID NO: 5086 - DNA, 2379 bp, Zea Mays
cgacgcattaggctttaccggactccggacgcataacgagaggaaaacaaatcagaggaattcgacgagggcaccagccaccagcaccaccatggcggccgcctccaccgccaccgccgcctcgcactcagcctccttccccgcggcctccctccgccacgacgcgcgcaggccctcctgcgtagcccccgccgccgccgcggcgacgacggccgctgagacggggctcacggccgtcccggcgccgccgccgacgccgatgttgcgggtggtgccggagtcgctgcagcgggacagcgggtgcctcgtggcgggcttccgggagcgcggcgcgggcgcggcggatggggaagggttcggggacgccgtgggggaaggaggaggccccggtgcgatggagtacctcaccagcgtgctgtcgtccaaggtgtacgatgtggcaatcgagtcgccgctgcagctcgccaccaagctctccgatcgccttggggtcaacctctggatcaagcgcgaggacctgcagccggtattctcgttcaagttgcggggagcatacaacatgatggcaaagctctcccgtgagcagttagagaggggtgtcatctgctcctctgctggaaatcatgcccagggcgttgctctttccgctcagagactgggatgtgatgctgtcatcgtcatgcccgtgacaacaccagaaatcaagtggaaatcagtggagaggttgggtgcaacagtggtccttgagggggactcatatgatgaagctcagtcatatgcaaaattgcgttgccagcaggaaggccgcacatttgtacctccttttgaccatcctgatgtcatcactggacaaggaactatcggcatggaaattgttaggcagctgcaaggtccactgcatgcaatatttgtacctgttggaggtggtggattaattgctggaattgctgcctatgtaaaacgggttcgcccagaggtgaaaataattggagtggaaccctcagatgcaaatgcaatggcattatccttgtgtcatggtaagagggtcatgttggagcatgttggtgggtttgctgatggtgtagctgtcaaagctgttggggaagaaacatttcgcctgtgcagagagctagtagatggcattgttatggtcagtcgagatgctatttgtgcttcaataaaggatatgtttgaggagaaaagaagtatccttgaacctgctggtgcccttgcattggctggggctgaagcctactgcaaatactataacttgaaaggagaaactgtggttgcaataactagtggggcaaatatgaactttgatcgacttagactagtaaccgagctagctgatgttggccgaaaacgggaagcagtgttagctacatttctgccagagcggcagggaagcttcaaaaaattcacagaattggtatgccatatgaggttggcaggatgaatattactgaattcaaatacagatacgattctaatgcaaaagatgcccttgttctttacagtgttggcatctacactgacaatgagcttggagcaatgatggatcgcatggaatctgcgaaactgaggactgttaaccttactgacaatgatttggcaaaggaccaccttagatactttattggaggaagatcagaaataaaagatgaactggtttaccggttcattttcccggaaaggcctggggcccttatgaaatttttggacacgtttagtcctcgttggaacatcagccttttccattaccgtgcacagggtgaagctggagcaaatgtattagttggtatacaagtgccgccagcagaatttgatgaattcaagagtcatgccaacaatcttgggtacgagtacatgtcagagcacaacaatgagatataccggttgctgttgcgtgacccaaaggtctaatgtatatgcctttgctcccataataagttggtgacacttttcaaggaagattttgctccaaggtagaagttgcgagtttcttcaagttgaaatgaagccatcaccaaatgtagcttcggtgtgccatctgtttactcagttagatcatgtagtgtatcagttgtgtatctttgttgttgtgcttcgtgatctcaatttattgctttgtgcacctagaggttgtcaaataatgataaccgatatgttatctaaatatctaataatgattatgtgattgtgatttgggccgcatcactgctgtaaagtgtaaacccttgtctctgcaacatgagttatcaacaaatttaagatttgaatgttctttctttgaattgtgtgtataacaagagtgtcaactaaaaaatagataaaggcgtgtttaacctcatttgcggttttgtgccgtttgctgtt

SEQ ID NO: 5087 - DNA, 2366 bp, Zea Mays
acccgcacagattcggctcaacaggcaacagcaccagcgctcgaacgccgcgtccaggcaacccatccttccgaccccgagcggtcggtacctcgcaagcaaaactacaagctcgcttttaaattctgttgctgcaattatctcctctgtttcccactcgtagatcccgccgcctcccgcgtctagccgtcgacgagcaccgcagcctgacacagccgcgggcgaaccatcgcgtgcggcctcgcccgggatggcgaccatggagagcctgatcgggctggtgaaccgtatccagcgcgcgtgcaccgtcctcggcgaccacggcggcggcggcggcgagggctccctctgggaggcactcccctccgtcgctgtcgttggtgggcagagttccgggaagtcgtcggtgctcgagagcatagtggggagggacttcctgccccgtggatctggcattgtcacgaggcggcctttagtgctgcagctccacaagacagatggtgggcacgagtatgctgagttcctccacgccccgcggaagcgtttcaccgactttgctgctgtgaggaaagagattgctgatgaaacagatcgcataactgggaaaactaaagctatttcaaacgttcccatccatttgagtatatattcaccacatgttgttaacttgacacttatcgatcttcctggactgacaaaggtcgctgtagaggggcaaccggaatctattgttcaagatattgaaaacatggttcgagcttatgttgacaagccaaattgcatcatcttggctatctccccagctaaccaagatattgcaacgtcagatgctatcaagcttgctagggatgttgatccttcaggacttttggagtcttaacaaagcttgatttaatggacaagggtaccaatgctgttgatgtgcttgaagggaggcaatatcgcttacaacacccgtgggttggaattgtcaatcgctcacaagctgatatcaacaagaatgtcgatatgctctcagcaagacgcaaagaaaaagagtactttgagagtagtcctgaatatggtcacttggcacataaaatgggtgcagagtatcttgccaagcttctgtcacagcatttagaggctgtgatcagggcaaaaattccaagtattatagctatgattaacaaaacaattgatgaaatagaagcccagttggatcgacttggtaggccaattggaggtgacgctggggctcagttgtacacaatcttggatatgtgtcgggcatttgaccgtgtctttaaagagcacttagatggcgggcggccaggtggagatcggatttatggtgtctttgacaaccagttacctgcagcactgaaaaagcttccatttgaccggcatctttcaatgcaaaatgttcgcaaagttatttcagaggctgatggttaccagccccacttgattgcccctgagcaaggatacagaaggcttatagatagttctctaagctactttaagggtccagctgaagcatctgttgatgcggtccatttggtattgaaggagcttgttcggagatctattgcagcaacagaggaattgaagcgattcccaacacttcaatcagatatagctgctgctgcaaatgatagcttggaaagattccgtgaggatggacgaaagactgttcttcgtctagttgagatggaagccagctacctaacagtagagtttttccgtaaacttcctactgaaccagagaaagcagctgataagaacactccagtgagtgataggtatcaggacaatcatctcagaagaatcggatcgaatgtgtcatcttatattaacatggtctgtgagactctaaggaacacggttccgaaagccatcgtgcattgccaagtgaaagaagcaaaaagaaatttgcttaaccgtttctatgctcatgtgggaagcaaggagaagaaacagctgagcgcgatgttggatgaggaccccgctttgatggagaagagggatgccttggtcaagaggctagagctgtacaaatctgcaaggaatgagatcgactcggtcgcatggaaatgattggcttgtgacagctacatctggaatgtatgtaaaatgtacaaccgcagcagcacacgtgtgattgcagtagaatgttcaattcttttttacatttgaatttactctggaggccttgtacgcagttttcactcgagtctttgccggacatgcttatttggccgtcttggccttaacacgattgtgttatgcgtggatgatctggtctccggttgatataagagtgtatatgtattcttttgttgattttattactgccttgatgatatcaatagtttttaccacaa

SEQ ID NO: 5088 - DNA, 1894 bp, Zea Mays
gagaagcgttatgtgcattgtgcaaaaggaactaaattgtgactagttcgttaaataaataactgcctgccagttcatctgctgtgaggaaagagattgctgatgaaacagatcgcataactgggaaaactaaagctatttcaaacgttcccatccatttgagtatatattcaccacatgttgttaacttgacacttatcgatcttcctggactgacaaaggtcgctgtagaggggcaaccggaatctattgttcaagatattgaaaacatggttcgagcttatgttgacaagccaaattgcatcatcttggctatctccccagctaaccaagatattgcaacgtcagatgctatcaagcttgctagggatgttgatccttcaggtgacaggacttttggagtcttaacaaagcttgatttaatggacaagggtaccaatgctgttgatgtgcttgaagggaggcaatatcgcttacaacacccgtgggttggaattgtcaatcgctcacaagctgatatcaacaagaatgtcgatatgctctcagcaagacgcaaagaaaaagagtactttgagagtagtcctgaatatggtcacttggcacataaaatgggtgcagagtatcttgccaagcttctgtcacagcatttagaggctgtgatcagggcaaaaattccaagtattatagctatgattaacaaaacaattgatgaaatagaagcccagttggatcgacttggtaggccaattggaggtgacgctggggctcagttgtacacaatcttggatatgtgtcgggcatttgaccgtgtctttaaagagcacttagatggcgggcggccaggtggagatcggatttatggtgtctttgacaaccagttacctgcagcactgaaaaagcttccatttgaccggcatctttcaatgcaaaatgttcgcaaagttatttcagaggctgatggttaccagccccacttgattgcccctgagcaaggatacagaaggcttatagatagttctctaagctactttaagggtccagctgaagcatctgttgatgcggtccatttggtattgaaggagcttgttcggagatctattgcagcaacagaggaattgaagcgattcccaacacttcaatcagatatagctgctgctgcaaatgatagcttggaaagattccgtgaggatggacgaaagactgttcttcgtctagttgagatggaagccagctacctaacagtagagtttttccgtaaacttcctactgaaccagagaaagcagctgataagaacactccagtgagtgataggtatcaggacaatcatctcagaagaatcggatcgaatgtgtcatcttatattaacatggtctgtgagactctaaggaacacggttccgaaagccatcgtgcattgccaagtgaaagaagcaaaaagaaatttgcttaaccgtttctatgctcatgtgggaagcaaggagaagaaacagctgagcgcgatgttggatgaggaccccgctttgatggagaagagggatgccttggtcaagaggctagagctgtacaaatctgcaaggaatgagatcgactcggtcgcatggaaatgattggcttgtgacagctacatctggaatgtatgtaaaatgtacaaccgcagcagcacacgtgtgattgcagtagaatgttcaattcttttttacatttgaatttactctggaggccttgtacgcagttttcactcgagtctttgccggacatgcttatttggccgtcttggccttaacacgattgtgttatgcgtggatgatctggtctccggttgatataagagtgtatatgtattcttttgttgattttattactgccttgatgatatcaatagtttttaccacaa

SEQ ID NO: 5089 - DNA, 721 bp, Zea Mays
ctctcgtttgttttgggaactcaaaggagccaattgcattgggaaggcatttgcttgttgtcaaatgggtctggtcgaaagatgagtctcttggagttgtctgtctgtcaagattttctggtgtaatccttatttatttagtggcaggatgttggttgtgccgtggttgtgccgtgggacccttggatgccaaaacatgtagggttgatttggtgatcagagatcacgaggaatccatgggagatgaatccattgctattcaaattgaatagcaaggggattcctccccatggattcccttgtgattcctggtcaccaaaccagcccataaggaaaacaacattagctttgtggaggattcgtctgtttggtttggctgaggattttgtttcgaggctgaagtttctttttttggggcagtctaatggtgtactgtcctgattatgtatctgaaggtcctgaatcaatggttcggaaaacaacattagcttcaatggttgttggaacacgctgtaattttgcctgcctgcctttcatggttcggggaatgctattctgcagatgcatagccaaaattgacaattgacgaaggaaccgtatatgttcaacgtatcttcattcaatttcgcgactgtatatttgaaatctaaccatcatgattcatgcggttgcttctacgtaagatttggatcccgtggagataactagctgtcaaaattag

SEQ ID NO: 5090 - DNA, 2648 bp, Zea Mays
ctatctatgggtcgcttgatattctagcagtactatataaaagacaaacacttgtgtaatagggcatgaacaatttagctatcaaacatcagacaaactcgtctttctcccagatattcccttctccaagtctcattctcctctgagctcttcctctcctatccccctttccaggtgttgctaacatttggtatcagactaagaatcgatcttgatggagaccacgatgcaggatattctagacgcactggcgcgcatggaggcacgcttgaccgatgcactggtgggtcgctgcggcgagcagtacgcacgcgagcacacttcccccttcgatggatccgcgcctcctccttccatcttcaacacacagtaccgcgacgaggcaatccttccgcctctcgtccacgacgacgctgcgaaggtggcgtccttggattcaggaaacgactttggcctgcagcagaccgccacggtgcttgcgtacctggggtccgacgagatgccttcattgaccacgctcctcgccggctcggagctcgacgggttggacgaggacgccgcgagcgccaacgcggctgacgacgattcaggcgctgtccacgtccatgcgccgctcaaccccgacgcgacgctcgactcgaacgtcgacaccagtggatcaccgcgctacccgtgcctccccgagggcgcgacgttgttccgtcggaacccggataagaagatccacgatgggctcatcggcggcatcagccagcacatctggagcatcgtggacgaggtcgaacacacgacctcagggctggtccagacgctcatcgccgtcgacaggcacttcgacctcatcatcaaggcgaggatcaagcacttggatccgttacctccgctcgtccccaacaccgacgcagaggaggaggaggttctcacgaccacgtccaccaggtgttcgagaatgggcatcaaccgtggcgcatactccgtccccaacctcctcgtggtctgcatcgtgggcgcacccaaattcaacgaatacagcaccaaccgcgtcctgcaccgcacgcggctacagcgccctccgctctagcaactgatcgtcgaccctgtcagcgccgtccacggcggcgacgactatgagctgtcccacagcgaggcaggcagtgttctcgcgaccgccgcgcttcccaacccgcgcgagaagatccgttgtcagctcgtcaacaggacgaggctggcccgcgacgtccgcctcatcttctccctgacatcgtcgaaccaggtgctcagccttcacatgagcacacatgactttgactgcgccagcgtcgacaggaagtcctgcttgcgggcgtacacgctgacgagcatggaggacgaggttggccacttcggcctcgacgccaaggagtacatcctggacgagcactccaagttcctcaatggcgagctcatgaaccaactcctggacctgctccccctcgatccttacatcgaagctgctctatccccgatttcttctatcgtacagttggtggtgttggcagaggaggaggttatcaccaactcgcccaacaggtgtttgatgatttgcttcaacctcttacaaagatgtttcagctgggatgcagcaccacatcgtcagctttggccaccacctcatattcatgttgagttttggtgtggcagtgctgctctacgttcaattccatggccaccacccacttccttggatagtttgtatactaaagaattctattgtagagtgcaatttcctggatttggtagaacctttgtgttcaatgcagagattctaaaaagagttggacgtacatctgaagccaaagattcatctcgcgtggctctgaaatcatcatgggggacacttggctgcagtcatgaagaggctgctgaattagcttctttggtggatggatatcagttaatgcgtgcagcgtcagcatctgatcgggtgtcttcgctgaagaattatcaccacacactggggttatgcgaccattgggctgagaagaggtttaatggtcacaaatgtgtgcagttccacgccatcgaagaggtctgtgaatttttgtgtatggagggtagtccagaatagaaaccagactcaaatgaccagttgatattgacgctatattgtacagcgtggtcaggagcgcatgcggctgctacattttgtcttcgagattcgattcagcagcaagacgtattggtactgggtgatcaggcatcgtttatcaaggaaatcacggcaatcgtttgtcgagctggttcaggaattggtatggctgttggccttgtttcttctagtctatgtgctgtcactagtggccaaggcaatttcaaagtcttagtttgggatcccggtggttatgcatatcacagcttggggacaagctgtatttcaagcggtggggaatgtcagcatctcagacaggagcaatgagcatacagcgagaacaagtcacgggacacgagagtccgtcgtccaaacgctaaggttactgagacaatatgggccaagtagtgggtcagctatctatgggtcgcttgatattctagcagtaatatataaaagacaaacacttgtgtaatagggcatgaacaatttagctatcaaacatcagacaaactcgtct

SEQ ID NO: 5091 - DNA, 1964 bp, Zea Mays
gattttttacttgtcgtgggccgtgtccagtgggtgatcctgtctctgacggtctgacccgtcgcctccctctccccttgacgtgcgggtgcggctcctcctcgccgacggcgccagcgccgcctccctcgccctctcggcatagaccggcgacggtagctgcatcttcgagtccgcaggtgctgacttctcactcggcagcccccctccccgctcctcttcctcgcacgtcttcgcgttccaacggatgtgacatttcctcgcgaatccacggctcctcggatgggatggtaggtctggttgggctcgtcgttgtcccagcgcctaagagagcgtcctcctaattctatgcaataattttctttttaacgactgagagcctcgaatcctcctattattatgcaatagagttttttctgactgctccacgcgccgttccccttggaaatttcgaccgctttctcgatcgccacctacacgtctggtatcattccttcctcccgctcgcttcgcttccttgccctcgctgctaccccacgaaaattctcgaatccccccgaaccaaagggcggcagaggagtcgtgctccgtgaaaactagaagggaagaacagcctcctaatggataggaacaacgaactggaagaggtggtcccaaatgactcggaccctcttattgggagggagaacagggagtcagagtcatcggtagagctgtcaccgccacagccagcaactgtgaacctgctggagattgaggatgaagagaccgacggctcttctgctgcgtgctgccgcatttgccttgagaatgagtctgagataggtgatgagctaatatcaccttgcatgtgcaagggaactcagcagtttgttcaccgttcttgtcttgaccactggcgatctgttaaggaaggatttgcattttcacactgcacaacttgcaaagctcagtttcatcttcgagtggaaacctgggaggataactcatggcgtaaaatgaagttcaggatctttgttgcaagggatgttctactcgtgtttcttgctgtacagcttactattgctatcatcggtgcgattgcatactttttagacagggatggaagtttccggaacagttttagcgatggttgggaccgcttcttgtcaaagcacccaatacccttctactattgcataggtgttgtggttttctttgtgctgcttggattcttcgggctgatagtacactgctcatccttcaacgacaaccaggatccatgcctagctgggtgccggaactgctgctatggttggggcatcctagactgcctgcctgcttccctggaggcatgctttgccctggttttggttttcgtcgttgtgtttgccatccttggcatcgcctatggcttcctcgctgcaaccatggcggtccagaggatttggcagaggcactatcacatcctgaccaaaagggagttgacaaaggaatacgtggtggaagaccttcacggcaactacacagcgccgaagcttgatccggagcatgaggaacggctgaagatgctgaagcttctttagagagaaagaggtgcacgccttcctgtatccgtggcaagtgcatcaacatggggcaatcctctctgcgtgccagattagggaatggtcatcccataacactgtacaaaatgatgaaatcctgcttggacttgtatgaattctctatcagacgaaacaaacagaagttctcagttttaccttctcggtaaccttcctcgacaacttggtctccgaaagtgtacgtgttcttctttactctttcccctttttttacaattgaaagtttgttgtctgaattgatctagcgatttcaatgatttcaataccttttagcgtccgaagcgaagatctcttacaatgtgcggtttgtgtaagtactgtggtaatatgcattctcataccattctagtgcctttcgca

SEQ ID NO: 5092 - DNA, 1976 bp, Zea Mays
gattttttacttgtcgtgggccgtgtccagtgggtgatcctgtctctgacggtctgacccgtcgcctccctctccccttgacgtgcgggtgcggctcctcctcgccgacggcgccagcgccgcctccctcgccctctcggcatagaccggcgacggtagctgcatcttcgagtccgcaggtgctgacttctcactcggcagcccccctccccgctcctcttcctcgcacgtcttcgcgttccaacggatgtgacatttcctcgcgaatccacggctcctcggatgggatggtaggtctggttgggctcgtcgttgtcccagcgcctaagagagcgtcctcctaattctatgcaataattttctttttaacgactgagagcctcgaatcctcctattattatgcaatagagttttttctgactgctccacgcgccgttccccttggaaatttcgaccgctttctcgatcgccacctacacgtctggtatcattccttcctcccgctcgcttcgcttccttgccctcgctgctaccccacgaaaattctcgaatccccccgaaccaaagggcggcagaggagtcgtgctccggtgacgggcttgtgaaaactagaagggaagaacagcctcctaatggataggaacaacgaactggaagaggtggtcccaaatgactcggaccctcttattgggagggagaacagggagtcagagtcatcggtagagctgtcaccgccacagccagcaactgtgaacctgctggagattgaggatgaagagaccgacggctcttctgctgcgtgctgccgcatttgccttgagaatgagtctgagataggtgatgagctaatatcaccttgcatgtgcaagggaactcagcagtttgttcaccgttcttgtcttgaccactggcgatctgttaaggaaggatttgcattttcacactgcacaacttgcaaagctcagtttcatcttcgagtggaaacctgggaggataactcatggcgtaaaatgaagttcaggatctttgttgcaagggatgttctactcgtgtttcttgctgtacagcttactattgctatcatcggtgcgattgcatactttttagacagggatggaagtttccggaacagttttagcgatggttgggaccgcttcttgtcaaagcacccaatacccttctactattgcataggtgttgtggttttctttgtgctgcttggattcttcgggctgatagtacactgctcatccttcaacgacaaccaggatccatgcctagctgggtgccggaactgctgctatggttggggcatcctagactgcctgcctgcttccctggaggcatgctttgccctggttttggttttcgtcgttgtgtttgccatccttggcatcgcctatggcttcctcgctgcaaccatggcggtccagaggatttggcagaggcactatcacatcctgaccaaaagggagttgacaaaggaatacgtggtggaagaccttcacggcaactacacagcgccgaagcttgatccggagcatgaggaacggctgaagatgctgaagcttctttagagagaaagaggtgcacgccttcctgtatccgtggcaagtgcatcaacatggggcaatcctctctgcgtgccagattagggaatggtcatcccataacactgtacaaaatgatgaaatcctgcttggacttgtatgaattctctatcagacgaaacaaacagaagttctcagttttaccttctcggtaaccttcctcgacaacttggtctccgaaagtgtacgtgttcttctttactctttcccctttttttacaattgaaagtttgttgtctgaattgatctagcgatttcaatgatttcaataccttttagcgtccgaagcgaagatctcttacaatgtgcggtttgtgtaagtactgtggtaatatgcattctcataccattctagtgcctttcgca

SEQ ID NO: 5093 - DNA, 1858 bp, Zea Mays
gattttttacttgtcgtgggccgtgtccagtgggtgatcctgtctctgacggtctgacccgtcgcctccctctccccttgacgtgcgggtgcggctcctcctcgccgacggcgccagcgccgcctccctcgccctctcggcatagaccggcgacggtagctgcatcttcgagtccgcaggtgctgacttctcactcggcagcccccctccccgctcctcttcctcgcacgtcttcgcgttccaacggatgtgacatttcctcgcgaatccacggctcctcggatgggatggtaggtctggttgggctcgtcgttgtcccagcgcctaagagagcgtcctcctaattctatgcaataattttctttttaacgactgagagcctcgaatcctcctattattatgcaatagagttttttctgactgctccacgcgccgttccccttggaaatttcgaccgctttctcgatcgccacctacacgtctgtgaaaactagaagggaagaacagcctcctaatggataggaacaacgaactggaagaggtggtcccaaatgactcggaccctcttattgggagggagaacagggagtcagagtcatcggtagagctgtcaccgccacagccagcaactgtgaacctgctggagattgaggatgaagagaccgacggctcttctgctgcgtgctgccgcatttgccttgagaatgagtctgagataggtgatgagctaatatcaccttgcatgtgcaagggaactcagcagtttgttcaccgttcttgtcttgaccactggcgatctgttaaggaaggatttgcattttcacactgcacaacttgcaaagctcagtttcatcttcgagtggaaacctgggaggataactcatggcgtaaaatgaagttcaggatctttgttgcaagggatgttctactcgtgtttcttgctgtacagcttactattgctatcatcggtgcgattgcatactttttagacagggatggaagtttccggaacagttttagcgatggttgggaccgcttcttgtcaaagcacccaatacccttctactattgcataggtgttgtggttttctttgtgctgcttggattcttcgggctgatagtacactgctcatccttcaacgacaaccaggatccatgcctagctgggtgccggaactgctgctatggttggggcatcctagactgcctgcctgcttccctggaggcatgctttgccctggttttggttttcgtcgttgtgtttgccatccttggcatcgcctatggcttcctcgctgcaaccatggcggtccagaggatttggcagaggcactatcacatcctgaccaaaagggagttgacaaaggaatacgtggtggaagaccttcacggcaactacacagcgccgaagcttgatccggagcatgaggaacggctgaagatgctgaagcttctttagagagaaagaggtgcacgccttcctgtatccgtggcaagtgcatcaacatggggcaatcctctctgcgtgccagattagggaatggtcatcccataacactgtacaaaatgatgaaatcctgcttggacttgtatgaattctctatcagacgaaacaaacagaagttctcagttttaccttctcggtaaccttcctcgacaacttggtctccgaaagtgtacgtgttcttctttactctttcccctttttttacaattgaaagtttgttgtctgaattgatctagcgatttcaatgatttcaataccttttagcgtccgaagcgaagatctcttacaatgtgcggtttgtgtaagtactgtggtaatatgcattctcataccattctagtgcctttcgca

SEQ ID NO: 5094 - DNA, 1483 bp, Zea Mays
gctgacttctcactcggcagcccccctccccgctcctcttcctcgcacgtcttcgcgttccaacggatgtgacatttcctcgcgaatccacggctcctcggatgggatgtgaaaactagaagggaagaacagcctcctaatggataggaacaacgaactggaagaggtggtcccaaatgactcggaccctcttattgggagggagaacagggagtcagagtcatcggtagagctgtcaccgccacagccagcaactgtgaacctgctggagattgaggatgaagagaccgacggctcttctgctgcgtgctgccgcatttgccttgagaatgagtctgagataggtgatgagctaatatcaccttgcatgtgcaagggaactcagcagtttgttcaccgttcttgtcttgaccactggcgatctgttaaggaaggatttgcattttcacactgcacaacttgcaaagctcagtttcatcttcgagtggaaacctgggaggataactcatggcgtaaaatgaagttcaggatctttgttgcaagggatgttctactcgtgtttcttgctgtacagcttactattgctatcatcggtgcgattgcatactttttagacagggatggaagtttccggaacagttttagcgatggttgggaccgcttcttgtcaaagcacccaatacccttctactattgcataggtgttgtggttttctttgtgctgcttggattcttcgggctgatagtacactgctcatccttcaacgacaaccaggatccatgcctagctgggtgccggaactgctgctatggttggggcatcctagactgcctgcctgcttccctggaggcatgctttgccctggttttggttttcgtcgttgtgtttgccatccttggcatcgcctatggcttcctcgctgcaaccatggcggtccagaggatttggcagaggcactatcacatcctgaccaaaagggagttgacaaaggaatacgtggtggaagaccttcacggcaactacacagcgccgaagcttgatccggagcatgaggaacggctgaagatgctgaagcttctttagagagaaagaggtgcacgccttcctgtatccgtggcaagtgcatcaacatggggcaatcctctctgcgtgccagattagggaatggtcatcccataacactgtacaaaatgatgaaatcctgcttggacttgtatgaattctctatcagacgaaacaaacagaagttctcagttttaccttctcggtaaccttcctcgacaacttggtctccgaaagtgtacgtgttcttctttactctttcccctttttttacaattgaaagtttgttgtctgaattgatctagcgatttcaatgatttcaataccttttagcgtccgaagcgaagatctcttacaatgtgcggtttgtgtaagtactgtggtaatatgcattctcataccattctagtgcctttcgca

SEQ ID NO: 5095 - DNA, 1076 bp, Zea Mays
cttggctgccatttctgtgtcacgaaggatttgcattttcacactgcacaacttgcaaagctcagtttcatcttcgagtggaaacctgggaggataactcatggcgtaaaatgaagttcaggatctttgttgcaagggatgttctactcgtgtttcttgctgtacagcttactattgctatcatcggtgcgattgcatactttttagacagggatggaagtttccggaacagttttagcgatggttgggaccgcttcttgtcaaagcacccaatacccttctactattgcataggtgttgtggttttctttgtgctgcttggattcttcgggctgatagtacactgctcatccttcaacgacaaccaggatccatgcctagctgggtgccggaactgctgctatggttggggcatcctagactgcctgcctgcttccctggaggcatgctttgccctggttttggttttcgtcgttgtgtttgccatccttggcatcgcctatggcttcctcgctgcaaccatggcggtccagaggatttggcagaggcactatcacatcctgaccaaaagggagttgacaaaggaatacgtggtggaagaccttcacggcaactacacagcgccgaagcttgatccggagcatgaggaacggctgaagatgctgaagcttctttagagagaaagaggtgcacgccttcctgtatccgtggcaagtgcatcaacatggggcaatcctctctgcgtgccagattagggaatggtcatcccataacactgtacaaaatgatgaaatcctgcttggacttgtatgaattctctatcagacgaaacaaacagaagttctcagttttaccttctcggtaaccttcctcgacaacttggtctccgaaagtgtacgtgttcttctttactctttcccctttttttacaattgaaagtttgttgtctgaattgatctagcgatttcaatgatttcaataccttttagcgtccgaagcgaagatctcttacaatgtgcggtttgtgtaagtactgtggtaatatgcattctcataccattctagtgcctttcgca

SEQ ID NO: 5096 - DNA, 3701 bp, Zea Mays
tatctcgtgaaatccaggaaattcgattcactcgaagcccggctgctttctccccgtcgcgaaaagccgcaagccaacaaaaaacacacacacactgacacacacaccaaaataacacatcaaagcagcgggagaggagagctcggattctcgcggagaggaggcggcgtgggcgccggacggcggaagcagaggagtggtcggtcggtggcctgcggtgcagcgtatgtgagagctgctgcggcggcggggacctgccctggcccctgggatgggggtgggaggcggaggcggaggcggaggggaggccgcggcggtgtcggcgccggcgccggcggaggaggcggggaaggacgcggaggatggcagcgggtggaccttgaaggcgaagctgatcgccgtagcggtgctggtgtgggtgctgggggccttggcgctcggggtgttcctgcactcctacttccgccacgcggcgctgcgcaaggcggaggaggggctcgtcagcatgtgcgaggagcgcgcgcgcatgctgcaggaccagttcgccgtctccgtcaaccacgtccacgccctcgccatcctcgtcgccaccttccactacgagaagcgcccgcccgcgctcgaccagaacacgttcgcggactacaccgccaggacgtcgttcgagcggccgctgctgagcggggtggcgtacgcgcagcgggtggtgcacggcgacagggagagcttcgagcgccagcagggctggatcatcaagaccatgaagcacgagccgtccccggtgcaggatgagtacgcgccggtcgtctactcgcaggagaccgtctcctacattgaggggctcgacatgatgtccggcgaggaggaccgcgagaacattttgaggtcaagagcatcggggaaggcagttcttactagaccgttccggctcatgtcgaatcacctgggtgtcgtattgacttttcctgtctaccatgttgatctttcttctgatgccaaggaggaggatcgtgttgctgccaccgcaggataccttgggggatcatttgatgtagaatcattagtggaaaatttgttgaggcagctagctggcaatcaggaattggtggtaaatgtttatgatgtcacaaacagttcgaaccctcttgtcatatacagaaacaagcctcagctcccatggtctgcaatatcttcgtcatctggtgtatttgtcatatgtatgcttgtggggtacatcgtgggtgccgcttggagtcgttatgataatgttaaggaagattgccggaaaatggaggagctgaaaaaacaggcagaagcagccgatgttgctaaatctcagttccttgcaactgtttctcatgagatcagaacgcccatgaatggagttctagggatgcttgatatgctgttagacactgacctaacgtcgacccagagggattttgcacaaacagctcaagtctgtggaaaggctttaatatcactaatcaatgaagtgcttgacagagcgaaaattgaagccggaaagttggatcttgagtctgtaccatttgacctgagatccatccttgatgatgtcatctcattattttcttcaaagtcaagagagaagggaattgagcttgctgtatatgtctctgaaagagttcctgaactcttgttgggtgatcctggaaggtttcggcagataattacaaatttagtgggcaactcaattaagttcacagaacggggacatatttttgtacaagttcatctggcagatcactcaaatcttgcaacagaacccaaagttgagtcagtggctaacgggatgaatggacataaagatgagaaaactgctgtagcaaccagtgtttctctcaacacactaagtggttttgaagctgctgatagccgaaatagttgggaaaacttcaagcttttgctttcttatgagaaaaatgagatgccctatgaaagtgtatctgataaagttactcttgtagtaagtgtggaagatacagggataggtataccattggatgcccaagccaaggtgttcactcctttcatgcaggccgatagttcgacttccaggacatatggtggtactggaattggattgagcatcagcaaatgtctcgttgaactaatgggtggtcagataaactttgttagccgaccacatgttgggagtacattcacatttactgcagctctccaaagatgtgacagaagcgctattggtgacagtaagcctgttatgttgcaccctcttccatccagtttcaaaggtttatctgcattattggttgatagaagaccagtaagagctactgtaactaagtatcacttgcaaaggctgggaattgcctgcgatgttgttgctaccattgaattggctcttggtgtgctgtccgggagaaatggcagttctctaaccagcacgaagcaaccatgcatgttattgattgagagtgattcatggggcttcaagattgatgtacctttacgatctcgactcctggagatgaagcagaatggtccacctggattgcccaaaactatccttctcgcagctgcagaatcgggcaaactcaaagcacactatgcagttgattctgtgatcacgaagcctctgaaagcaagcggacttgccgcttgtctattccaaacacttggcatcacacagtcaagcaacgagagacgcgacaactcaggttcccttcatgggttgctccttggcaagaacatattggtggttgatgacaacaaggtaaatcttagagtggctgctggcacattaaagaaattcggagcgaaggtggagtgcgtggagagtgggaaagatgctctcgccagcctacaagttccacataagttccatctttgtctcatggacattcagatgcccgaaatggatgggttcgaggccaccaagcaaataagggcaatggaggcgaaggcaaatgagcaggcagtcgcctgtgatgattcagaaacggatggcgcgacaagggcggcgagatggcacctgcctgtccttgcaatgaccgccgatgtcatccaggccacccatgaggagtgcacgaagtacgggatggatgggtacgtcacgaagcccttcgaggagaagcagctcttccaggcgctgcagaagttcttggaccctggcatgtccagctaacacccaagtgctgcgttcgttgcaagtgaggcaccattctcctccgttctgtagttcgctaaccatagacgcaatctgattatctgaccccgaagaaagatcgtaaatggcgggctgctcgtcgaccatgccagcggggaacagcaggcagcacgcagcaggggcctttgctgcctgcctgtgcagtgcaggcgccgtgtaaatgtattgtattagcagggatcctgtttatagcgctagtatggacctgcgcgacaatgttggaggagctgcctgcggctgatgcacgtcgagcataattttgttgtacagcttccaccatttttgtgctactgtggcaggcatgctcgctggtgcagtgcaggactggaaggaaaacctgactgcctgagagtagtttttttttgccgtcaacattgcattgggattcgtgatgtattacaatctgctaatgtgcgatataagctcatgtaattggctcagtgcgtttccattgttacaaatatgaattaagatggcattggtaaatggt

SEQ ID NO: 5097 - DNA, 3686 bp, Zea Mays
tatctcgtgaaatccaggaaattcgattcactcgaagcccggctgctttctccccgtcgcgaaaagccgcaagccaacaaaaaacacacacacactgacacacacaccaaaataacacatcaaagcagcgggagaggagagctcggattctcgcggagaggaggcggcgtgggcgccggacggcggaagcagaggagtggtcggtcggtggcctgcggtgcagcgtatgtgagagctgctgcggcggcggggacctgccctggcccctgggatgggggtgggaggcggaggcggaggcggaggggaggccgcggcggtgtcggcgccggcgccggcggaggaggcggggaaggacgcggaggatggcagcgggtggaccttgaaggcgaagctgatcgccgtagcggtgctggtgtgggtgctgggggccttggcgctcggggtgttcctgcactcctacttccgccacgcggcgctgcgcaaggcggaggaggggctcgtcagcatgtgcgaggagcgcgcgcgcatgctgcaggaccagttcgccgtctccgtcaaccacgtccacgccctcgccatcctcgtcgccaccttccactacgagaagcgcccgcccgcgctcgaccagaacacgttcgcggactacaccgccaggacgtcgttcgagcggccgctgctgagcggggtggcgtacgcgcagcgggtggtgcacggcgacagggagagcttcgagcgccagcagggctggatcatcaagaccatgaagcacgagccgtccccggtgcaggatgagtacgcgccggtcgtctactcgcaggagaccgtctcctacattgaggggctcgacatgatgtccggcgaggaggaccgcgagaacattttgaggtcaagagcatcggggaaggcagttcttactagaccgttccggctcatgtcgaatcacctgggtgtcgtattgacttttcctgtctaccatgttgatctttcttctgatgccaaggaggaggatcgtgttgctgccaccgcaggttcgaaccctcttgtcatgtatggatcggaagtttctcttggcaacccctcaccatcgcacatctgcatgctagattttggcgatccattcagaaagcatcatatggtttgcagaaacaagcctcagctcccatggtctgcaatatcttcgtcatctggtgtatttgtcatatgtatgcttgtggggtacatcgtgggtgccgcttggagtcgttatgataatgttaaggaagattgccggaaaatggaggagctgaaaaaacaggcagaagcagccgatgttgctaaatctcagttccttgcaactgtttctcatgagatcagaacgcccatgaatggagttctagggatgcttgatatgctgttagacactgacctaacgtcgacccagagggattttgcacaaacagctcaagtctgtggaaaggctttaatatcactaatcaatgaagtgcttgacagagcgaaaattgaagccggaaagttggatcttgagtctgtaccatttgacctgagatccatccttgatgatgtcatctcattattttcttcaaagtcaagagagaagggaattgagcttgctgtatatgtctctgaaagagttcctgaactcttgttgggtgatcctggaaggtttcggcagataattacaaatttagtgggcaactcaattaagttcacagaacggggacatatttttgtacaagttcatctggcagatcactcaaatcttgcaacagaacccaaagttgagtcagtggctaacgggatgaatggacataaagatgagaaaactgctgtagcaaccagtgtttctctcaacacactaagtggttttgaagctgctgatagccgaaatagttgggaaaacttcaagcttttgctttcttatgagaaaaatgagatgccctatgaaagtgtatctgataaagttactcttgtagtaagtgtggaagatacagggataggtataccattggatgcccaagccaaggtgttcactcctttcatgcaggccgatagttcgacttccaggacatatggtggtactggaattggattgagcatcagcaaatgtctcgttgaactaatgggtggtcagataaactttgttagccgaccacatgttgggagtacattcacatttactgcagctctccaaagatgtgacagaagcgctattggtgacagtaagcctgttatgttgcaccctcttccatccagtttcaaaggtttatctgcattattggttgatagaagaccagtaagagctactgtaactaagtatcacttgcaaaggctgggaattgcctgcgatgttgttgctaccattgaattggctcttggtgtgctgtccgggagaaatggcagttctctaaccagcacgaagcaaccatgcatgttattgattgagagtgattcatggggcttcaagattgatgtacctttacgatctcgactcctggagatgaagcagaatggtccacctggattgcccaaaactatccttctcgcagctgcagaatcgggcaaactcaaagcacactatgcagttgattctgtgatcacgaagcctctgaaagcaagcggacttgccgcttgtctattccaaacacttggcatcacacagtcaagcaacgagagacgcgacaactcaggttcccttcatgggttgctccttggcaagaacatattggtggttgatgacaacaaggtaaatcttagagtggctgctggcacattaaagaaattcggagcgaaggtggagtgcgtggagagtgggaaagatgctctcgccagcctacaagttccacataagttccatctttgtctcatggacattcagatgcccgaaatggatgggttcgaggccaccaagcaaataagggcaatggaggcgaaggcaaatgagcaggcagtcgcctgtgatgattcagaaacggatggcgcgacaagggcggcgagatggcacctgcctgtccttgcaatgaccgccgatgtcatccaggccacccatgaggagtgcacgaagtacgggatggatgggtacgtcacgaagcccttcgaggagaagcagctcttccaggcgctgcagaagttcttggaccctggcatgtccagctaacacccaagtgctgcgttcgttgcaagtgaggcaccattctcctccgttctgtagttcgctaaccatagacgcaatctgattatctgaccccgaagaaagatcgtaaatggcgggctgctcgtcgaccatgccagcggggaacagcaggcagcacgcagcaggggcctttgctgcctgcctgtgcagtgcaggcgccgtgtaaatgtattgtattagcagggatcctgtttatagcgctagtatggacctgcgcgacaatgttggaggagctgcctgcggctgatgcacgtcgagcataattttgttgtacagcttccaccatttttgtgctactgtggcaggcatgctcgctggtgcagtgcaggactggaaggaaaacctgactgcctgagagtagtttttttttgccgtcaacattgcattgggattcgtgatgtattacaatctgctaatgtgcgatataagctcatgtaattggctcagtgcgtttccattgttacaaatatgaattaagatggcattggtaaatggt

SEQ ID NO: 5098 - DNA, 3692 bp, Zea Mays
tatctcgtgaaatccaggaaattcgattcactcgaagcccggctgctttctccccgtcgcgaaaagccgcaagccaacaaaaaacacacacacactgacacacacaccaaaataacacatcaaagcagcgggagaggagagctcggattctcgcggagaggaggcggcgtgggcgccggacggcggaagcagaggagtggtcggtcggtggcctgcggtgcagcgtatgtgagagctgctgcggcggcggggacctgccctggcccctgggatgggggtgggaggcggaggcggaggcggaggggaggccgcggcggtgtcggcgccggcgccggcggaggaggcggggaaggacgcggaggatggcagcgggtggaccttgaaggcgaagctgatcgccgtagcggtgctggtgtgggtgctgggggccttggcgctcggggtgttcctgcactcctacttccgccacgcggcgctgcgcaaggcggaggaggggctcgtcagcatgtgcgaggagcgcgcgcgcatgctgcaggaccagttcgccgtctccgtcaaccacgtccacgccctcgccatcctcgtcgccaccttccactacgagaagcgcccgcccgcgctcgaccagaacacgttcgcggactacaccgccaggacgtcgttcgagcggccgctgctgagcggggtggcgtacgcgcagcgggtggtgcacggcgacagggagagcttcgagcgccagcagggctggatcatcaagaccatgaagcacgagccgtccccggtgcaggatgagtacgcgccggtcgtctactcgcaggagaccgtctcctacattgaggggctcgacatgatgtccggcgaggaggaccgcgagaacattttgaggtcaagagcatcggggaaggcagttcttactagaccgttccggctcatgtcgaatcacctgggtgtcgtattgacttttcctgtctaccatgttgatctttcttctgatgccaaggaggaggatcgtgttgctgccaccgcaggttcgaaccctcttgtcatgtatggatcggaagtttctcttggcaacccctcaccatcgcacatctgcatgctagattttggcgatccattcagaaagcatcatatggtttgcagatacagaaacaagcctcagctcccatggtctgcaatatcttcgtcatctggtgtatttgtcatatgtatgcttgtggggtacatcgtgggtgccgcttggagtcgttatgataatgttaaggaagattgccggaaaatggaggagctgaaaaaacaggcagaagcagccgatgttgctaaatctcagttccttgcaactgtttctcatgagatcagaacgcccatgaatggagttctagggatgcttgatatgctgttagacactgacctaacgtcgacccagagggattttgcacaaacagctcaagtctgtggaaaggctttaatatcactaatcaatgaagtgcttgacagagcgaaaattgaagccggaaagttggatcttgagtctgtaccatttgacctgagatccatccttgatgatgtcatctcattattttcttcaaagtcaagagagaagggaattgagcttgctgtatatgtctctgaaagagttcctgaactcttgttgggtgatcctggaaggtttcggcagataattacaaatttagtgggcaactcaattaagttcacagaacggggacatatttttgtacaagttcatctggcagatcactcaaatcttgcaacagaacccaaagttgagtcagtggctaacgggatgaatggacataaagatgagaaaactgctgtagcaaccagtgtttctctcaacacactaagtggttttgaagctgctgatagccgaaatagttgggaaaacttcaagcttttgctttcttatgagaaaaatgagatgccctatgaaagtgtatctgataaagttactcttgtagtaagtgtggaagatacagggataggtataccattggatgcccaagccaaggtgttcactcctttcatgcaggccgatagttcgacttccaggacatatggtggtactggaattggattgagcatcagcaaatgtctcgttgaactaatgggtggtcagataaactttgttagccgaccacatgttgggagtacattcacatttactgcagctctccaaagatgtgacagaagcgctattggtgacagtaagcctgttatgttgcaccctcttccatccagtttcaaaggtttatctgcattattggttgatagaagaccagtaagagctactgtaactaagtatcacttgcaaaggctgggaattgcctgcgatgttgttgctaccattgaattggctcttggtgtgctgtccgggagaaatggcagttctctaaccagcacgaagcaaccatgcatgttattgattgagagtgattcatggggcttcaagattgatgtacctttacgatctcgactcctggagatgaagcagaatggtccacctggattgcccaaaactatccttctcgcagctgcagaatcgggcaaactcaaagcacactatgcagttgattctgtgatcacgaagcctctgaaagcaagcggacttgccgcttgtctattccaaacacttggcatcacacagtcaagcaacgagagacgcgacaactcaggttcccttcatgggttgctccttggcaagaacatattggtggttgatgacaacaaggtaaatcttagagtggctgctggcacattaaagaaattcggagcgaaggtggagtgcgtggagagtgggaaagatgctctcgccagcctacaagttccacataagttccatctttgtctcatggacattcagatgcccgaaatggatgggttcgaggccaccaagcaaataagggcaatggaggcgaaggcaaatgagcaggcagtcgcctgtgatgattcagaaacggatggcgcgacaagggcggcgagatggcacctgcctgtccttgcaatgaccgccgatgtcatccaggccacccatgaggagtgcacgaagtacgggatggatgggtacgtcacgaagcccttcgaggagaagcagctcttccaggcgctgcagaagttcttggaccctggcatgtccagctaacacccaagtgctgcgttcgttgcaagtgaggcaccattctcctccgttctgtagttcgctaaccatagacgcaatctgattatctgaccccgaagaaagatcgtaaatggcgggctgctcgtcgaccatgccagcggggaacagcaggcagcacgcagcaggggcctttgctgcctgcctgtgcagtgcaggcgccgtgtaaatgtattgtattagcagggatcctgtttatagcgctagtatggacctgcgcgacaatgttggaggagctgcctgcggctgatgcacgtcgagcataattttgttgtacagcttccaccatttttgtgctactgtggcaggcatgctcgctggtgcagtgcaggactggaaggaaaacctgactgcctgagagtagtttttttttgccgtcaacattgcattgggattcgtgatgtattacaatctgctaatgtgcgatataagctcatgtaattggctcagtgcgtttccattgttacaaatatgaattaagatggcattggtaaatggt

SEQ ID NO: 5099 - DNA, 2842 bp, Zea Mays
cttaactgtaattttggtcaaaaccacaatacttatgccagaaaatcaaaagatttaaatgctgtcgacacttgataccttgggggatcatttgatgtagaatcattagtggaaaatttgttgaggcagctagctggcaatcaggaattggtggtaaatgtttatgatgtcacaaacagttcgaaccctcttgtcatgtatggatcggaagtttctcttggcaacccctcaccatcgcacatctgcatgctagattttggcgatccattcagaaagcatcatatggtttgcagatacagaaacaagcctcagctcccatggtctgcaatatcttcgtcatctggtgtatttgtcatatgtatgcttgtggggtacatcgtgggtgccgcttggagtcgttatgataatgttaaggaagattgccggaaaatggaggagctgaaaaaacaggcagaagcagccgatgttgctaaatctcagttccttgcaactgtttctcatgagatcagaacgcccatgaatggagttctagggatgcttgatatgctgttagacactgacctaacgtcgacccagagggattttgcacaaacagctcaagtctgtggaaaggctttaatatcactaatcaatgaagtgcttgacagagcgaaaattgaagccggaaagttggatcttgagtctgtaccatttgacctgagatccatccttgatgatgtcatctcattattttcttcaaagtcaagagagaagggaattgagcttgctgtatatgtctctgaaagagttcctgaactcttgttgggtgatcctggaaggtttcggcagataattacaaatttagtgggcaactcaattaagttcacagaacggggacatatttttgtacaagttcatctggcagatcactcaaatcttgcaacagaacccaaagttgagtcagtggctaacgggatgaatggacataaagatgagaaaactgctgtagcaaccagtgtttctctcaacacactaagtggttttgaagctgctgatagccgaaatagttgggaaaacttcaagcttttgctttcttatgagaaaaatgagatgccctatgaaagtgtatctgataaagttactcttgtagtaagtgtggaagatacagggataggtataccattggatgcccaagccaaggtgttcactcctttcatgcaggccgatagttcgacttccaggacatatggtggtactggaattggattgagcatcagcaaatgtctcgttgaactaatgggtggtcagataaactttgttagccgaccacatgttgggagtacattcacatttactgcagctctccaaagatgtgacagaagcgctattggtgacagtaagcctgttatgttgcaccctcttccatccagtttcaaaggtttatctgcattattggttgatagaagaccagtaagagctactgtaactaagtatcacttgcaaaggctgggaattgcctgcgatgttgttgctaccattgaattggctcttggtgtgctgtccgggagaaatggcagttctctaaccagcacgaagcaaccatgcatgttattgattgagagtgattcatggggcttcaagattgatgtacctttacgatctcgactcctggagatgaagcagaatggtccacctggattgcccaaaactatccttctcgcagctgcagaatcgggcaaactcaaagcacactatgcagttgattctgtgatcacgaagcctctgaaagcaagcggacttgccgcttgtctattccaaacacttggcatcacacagtcaagcaacgagagacgcgacaactcaggttcccttcatgggttgctccttggcaagaacatattggtggttgatgacaacaaggtaaatcttagagtggctgctggcacattaaagaaattcggagcgaaggtggagtgcgtggagagtgggaaagatgctctcgccagcctacaagttccacataagttccatctttgtctcatggacattcagatgcccgaaatggatgggttcgaggccaccaagcaaataagggcaatggaggcgaaggcaaatgagcaggcagtcgcctgtgatgattcagaaacggatggcgcgacaagggcggcgagatggcacctgcctgtccttgcaatgaccgccgatgtcatccaggccacccatgaggagtgcacgaagtacgggatggatgggtacgtcacgaagcccttcgaggagaagcagctcttccaggcgctgcagaagttcttggaccctggcatgtccagctaacacccaagtgctgcgttcgttgcaagtgaggcaccattctcctccgttctgtagttcgctaaccatagacgcaatctgattatctgaccccgaagaaagatcgtaaatggcgggctgctcgtcgaccatgccagcggggaacagcaggcagcacgcagcaggggcctttgctgcctgcctgtgcagtgcaggcgccgtgtaaatgtattgtattagcagggatcctgtttatagcgctagtatggacctgcgcgacaatgttggaggagctgcctgcggctgatgcacgtcgagcataattttgttgtacagcttccaccatttttgtgctactgtggcaggcatgctcgctggtgcagtgcaggactggaaggaaaacctgactgcctgagagtagtttttttttgccgtcaacattgcattgggattcgtgatgtattacaatctgctaatgtgcgatataagctcatgtaattggctcagtgcgtttccattgttacaaatatgaattaagatggcattggtaaatggt

SEQ ID NO: 5100 - DNA, 2091 bp, Zea Mays
cgtgctctgactaccagcgagcccacggcgtcgccctttataactggggcccccaaccgaaacctctgctcgccgcaacgaattcccagtctccagccaaccaccgcagacaagatcctctattccgcgtccccaaaccctcgagttcgcacgggctccggccagattcgcgcagtctaagcttcgaatcggcgcatggaggcggcagcagtagccgcggcgctcaggtcgcctaccgccaccaccgccgccgccgccgctggccccacgtggcgggccgcggccccgggcgccgcctcgctcgcctttgaccggagacgcagcttcgccttcggctccatcaaggtaggagcagagagagagagagagagagagagagagagagagagagagagagagagagagcacttttgatcttatcatcttcattttcgctgtggcgtgcttatctattttcttgtttttgtattatttcttgtgtaggaatgatttgggtctcgggcggcagcagctcacctctaggtctactaggaggcgaagcagtgtggtcagggcatcctggtccccctcggagtctctgccaccgtcctcgtcgatcgcgcctctcaggatggaatcgccggcggggcagctactctcgcaaatcctgcacacgcacccgcacttgctgtctgccgctgccgagcagcagctcgagcagctccagaccgaccgcgaggccgacaaggagaaggataaggagagcgatgctggcgacaagctggctccgacaggtggcgacctcgtgctgtacaggcggattgctgaagtaaaagagaaggaacggagaaggactttggaggagatactctatgctctggttgttcagaagttcgttgaagctggtgtctctctggttccagcactctcacgctccaccgatccttctggaagagttgatcagtgggcagaaactgtggaagaaaagcttcaacgtctgcactcgcatgaggcctatgaaatgatcgagaatcacctcaccctcattctggggcagcgtcaaggtgacgccactatcgcagccataagtaagctccgtgttggccaggtctatgctgcatctgtgatgtacggttatttcctgaagagagttgaccagaggttccagctcgagaagacaatgaagggcctcccttgggggtcagaagaggaagacagcgctttgaatcaagttatgatgaccgacttgatgccttcagctcagacttctagctctcatccagagatgggctcgtggaccgcgcctgccttcagcacaggagggcccagccaatctatcaagccttgccgccttaggtcgtatgtcatgtcgtttgattccgatacgctccagaggtatgcgacagtcaggtcaaaggaggccttcggcatcattgagaagcacacggaagcgctatttgggaagccagagattgtgatcacacctgaaggcacccttgattcttccaaggatgagcatattaggataagctttgctgggctgagaaggctgatcctggaggctgttaccttcggatcgttcctctgggacgttgagagctttgtggattcccggtaccatttcgtgaccagctaagatggtcatcctaagtgaagaacgattcatggtttacggatcttgtctcacaatgtctatgggcttcggaaaggctgttgtacaatgatgttagactgttaccactccccttaggccatgtttttcaccgttaatatatgtgaattggatggtattgagttgatttaaattcatagcaagtcaaaatacatctcaatccattccaatatttgtttaatccacataaaattgaaataaccgaacaagaacttagtgtatacgatggtatcaatggtttgcccagttttattgcatcacagtattgtaaagaccaaatgtcattagcctgatattcagacgataggttttagtaacatctgtgctgcccgggggtcggggtgctgtgttttctgattataccctctgcaaattgtaaggaattatatgctcctagccaattctttagcgaagctatcattctcgttgcagattgccgt

SEQ ID NO: 5101 - DNA, 1969 bp, Zea Mays
cgtgctctgactaccagcgagcccacggcgtcgccctttataactggggcccccaaccgaaacctctgctcgccgcaacgaattcccagtctccagccaaccaccgcagacaagatcctctattccgcgtccccaaaccctcgagttcgcacgggctccggccagattcgcgcagtctaagcttcgaatcggcgcatggaggcggcagcagtagccgcggcgctcaggtcgcctaccgccaccaccgccgccgccgccgctggccccacgtggcgggccgcggccccgggcgccgcctcgctcgcctttgaccggagacgcagcttcgccttcggctccatcaagtctgaacacggaaatggactgcgcagggtctcgggcggcagcagctcacctctaggtctactaggaggcgaagcagtgtggtcagggcatcctggtccccctcggagtctctgccaccgtcctcgtcgatcgcgcctctcaggatggaatcgccggcggggcagctactctcgcaaatcctgcacacgcacccgcacttgctgtctgccgctgccgagcagcagctcgagcagctccagaccgaccgcgaggccgacaaggagaaggataaggagagcgatgctggcgacaagctggctccgacaggtggcgacctcgtgctgtacaggcggattgctgaagtaaaagagaaggaacggagaaggactttggaggagatactctatgctctggttgttcagaagttcgttgaagctggtgtctctctggttccagcactctcacgctccaccgatccttctggaagagttgatcagtgggcagaaactgtggaagaaaagcttcaacgtctgcactcgcatgaggcctatgaaatgatcgagaatcacctcaccctcattctggggcagcgtcaaggtgacgccactatcgcagccataagtaagctccgtgttggccaggtctatgctgcatctgtgatgtacggttatttcctgaagagagttgaccagaggttccagctcgagaagacaatgaagggcctcccttgggggtcagaagaggaagacagcgctttgaatcaagttatgatgaccgacttgatgccttcagctcagacttctagctctcatccagagatgggctcgtggaccgcgcctgccttcagcacaggagggcccagccaatctatcaagccttgccgccttaggtcgtatgtcatgtcgtttgattccgatacgctccagaggtatgcgacagtcaggtcaaaggaggccttcggcatcattgagaagcacacggaagcgctatttgggaagccagagattgtgatcacacctgaaggcacccttgattcttccaaggatgagcatattaggataagctttgctgggctgagaaggctgatcctggaggctgttaccttcggatcgttcctctgggacgttgagagctttgtggattcccggtaccatttcgtgaccagctaagatggtcatcctaagtgaagaacgattcatggtttacggatcttgtctcacaatgtctatgggcttcggaaaggctgttgtacaatgatgttagactgttaccactccccttaggccatgtttttcaccgttaatatatgtgaattggatggtattgagttgatttaaattcatagcaagtcaaaatacatctcaatccattccaatatttgtttaatccacataaaattgaaataaccgaacaagaacttagtgtatacgatggtatcaatggtttgcccagttttattgcatcacagtattgtaaagaccaaatgtcattagcctgatattcagacgataggttttagtaacatctgtgctgcccgggggtcggggtgctgtgttttctgattataccctctgcaaattgtaaggaattatatgctcctagccaattctttagcgaagctatcattctcgttgcagattgccgt

SEQ ID NO: 5102 - DNA, 1925 bp, Zea Mays
cgtgctctgactaccagcgagcccacggcgtcgccctttataactggggcccccaaccgaaacctctgctcgccgcaacgaattcccagtctccagccaaccaccgcagacaagatcctctattccgcgtccccaaaccctcgagttcgcacgggctccggccagattcgcgcagtctaagcttcgaatcggcgcatggaggcggcagcagtagccgcggcgctcaggtcgcctaccgccaccaccgccgccgccgccgctggccccacgtggcgggccgcggccccgggcgccgcctcgctcgcctttgaccggagacgcagcttcgccttcggctccatcaagctcacctctaggtctactaggaggcgaagcagtgtggtcagggcatcctggtccccctcggagtctctgccaccgtcctcgtcgatcgcgcctctcaggatggaatcgccggcggggcagctactctcgcaaatcctgcacacgcacccgcacttgctgtctgccgctgccgagcagcagctcgagcagctccagaccgaccgcgaggccgacaaggagaaggataaggagagcgatgctggcgacaagctggctccgacaggtggcgacctcgtgctgtacaggcggattgctgaagtaaaagagaaggaacggagaaggactttggaggagatactctatgctctggttgttcagaagttcgttgaagctggtgtctctctggttccagcactctcacgctccaccgatccttctggaagagttgatcagtgggcagaaactgtggaagaaaagcttcaacgtctgcactcgcatgaggcctatgaaatgatcgagaatcacctcaccctcattctggggcagcgtcaaggtgacgccactatcgcagccataagtaagctccgtgttggccaggtctatgctgcatctgtgatgtacggttatttcctgaagagagttgaccagaggttccagctcgagaagacaatgaagggcctcccttgggggtcagaagaggaagacagcgctttgaatcaagttatgatgaccgacttgatgccttcagctcagacttctagctctcatccagagatgggctcgtggaccgcgcctgccttcagcacaggagggcccagccaatctatcaagccttgccgccttaggtcgtatgtcatgtcgtttgattccgatacgctccagaggtatgcgacagtcaggtcaaaggaggccttcggcatcattgagaagcacacggaagcgctatttgggaagccagagattgtgatcacacctgaaggcacccttgattcttccaaggatgagcatattaggataagctttgctgggctgagaaggctgatcctggaggctgttaccttcggatcgttcctctgggacgttgagagctttgtggattcccggtaccatttcgtgaccagctaagatggtcatcctaagtgaagaacgattcatggtttacggatcttgtctcacaatgtctatgggcttcggaaaggctgttgtacaatgatgttagactgttaccactccccttaggccatgtttttcaccgttaatatatgtgaattggatggtattgagttgatttaaattcatagcaagtcaaaatacatctcaatccattccaatatttgtttaatccacataaaattgaaataaccgaacaagaacttagtgtatacgatggtatcaatggtttgcccagttttattgcatcacagtattgtaaagaccaaatgtcattagcctgatattcagacgataggttttagtaacatctgtgctgcccgggggtcggggtgctgtgttttctgattataccctctgcaaattgtaaggaattatatgctcctagccaattctttagcgaagctatcattctcgttgcagattgccgt

SEQ ID NO: 5103 - DNA, 1010 bp, Zea Mays
agtatgatcatagtgatgatgggtgttcagtatatagtcaagttatggtttctcttctccaatgcatttataataagtgtagcctgagaagttagaaggagtatactctgccaatatatggtaggtttagacatcaaacagatcatgaactaaccagtgatgtagtgaccatatataaaaggaaaagcatgaagcagatcatgaactcacgagtccatcagtcatcagatattaaaggaagagcaggaaaaaacaaacctcaaggggcataagtttgatattttagccatagtgaattggattgtgaacaggactgatgattttctcctgaattgagtcccatttattttgttgattggggtacaaatatcatgcaatagatcaaaggaatgaaaaatctcacacaacactactcttcttttgtccattgtggcaacagtaccaaggtagtgtcttcttttatcctccacacaagaccaaaaaaatctcatctgatctgctttggccgtgaggcatgggccgcctctagtgatgagattgaggagaggaggtgagaagcatgaaacgtagagcaacagaggacgatgaccgtggggtggacgtggagcctggatgaggtcagctctgtaggctcactcactatggtagatctaggcaatggaggagccctagacatcgatgtggaggtggaggccaacgcgaatatggttccagaggctgaagacaggcgcagacgcggggaggtagggcgacgggacgacagatggagtgaggaggaagcacgggcggcgaatcgagggggggtgaagagccgaagaggaagcgaggggaaacatgcagagcggggatgggatggcagatggatcgagacggaagaacgagcggttgatcgatggggaggaagaggtgaagaggaagcagagcggcagatcaagaggggcgctgcgcggcatgggaggagcgagaggccgggaggggagaccgggagaggagcatggcagccggtctaa

SEQ ID NO: 5104 - DNA, 965 bp, Zea Mays
ttgaattacaaataccttcagcttggaattatatgagagtacaggtgtggcgcaaaagcaaatgccagatcagcgtgaccagtacgggcgtactgttcacctatttataggcacaggacacaacccatacaaaattacatttatgccctttacatttgataataattctatagtaatctatcgaggtctgaatagccttttcatctttaagtcggtttcatttttgctaccacgccgaagctttcctgctcccaccttcggcgctgtatcaaccttcgtattattctggtctgctgtgataccgatttgagtccgaagatacctgttcacacattatactccagaaatactgttaaatcctgtttttgaggaccttcgtaagccgaaggcccccaacacagtgcatcacgaccggtcaaaacatatagatacaagatttcatttgatccgggagtatgcaaattcaggccaaattgaagtgaagttcatcaggacagaggagcagcttggggacattctcacgaagcctctcggcaaactgaagttcagagaactctacatgaagattggccttcgatcagcacagtagtatatgcacaagtattaggaggagaattgttgaaataatccttgtgcatgggtcttagttagtttacttaaggctgttgttttttttattcccaggttaggcgtatagtcatctattggctgtacgtgtagtcgtggccggcatacctatgtgtgggatggcacacaaagtggagggacgtgccgtgcttctcgggtggtcgttggccacgttctgttgaatcctttttattcagtaaacagagtcagaaaagttgcgcagttttacgcagcaccaaaaatcagagtgtatccaattctattcgtgtgagttctgtgtgtttgtgaaaggctgcagggggagctcgccggcaacaggaggtgagtcttcggcgagg

SEQ ID NO: 5105 - DNA, 2011 bp, Zea Mays
cccaacttgacatacatgtttgcatcacaaccacatcttgttagtgcgtggttcttttggtttttagggggatcatcgacctctttcaccttcttaaaaccagcccttgaacacatatatctcttgttaataacctcaccaagagctttattttgagaaccaacacgcactgaaaaccctccatcatgtgcatatgatttgtagaactcctctgcgtcattacaagaatgaaaggacattccaataacaggcttccttctgtccacacagatgggtatgaatgacgcacactgcaatgtgagacggaaaaaaattactattgtcacaaaaacatatgttttgcatgccaacgaatcaacaagaattaagacgataagttaccattgtagggacgtatggcctttttttgggtgtacaaaaaccttgagaggacgattcacccaatgtaatacgcgattgttccaaccaagattcgaaggagaggcgacgcacggcctgactgtgcatcacatcgatgccttgcacctgtctctcatcacccccgtcctcggtggctggtgcggcgatcccttctccatccacagcgccgagagaggtctcaatggtgaggtctgccatcacgcacacaaacagtgggaagacctagaggcggcgggctgccatggtgaggtctgccgtctgccatcagcccatcacgcaggacgaataggaagaccatcagttgtgcgatcagcgtagggcgcctagttcggtccggtccggtccactgggccatcgggggcaaatcacaatgaaccagagagtgcaggagctacggcgggagggggtttatgtaaaattgctgctggacgttggatgaggaagggatgatccagattaaaagtgctcacatgtgcacgggagcgccatgagcacgggacacgatcccaaacaaaacaagacaccactggaaggagttgatctcgcctgaatctgatggtctggccacaagaagttggtctctgctcagcaacagtttttcagcagaggccaggagaccatgccagcgtcgtgcgcccgccagggacgaacccacactgggctggtcggggccacgcgaacatgcgcttgagttgcgccatggctgttgcgcgctcgccgagatccacgcaagggccgccgtgcctaggatggaccgaccactgatgggaggtcgcgcgtatcgcctgggccgcaccttcgcgtcgtgccgtggccgtaagtccgcgctgctgccggtcgcggggccgcgcgcctgcgcagggattccctcgccggggccacgcgcccgtggagccacgccccaggggcctcgccgtcgcctgcttggccggggctgcgcgccgccgggccgcaccggcgtcgagccgtggccgggccgcccgttggcgagccagggacggggggcctgcccgcgcgcgctctcggagctgtgcacccgcgcgccgcgccaccgtgggcagccgcgccacgggaaggcacgccgggaccggagccgccagggccagggctatagccgccgctccacgggaagccgccgtggccgggccgccgtgccgtggttggggccggccacgccaaggctgctcgcgcccaccggccggggctgcgcatcgccgaaccgcgcccgcgcccactggttgtccgagcctgcgccgccgttgcactgcgcatgctgcaggtagccgccgccgccgccgcaaggagatgttagggttcataccctaactgcctgctaatatggcctccctagatgggcctcatgggccgacttgtcttagatcggcagcgtgggctatttccactgatcggacatatgaattttatcactttattctcttattttctgcaattttctagtatataaagactctgtgattgttcagttactgcctcagtcagtgttagtgggtctaaattcggatatttagactcttgtgatatattcttgtctctttattatgaaaaatgcagaggtgttagtgaattatat

SEQ ID NO: 5106 - DNA, 1285 bp, Zea Mays
atgaaaatgattataagcaaagtctaatattggttctctatccttacttgttgattcaatgcaacaactttaattgtttgcctcacaagttggatggtcctctttgcattggcacgctataacaaaacttctattgcgatttttatccaatttttttattgctaaatcaagtagggtaaattttgatcgagcagtcccttgaaccccagtcaacctggcactggcagccctccccaaccttgcccgcgtctgcacagtccttggccgccgcagcacacaccgcactcgcacacctgcaagcctgcaactcatcgcccccccgccgccacgcaagtgcgcccaggcctcagcgaaatgggcgcgcaggaggcggcagtggaggatgtgctgcgcgccgccgccgccgaggtgtcaacctcctcggcgaagcgccgcttccgcctcttccgccacaccctacctcttatcatcgcgaaggtcatagaatcaccatcagatactgcattgttagtcgatatcattttccagacattgccaatatacgacgaccgggcatcacgaaaagcagtagatgatatggttattcaggctcttggtgaacccaccttcatgaagccctttgctgcctttcttgtacaatctatggaaaagaatctaaaggttataaacccccttacaagcttcaagcttctcagatggtcacactatcttctgaaatggagtcaatttgccacactttcaaaagttgcttttaccagactggccagcgcacaagcagtcttatgtcaggtccttatggacgggtccttccgtcggcgccgaacttgcaaacagttattcattcatcttttatctgagcctagtggaatatataagatgtacatggaggagctcaaagatttaaggatttccatgagagattctcctgcatttttgaatctaatactggattttaccattagttctccatcattatccactgagtacaagtcagtgttccttgatttgtatgtcaaaaccatcttgagttcaaaagaccgggcaccaaaagcagccactgaagcttttaagcctcttctcttggagattgggcatgaggattttaagaatactgttataccatcatgcataaagatgctgaaaagaaatcctgaaatcatactacagtctattggatatcttcttaggacggtccgtttagacctgagcaagtatttcatggagttcatgccaattgttctgcatcaggcttgtcattcagatgaagaaaggaggattgatgctt

SEQ ID NO: 5107 - DNA, 574 bp, Zea Mays
gtcaacctggcactggcagccctccccaaccttgcccgcgtctgcacagtccttggccgccgcagcacacaccgcactcgcacacctgcaagcctgcaactcatcgcccccccgccgccacgcaagtgcgcccaggcctcagcgaaatgggcgcgcaggaggcggcagtggaggatgtgctgcgcgccgccgccgccgaggtgtcaacctcctcggcgaagcgccgcttccgcctcttccgccacaccctacctcttatcatcgcgaaggtcatagaatcaccatcagatactgcattgttagtcgatatcattttccagacattgccaatatacgacgaccgggcatcacgaaaagcagtagatgatatggttattcaggctcttggtgaacccaccttcatgaagccctttgctgcctttcttgtacaatctatggaaaagaatctaaagttgcttttaccagactggccagcgcacaagcagtcttatgtcaggtccttatggacgggtccttccgtcggcgccgaacttgcaaacagttattcattcatcttttatctgagcctagtcga

SEQ ID NO: 5108 - DNA, 1045 bp, Zea Mays
cctccccaaccttgcccgcgtctgcacagtccttggccgccgcagcacacaccgcactcgcacacctgcaagcctgcaactcatcgcccccccgccgccacgcaagtgcgcccaggcctcagcgaaatgggcgcgcaggaggcggcagtggaggatgtgctgcgcgccgccgccgccgaggtgtcaacctcctcggcgaagcgccgcttccgcctcttccgccacaccctacctcttatcatcgcgaaggtcatagatactgcattgttagtcgatatcattttccagacattgccaatatacgacgaccgggcatcacgaaaagcagtagatgatatggttattcaggctcttggtgaacccaccttcatgaagccctttgctgcctttcttgtacaatctatggaaaagaatctaaaggttataaacccccttacaagcttcaagcttctcagatggtcacactatcttctgaaatggagtcaatttgccacactttcaaaagttgcttttaccagactggccagcgcacaagcagtcttatgtcaggtccttatggacgggtccttccgtcggcgccgaacttgcaaacagttattcattcatcttttatctgagcctagtggaatatataagatgtacatggaggagctcaaagatttaaggatttccatgagagattctcctgcatttttgaatctaatactggattttaccattagttctccatcattatccactgagtacaagtcagtgttccttgatttgtatgtcaaaaccatcttgagttcaaaagaccgggcaccaaaagcagccactgaagcttttaagcctcttctcttggagattgggcatgaggattttaagaatactgttataccatcatgcataaagatgctgaaaagaaatcctgaaatcatactacagtctattggatatcttcttaggacggtccgtttagacctgagcaagtatttcatggagttcatgccaattgttctgcatcaggcttgtcattcagatgaagaaaggaggattgatgctt

SEQ ID NO: 5109 - DNA, 879 bp, Zea Mays
cgaagatgtcgatttgcgccgagcggagccagctcccgacaccgtggctgccgttgtcgcttttgctggtgctcgctgaatcaccatcagatactgcattgttagtcgatatcattttccagacattgccaatatacgacgaccgggcatcacgaaaagcagtagatgatatggttattcaggctcttggtgaacccaccttcatgaagccctttgctgcctttcttgtacaatctatggaaaagaatctaaaggttataaacccccttacaagcttcaagcttctcagatggtcacactatcttctgaaatggagtcaatttgccacactttcaaaagttgcttttaccagactggccagcgcacaagcagtcttatgtcaggtccttatggacgggtccttccgtcggcgccgaacttgcaaacagttattcattcatcttttatctgagcctagtggaatatataagatgtacatggaggagctcaaagatttaaggatttccatgagagattctcctgcatttttgaatctaatactggattttaccattagttctccatcattatccactgagtacaagtcagtgttccttgatttgtatgtcaaaaccatcttgagttcaaaagaccgggcaccaaaagcagccactgaagcttttaagcctcttctcttggagattgggcatgaggattttaagaatactgttataccatcatgcataaagatgctgaaaagaaatcctgaaatcatactacagtctattggatatcttcttaggacggtccgtttagacctgagcaagtatttcatggagttcatgccaattgttctgcatcaggcttgtcattcagatgaagaaaggaggattgatgctt

SEQ ID NO: 5110 - DNA, 4003 bp, Zea Mays
ttcaggatgcactttctacccttttctctctgtacattcgtgatcttggccctgctgttgaatttggagatgcacactggcttggaagacagggtattgcattagcgctccactctaccgctgatgttttggccgctaaagatcttcctgttgtcatgacatttctcatctcacgtgccttggctgatccaaatgttgatgttcgtggtagaatgattaatgctgggatccttattattgataggcatggaaaggaaaatgttcctttgctatttcctatttttgagagctacttgaataaaagggcatcagacgaggaaacatatgatcttgtgagggaaggtgttgttattttcactggtgctctggccaaacatctatcaaaggatgatcccaaagttcatagtgtcattgagaagttgttagatgtccttaacaccccatcggaggcagttcaacgtgctgtctcagattgtttgtccccacttatggtatccaaacaggaagagggtcaaactcttgtttctagactcttggatcggatgatgaaatgtgaaaaatatggtgagcgacgtggtgcagcttttggccttgctggtgtggttaaaggatttggaatttcttccttgaaaaaatatggcattgctgcaacattgcagaaaaatttggaagacagaatgtctgcgaaatctcgtgaaggagctttacttgggtttgagtgcctgtgtgagaagctcggcaaactatttgagccgtatgtcattcaaatgcttccattcctacttgtgtctttctctgatcaagtcctagcagtgcgtgaagctgccgagtgtgctgctcgggcaatgatgtctcagctcactggtcctggtgtgaagcttgtccttccttcacttcttaagggtctagaagataaagcatggcgtactaagcaaagcagcgttcaacttcttggtgccatggcatattgcgctcctcaacagctatctcagtgtcttccaaagattgttccaaagttaacagaggtactaacagacacacatcctaaagtccaagcgtctggacagacagctctccaggaggttggaagtgtcataaagaatcctgaaatttctgcactagtccctattcttctgtcagctctgatggatccaaatgcccacactaaacactctcttgacatccttcttcagactacttttattaactccatagacgcaccatcgcttgcactgcttgtgcctattgtgcatagaggactgagggagagaggtgttgagactaaaaagaaagctgctcaaatagttggaaacatgtcttctttagttacagaaccaaaggatatgatcccatacattagtttgctcctaccagaagttaagaaggttctagtggatcctatacctgaagtgagggcagtggctgctcgagctctggggtctcttataagtggaatgggtgaagaaatcttcccagatcttgtgccatggttattagatactctgaaatcagataatagtaatgttgaacgatctggtgcggcccagggattgagtgaggttttagctgctcttggccaagattattttgaccatattcttcctgacatcatccggaactgttcccaccaaaaggcttccgttcgtgatggacatcttacacttttccggtatttgccaaggtccttgggtggtgttttccagaattatctgcaggctgttcttcctgctatattagatgggcttgctgatgagaacgaatctgttcgtgatgctgcactttctgctggtcatgtctttgtggagcattatgcaactacgtcattacctctgttgcttcctgctattgaggatgggatcttcagtgataattggcgtatccgacaaagttccgttgaacttcttggggatctcttatttaaggtcgctggaacttctgggaaggcaatccttgaaggtggaagtgatgatgaaggtgctagtacagaggctcaggggcgtgctattattgaagtacttggaagggagaaacgcaatgaagttcttgccgccatttatatggttcgttctgatgtcagcttgactgtccggcaggctgcgttacatgtctggaagacgattgtagcaaatactccaagaactctgaaagagataatgccagtacttatggacacacttatttcgtctcttgcatcatcttcctccgaaagacgtcaggttgctggaagatcacttggtgagcttgtaaggaagcttggtgaaagagttttgccctcaattattccaatcctgtcacagggactcaaagacccaagtgctagcagaagacaaggagtttgcattggtttgagtgaggttatgggcagtgctggaaaacaccagctattaagttttatggatgaacttattcctaccattcgtactgctctatgtgacagcacccaagaggtccgtgaatctgctgggttagcgtttagtactctgtacaagagtgctggactgcaagccattgatgagattgtcccgacattgctacgggctttggaagatgatgatacatctgcaacagcccttgatggtctaaagcagattttaagtgtccgaacagcagctgttttaccccatatattgcccaaattagtccagccccctctctcttcatttaatgcacatgcattaggtgctctagcagaggttgctgggccaggtttgaattcacatattagaactgttctcccagcattgattcttgctatggatgatgaagatgtggatgtaaaaaactcagccaggaaagctgctgaaactgttctgttggttattgatgaggaaggagttgaaactttgatacctgagcttctaagaggaatcactgacagtcaggcatcaatgaggcggggctcagcctacctaattggtttcctctttaaaaacactaaactatatttggctgatgaggcttctgatatgatgtcaaccctaataattttgttgagtgatacagacaaggctactgtatcagctgctttagaagcattttcaagagttgttgcatctgttccaaaggaacagctcccaacacacataaaactagtgcgcgatgctgtctctacagccagagataaagagcgtagaaggcgaaagggtgtgcctattcttctgcctggcttatgtctttctaaagcactgcaaccttttcttcctatatttcagcagggtttaattagtgggtcggccgaaacaaaggagcaggcggctgaaggtctaggagagttaattgatgtaacaagcgagaagactcttaaggaagttgtagtgccaattacaggacctcttatccgcatccttggtgatcggtttccatggcaagttaagtcagcaatcctatcaaccctgacaatcatcatcatgaaaggtggaattgcacttaagcccttccttccacaacttcaaactacattcgtgaaatgtctacaggataacaataagtctgtccggacgagggctgcagctgctctcggaaagcttagtgctcttagcacacgggtggatcctttagttagcgatcttctgtccatgttgcagtcaggagatgaatctgtaaaagaaagtgtgctttctgcactcaaaggtgttatcaaacatgctggcaaaagtgtcagtgctccaataaggtcacggggatgtgctcttcttgaagatctgctgcaggctgaagctgatgatatccgcagttgtgctgcaaaagtgattggcacattgtctcagtacatggatgacagagagattccagatttggtgcaaatccttttggaagtgggcacctcatcggactggtgtaccaggcatggtgctttgttagcattatcatccatatcaatgcattctccatcaaaattatgtgatttggcatcctttccatctctggttgatcttctgaaagattctcttaaagacgacaagttccctgttcgtgaagttgctacaagaactctggaaggaga

SEQ ID NO: 5111 - DNA, 4046 bp, Zea Mays
ttcaggatgcactttctacccttttctctctgtacattcgtgatcttggccctgctgttgaatttggagatgcacactggcttggaagacagggtattgcattagcgctccactctaccgctgatgttttggccgctaaagatcttcctgttgtcatgacatttctcatctcacgtgccttggctgatccaaatgttgatgttcgtggtagaatgattaatgctgggatccttattattgataggcatggaaaggaaaatgttcctttgctatttcctatttttgagagctacttgaataaaagggcatcagacgaggaaacatatgatcttgtgagggaaggtgttgttattttcactggtgctctggccaaacatctatcaaaggatgatcccaaagttcatagtgtcattgagaagttgttagatgtccttaacaccccatcggaggcagttcaacgtgctgtctcagattgtttgtccccacttatggtatccaaacaggaagagggtcaaactcttgtttctagactcttggatcggatgatgaaatgtgaaaaatatggtgagcgacgtggtgcagcttttggccttgctggtgtggttaaaggatttggaatttcttccttgaaaaaatatggcattgctgcaacattgcagaaaaatttggaagacagaatgtctgcgaaatctcgtgaaggagctttacttgggtttgagtgcctgtgtgagaagctcggcaaactatttgagccgtatgtcattcaaatgcttccattcctacttgtgtctttctctgatcaagtcctagcagtgcgtgaagctgccgagtgtgctgctcgggcaatgatgtctcagctcactggtcctggtgtgaagcttgtccttccttcacttcttaagggtctagaagataaagcatggcgtactaagcaaagcagcgttcaacttcttggtgccatggcatattgcgctcctcaacagctatctcagtgtcttccaaagattgttccaaagttaacagaggtactaacagacacacatcctaaagtccaagcgtctggacagacagctctccaggaggttggaagtgtcataaagaatcctgaaatttctgcactagtccctattcttctgtcagctctgatggatccaaatgcccacactaaacactctcttgacatccttcttcagactacttttattaactccatagacgcaccatcgcttgcactgcttgtgcctattgtgcatagaggactgagggagagaggtgttgagactaaaaagaaagctgctcaaatagttggaaacatgtcttctttagttacagaaccaaaggatatgatcccatacattagtttgctcctaccagaagttaagaaggttctagtggatcctatacctgaagtgagggcagtggctgctcgagctctggggtctcttataagtggaatgggtgaagaaatcttcccagatcttgtgccatggttattagatactctgaaatcagataatagtaatgttgaacgatctggtgcggcccagggattgagtgaggttttagctgctcttggccaagattattttgaccatattcttcctgacatcatccggaactgttcccaccaaaaggcttccgttcgtgatggacatcttacacttttccggtatttgccaaggtccttgggtggtgttttccagaattatctgcaggctgttcttcctgctatattagatggtcattacctctgttgcttcctgctattgaggatgggatcttcagtgataattggcgtatccgacaaagttccgttgaacttcttggggatctcttatttaaggtcgctggaacttctgggaaggcaatccttgaaggtggaagtgatgatgaaggtgctagtacagaggctcaggggcgtgctattattgaagtacttggaagggagaaacgcaatgaagttcttgccgccatttatatggttcgttctgatgtcagcttgactgtccggcaggctgcgttacatgtctggaagacgattgtagcaaatactccaagaactctgaaagagataatgccagtacttatggacacacttatttcgtctcttgcatcatcttcctccgaaagacgtcaggttgctggaagatcacttggtgagcttgtaaggaagcttggtgaaagagttttgccctcaattattccaatcctgtcacagggactcaaagacccaagtgctagcagaagacaaggagtttgcattggtttgagtgaggttatgggcagtgctggaaaacaccagctattaagttttatggatgaacttattcctaccattcgtactgctctatgtgacaggtatgctttcttgcagttctttcattgtttttatctgatgttctcatctaaccatatctatctaatacttacagcacccattctgatgttctcatctaaccatatctatctaacacttacagcacccaagaggtccgtgaatctgctgggttagcgtttagtactctgtacaagagtgctggactgcaagccattgatgagattgtcccgacattgctacgggctttggaagatgatgatacatctgcaacagcccttgatggtctaaagcagattttaagtgtccgaacagcagctgttttaccccatatattgcccaaattagtccagccccctctctcttcatttaatgcacatgcattaggtgctctagcagaggttgctgggccaggtttgaattcacatattagaactgttctcccagcattgattcttgctatggatgatgaagatgtggatgtaaaaaactcagccaggaaagctgctgaaactgttctgttggttattgatgaggaaggagttgaaactttgatacctgagcttctaagaggaatcactgacagtcaggcatcaatgaggcggggctcagcctacctaattggtttcctctttaaaaacactaaactatatttggctgatgaggcttctgatatgatgtcaaccctaataattttgttgagtgatacagacaaggctactgtatcagctgctttagaagcattttcaagagttgttgcatctgttccaaaggaacagctcccaacacacataaaactagtgcgcgatgctgtctctacagccagagataaagagcgtagaaggcgaaagggtgtgcctattcttctgcctggcttatgtctttctaaagcactgcaaccttttcttcctatatttcagcagggtttaattagtgggtcggccgaaacaaaggagcaggcggctgaaggtctaggagagttaattgatgtaacaagcgagaagactcttaaggaagttgtagtgccaattacaggacctcttatccgcatccttggtgatcggtttccatggcaagttaagtcagcaatcctatcaaccctgacaatcatcatcatgaaaggtggaattgcacttaagcccttccttccacaacttcaaactacattcgtgaaatgtctacaggataacaataagtctgtccggacgagggctgcagctgctctcggaaagcttagtgctcttagcacacgggtggatcctttagttagcgatcttctgtccatgttgcagtcaggagatgaatctgtaaaagaaagtgtgctttctgcactcaaaggtgttatcaaacatgctggcaaaagtgtcagtgctccaataaggtcacggggatgtgctcttcttgaagatctgctgcaggctgaagctgatgatatccgcagttgtgctgcaaaagtgattggcacattgtctcagtacatggatgacagagagattccagatttggtgcaaatccttttggaagtgggcacctcatcggactggtgtaccaggcatggtgctttgttagcattatcatccatatcaatgcattctccatcaaaattatgtgatttggcatcctttccatctctggttgatcttctgaaagattctcttaaagacgacaagttccctgttcgtgaagttgctacaagaactctggaaggaga

SEQ ID NO: 5112 - DNA, 2312 bp, Zea Mays
gatgcactttctacccttttctctctgtacattcgtgatcttggccctgctgttgaatttggagatgcacactggcttggaagacagggtattgcattagcgctccactctaccgctgatgttttggccgctaaagatcttcctgttgtcatgacatttctcatctcacgtgccttggctgatccaaatgttgatgttcgtggtagaatgattaatgctgggatccttattattgataggcatggaaaggaaaatgttcctttgctatttcctatttttgagagctacttgaataaaagggcatcagacgaggaaacatatgatcttgtgagggaaggtgttgttattttcactggtgctctggccaaacatctatcaaaggatgatcccaaagttcatagtgtcattgagaagttgttagatgtccttaacaccccatcggaggcagttcaacgtgctgtctcagattgtttgtccccacttatggtatccaaacaggaagagggtcaaactcttgtttctagactcttggatcggatgatgaaatgtgaaaaatatgaatgtctgcgaaatctcgtgaaggagctttacttgggtttgagtgcctgtgtgagaagctcggcaaactatttgagccgtatgtcattcaaatgcttccattcctacttgtgtctttctctgatcaagtcctagcagtgcgtgaagctgccgagtgtgctgctcgggcaatgatgtctcagctcactggtcctggtgtgaagcttgtccttccttcacttcttaagggtctagaagataaagcatggcgtactaagcaaagcagcgttcaacttcttggtgccatggcatattgcgctcctcaacagctatctcagtgtcttccaaagattgttccaaagttaacagaggtactaacagacacacatcctaaagtccaagcgtctggacagacagctctccaggaggttggaagtgtcataaagaatcctgaaatttctgcactagtccctattcttctgtcagctctgatggatccaaatgcccacactaaacactctcttgacatccttcttcagactacttttattaactccatagacgcaccatcgcttgcactgcttgtgcctattgtgcatagaggactgagggagagaggtgttgagactaaaaagaaagctgctcaaatagttggaaacatgtcttctttagttacagaaccaaaggatatgatcccatacattagtttgctcctaccagaagttaagaaggttctagtggatcctatacctgaagtgagggcagtggctgctcgagctctggggtctcttataagtggaatgggtgaagaaatcttcccagatcttgtgccatggttattagatactctgaaatcagataatagtaatgttgaacgatctggtgcggcccagggattgagtgaggttttagctgctcttggccaagattattttgaccatattcttcctgacatcatccggaactgttcccaccaaaaggcttccgttcgtgatggacatcttacacttttccggtatttgccaaggtccttgggtggtgttttccagaattatctgcaggctgttcttcctgctatattagatgggcttgctgatgagaacgaatctgttcgtgatgctgcactttctgctggtcatgtctttgtggagcattatgcaactacgtcattacctctgttgcttcctgctattgaggatgggatcttcagtgataattggcgtatccgacaaagttccgttgaacttcttggggatctcttatttaaggtcgctggaacttctgggaaggcaatccttgaaggtggaagtgatgatgaaggtgctagtacagaggctcaggggcgtgctattattgaagtacttggaagggagaaacgcaatgaagttcttgccgccatttatatggttcgttctgatgtcagcttgactgtccggcaggctgcgttacatgtctggaagacgattgtagcaaatactccaagaactctgaaagagataatgccagtacttatggacacacttatttcgtctcttgcatcatcttcctccgaaagacgtcaggttgctggaagatcacttggtgagcttgtaaggaagcttggtgaaagagttttgccctcaattattccaatcctgtcacagggactcaaagacccaagtgctagcagaagacaaggagtttgcattggtttgagtgaggttatgggcagtgctggaaaacaccagctattaagttttatggatgaacttattcctaccattcgtactgctcta

SEQ ID NO: 5113 - DNA, 2374 bp, Zea Mays
gatgcactttctacccttttctctctgtacattcgtgatcttggccctgctgttgaatttggagatgcacactggcttggaagacagggtattgcattagcgctccactctaccgctgatgttttggccgctaaagatcttcctgttgtcatgacatttctcatctcacgtgccttggctgatccaaatgttgatgttcgtggtagaatgattaatgctgggatccttattattgataggcatggaaaggaaaatgttcctttgctatttcctatttttgagagctacttgaataaaagggcatcagacgaggaaacatatgatcttgtgagggaaggtgttgttattttcactggtgctctggccaaacatctatcaaaggatgatcccaaagttcatagtgtcattgagaagttgttagatgtccttaacaccccatcggaggcagttcaacgtgctgtctcagattgtttgtccccacttatggtatccaaacaggaagagggtcaaactcttgtttctagactcttggatcggatgatgaaatgtgaaaaatatggtgagcgacgtggtgcagcttttggccttgctggtgtggttaaaggatttggaatttcttccttgaaaaaatatggcattgctgcaacattgcagaaaaatttggaagacagaatgtctgcgaaatctcgtgaaggagctttacttgggtttgagtgcctgtgtgagaagctcggcaaactatttgagcctcctagcagtgcgtgaagctgccgagtgtgctgctcgggcaatgatgtctcagctcactggtcctggtgtgaagcttgtccttccttcacttcttaagggtctagaagataaagcatggcgtactaagcaaagcagcgttcaacttcttggtgccatggcatattgcgctcctcaacagctatctcagtgtcttccaaagattgttccaaagttaacagaggtactaacagacacacatcctaaagtccaagcgtctggacagacagctctccaggaggttggaagtgtcataaagaatcctgaaatttctgcactagtccctattcttctgtcagctctgatggatccaaatgcccacactaaacactctcttgacatccttcttcagactacttttattaactccatagacgcaccatcgcttgcactgcttgtgcctattgtgcatagaggactgagggagagaggtgttgagactaaaaagaaagctgctcaaatagttggaaacatgtcttctttagttacagaaccaaaggatatgatcccatacattagtttgctcctaccagaagttaagaaggttctagtggatcctatacctgaagtgagggcagtggctgctcgagctctggggtctcttataagtggaatgggtgaagaaatcttcccagatcttgtgccatggttattagatactctgaaatcagataatagtaatgttgaacgatctggtgcggcccagggattgagtgaggttttagctgctcttggccaagattattttgaccatattcttcctgacatcatccggaactgttcccaccaaaaggcttccgttcgtgatggacatcttacacttttccggtatttgccaaggtccttgggtggtgttttccagaattatctgcaggctgttcttcctgctatattagatgggcttgctgatgagaacgaatctgttcgtgatgctgcactttctgctggtcatgtctttgtggagcattatgcaactacgtcattacctctgttgcttcctgctattgaggatgggatcttcagtgataattggcgtatccgacaaagttccgttgaacttcttggggatctcttatttaaggtcgctggaacttctgggaaggcaatccttgaaggtggaagtgatgatgaaggtgctagtacagaggctcaggggcgtgctattattgaagtacttggaagggagaaacgcaatgaagttcttgccgccatttatatggttcgttctgatgtcagcttgactgtccggcaggctgcgttacatgtctggaagacgattgtagcaaatactccaagaactctgaaagagataatgccagtacttatggacacacttatttcgtctcttgcatcatcttcctccgaaagacgtcaggttgctggaagatcacttggtgagcttgtaaggaagcttggtgaaagagttttgccctcaattattccaatcctgtcacagggactcaaagacccaagtgctagcagaagacaaggagtttgcattggtttgagtgaggttatgggcagtgctggaaaacaccagctattaagttttatggatgaacttattcctaccattcgtactgctcta

SEQ ID NO: 5114 - DNA, 2417 bp, Zea Mays
gatgcactttctacccttttctctctgtacattcgtgatcttggccctgctgttgaatttggagatgcacactggcttggaagacagggtattgcattagcgctccactctaccgctgatgttttggccgctaaagatcttcctgttgtcatgacatttctcatctcacgtgccttggctgatccaaatgttgatgttcgtggtagaatgattaatgctgggatccttattattgataggcatggaaaggaaaatgttcctttgctatttcctatttttgagagctacttgaataaaagggcatcagacgaggaaacatatgatcttgtgagggaaggtgttgttattttcactggtgctctggccaaacatctatcaaaggatgatcccaaagttcatagtgtcattgagaagttgttagatgtccttaacaccccatcggaggcagttcaacgtgctgtctcagattgtttgtccccacttatggtatccaaacaggaagagggtcaaactcttgtttctagactcttggatcggatgatgaaatgtgaaaaatatggtgagcgacgtggtgcagcttttggccttgctggtgtggttaaaggatttggaatttcttccttgaaaaaatatggcattgctgcaacattgcagaaaaatttggaagacagaatgtctgcgaaatctcgtgaaggagctttacttgggtttgagtgcctgtgtgagaagctcggcaaactatttgagccgtatgtcattcaaatgcttccattcctacttgtgtctttctctgatcaagtcctagcagtgcgtgaagctgccgagtgtgctgctcgggcaatgatgtctcagctcactggtcctggtgtgaagcttgtccttccttcacttcttaagaagataaagcatggcgtactaagcaaagcagcgttcaacttcttggtgccatggcatattgcgctcctcaacagctatctcagtgtcttccaaagattgttccaaagttaacagaggtactaacagacacacatcctaaagtccaagcgtctggacagacagctctccaggaggttggaagtgtcataaagaatcctgaaatttctgcactagtccctattcttctgtcagctctgatggatccaaatgcccacactaaacactctcttgacatccttcttcagactacttttattaactccatagacgcaccatcgcttgcactgcttgtgcctattgtgcatagaggactgagggagagaggtgttgagactaaaaagaaagctgctcaaatagttggaaacatgtcttctttagttacagaaccaaaggatatgatcccatacattagtttgctcctaccagaagttaagaaggttctagtggatcctatacctgaagtgagggcagtggctgctcgagctctggggtctcttataagtggaatgggtgaagaaatcttcccagatcttgtgccatggttattagatactctgaaatcagataatagtaatgttgaacgatctggtgcggcccagggattgagtgaggttttagctgctcttggccaagattattttgaccatattcttcctgacatcatccggaactgttcccaccaaaaggcttccgttcgtgatggacatcttacacttttccggtatttgccaaggtccttgggtggtgttttccagaattatctgcaggctgttcttcctgctatattagatgggcttgctgatgagaacgaatctgttcgtgatgctgcactttctgctggtcatgtctttgtggagcattatgcaactacgtcattacctctgttgcttcctgctattgaggatgggatcttcagtgataattggcgtatccgacaaagttccgttgaacttcttggggatctcttatttaaggtcgctggaacttctgggaaggcaatccttgaaggtggaagtgatgatgaaggtgctagtacagaggctcaggggcgtgctattattgaagtacttggaagggagaaacgcaatgaagttcttgccgccatttatatggttcgttctgatgtcagcttgactgtccggcaggctgcgttacatgtctggaagacgattgtagcaaatactccaagaactctgaaagagataatgccagtacttatggacacacttatttcgtctcttgcatcatcttcctccgaaagacgtcaggttgctggaagatcacttggtgagcttgtaaggaagcttggtgaaagagttttgccctcaattattccaatcctgtcacagggactcaaagacccaagtgctagcagaagacaaggagtttgcattggtttgagtgaggttatgggcagtgctggaaaacaccagctattaagttttatggatgaacttattcctaccattcgtactgctcta

SEQ ID NO: 5115 - DNA, 826 bp, Zea Mays
cacatcaccgatccgtgcctcactgcctccgaactcccaccaatcacagcacgcgccccactggaaccctaacactataaaattgcacggcgtcgcccgcctttcaccaatctactcctccattctccaccgcgccccaacctcgaagagttccgaagtttccacaccctcaaagcgaagcagcatgagttccaccggaggcagcggccgtgggaaggcgaagccagcgaccaagtctgtgtcgcggtcttccaaggctgggctccagttccccgtcggccgcatcgcgcggtacctcaaggccggcaagtacgcggagcgcgtaggcgccggggctcccgtgtacctctccgccgtcctcgagtacctcgccgccgaggtgctggagctggccgggaacgctgctcgggacaacaagaagaaccggatcgtgccgcgccacattcagctggcggtgcggaacgacgaggagctgagcaagcttctgggcactgtgacgatcgcggccggcggcgtgatgcctaacatccaccaaaatttgctgcctaagaaggctggtcacaagggggacatcggctccgcctcccaggagttctgaacgcgtcttcggaaggaggagagacgcgtggtgatgtttgggctttgcggttttggggctgttgtcgatgggtttgagactgatggtttgtgggatgtaaacaaatgcagcgcgttgtttcatgaatgaacggatgaagatgaatgatggatagaagaaagtatttattcatgatttcctccctgcttgcatttgaattcgatttgttgtttgtcctatcgtaaagaa

SEQ ID NO: 5116 - DNA, 3290 bp, Zea Mays
aaaacgcaaaccagaccggagtaccggatttggacgggcggaggttggagaaaagttagccgccggtagcgagtaccccaccagtcagtgaaacatatgagcggctatgggtacctgacgccacgtccccgcaacttcacaccgaacagcagaggaagaagagagcaaagagagaagaagaggaagacgcggcgcgctcccctttccagtccccatccccggctggtatcgccgggagtaagacgggaccgtcgggacgaagccaccggcgcgacatggaggccaagccgtcttcagcggcacatggtgacgcgcccgcggtcgaggccccccgccgccgtggcagcggcggtaagcgcaagtcggccgggtcctcgttcacgccgtcgaagcggcaggccaaggagcggaacgctgccttccacgtgccccagcatcttcttcacagcgggccgctcacccgcgccgcgcgccactcgccgcacaagctcgcgggcactccgccggagtcggggccagcgtcatcgtcggccgcaactggagacggggtgagcggtgggcaggcggaggttgatgcgatccggcccgagacggaggagacgccggccccagagctgccgctggtggacgagatgttggaggcggtccgatcccgtggccctggcgtccatgtggtccctacctttgctggatggttttcatggaaagaaatccactcggttgagaagcagatcttgccttctttttttaatggaaaatctgtgaagcggacacctgaggtgtatttggcgattagaaattcaatcatgatgaaatttcatgccaatcctcaattgcagctggagtccaaagatctggctgagttgtcaatcggagagagcgatgctcgacaggaagtcttggaattcttggaccattggggcttgataaatttccaccctttcccaccagctggacatgaagagagtaagccagaggagagccaagacaactctaatgatgagaaagcttctttgatcgagcagctgtttaaatttgaatcagttcaatcatatatgacacctttactgaacaaagaagatgtgggagctccaccccctctgcctagcttgtttcctgaacctgtactcattgaaaatatggttgcagcagctgagccttctgttgagtaccactgcaactcctgttcagttgattgctcacggaagcgctaccattgtcgaacccaggcagattttgacctctgttgtgtttgctataatgaagggaagttcgatccaggcatggccaaaactgatttcatcctcatggattctgcagaagtttcaggtgctagtggtactagttggactgatgaagagacattacttcttttagaaggtttggaaatttttggtggaaaatgggctgagattgctgaacatgttgctactaagacaaaagcacaatgcatgttgcactttcttcaaatgcaaatcgaagaccgcttccatgatggtgacgatattaatcaaaacatcccagtaagtacagagcaagccacaactgagaaagccattgttgaaacacctgagaaaatggaagttggagataaagtggaaggaagagataatgcggatgagaaggcctcggagaaaacagagggaagctgtgaagaaacaaaaactgaagatgcaaatgttgtaaataaagatactcagaaatcaggtggcaaagattcaggtgcatctccaagcactgaagaggcaaagcaatcttctgatgatcaacctatagtaaaggaaaattctgtagatgtagatacttctggtgaaaaactatcaaatgttgctattgatatcctaaaatgtgcatttgaggctgctggtcacagcccagaatatgaaggttcatttgctgatgcaggaaatccagttatagcactagcagcgtatttagctggtcttgtggaagatggtaacgctaccacttcattccgtagttcactaaaatctatatctgaggtgcctcctgcactccaattagcaagtaggcactgttttattcttgaggatccaccaaatgaactcaaagacatttgtgttagtgtaagtaagaaaaatacagatgctgatcaaacaaaagatgaggatatgatttcaaattcaatcgccaatgagaaaaaagagatcaatgagaaagaagataagtctttatctgtggaaaagacaaataattcatccatgtcacaaaatgaccatcaagaatcaaacattaagagtgtctcacgtgatgattgctcctcagtggagccaaaaggcaataatgctaaggagtcaagtgattcaactggtattggggatatgagtgcaatcggcactacaaaagatgttgttgcaggcaattctaaacaagtgaacgactcacctagtgttgaggtggaggctcctgatgactcttctttaaaaagcaaggatgagctcaatgatactgaagatgcagtggcgacaccagctaccgtacaggaacagaaacacagccaaacattggaaaatggtgataagaacctaacaatattgaacgtgtagttgtccatgagaagggctctatagtgactgccaaccaaaatgattccataactaggctcaaacgagcagcagccactgctgtttcagcagctgctgtcaaagctaagtttctcggtgatcaggaggaatatcatattcgaaggctgacagcacttatgattgaaaagctgttccagaaattagaagtgaagatgtcgttgttttcagagattgagcaggtggtccttcgaacaagagagtacaccgagaagaccagaaaaaaactcctaatggaacgaaatgcgattattgcagctcgtatgggtgcattgccgtctaggccaaaccagcctggtgtagccggcaacaggttaccacctggatatggcaaccctcctttgaggtctccaaacgcaatgccgcggccttccagctgaggaaaatccggattccggacacccagtggtctatactccattcatttagaagcatacggacctcaaaaacctcaaacctgccagtttgttgtagcattttttagaaagtacattgtacaattgcctgtataactgcttatatgaaaattcaccattttcacttaattttgatgcacttgcttctaccaaacctccgcaactgtttaaaccttccatcaacagcagtacagcaccaccgccgagagctttttaggctatctccatcaccttacttatcctcgttccaatattcaaatcctattctgcg

SEQ ID NO: 5117 - DNA, 2787 bp, Zea Mays
gaaaagttagccgccggtagcgagtaccccaccagtcagtgaaacatatgagcggctatgggtacctgacgccacgtccccgcaacttcacaccgaacagcagaggaagaagagagcaaagagagaagaagaggaagacgcggcgcgctcccctttccagtccccatccccggctggtatcgccgggagtaagacgggaccgtcgggacgaagccaccggcgcgacatggaggccaagccgtcttcagcggcacatggtgacgcgcccgcggtcgaggccccccgccgccgtggcagcggcggtaagcgcaagtcggccgggtcctcgttcacgccgtcgaagcggcaggccaaggagcggaacgctgccttccacgtgccccagcatcttcttcacagcgggccgctcacccgcgccgcgcgccactcgccgcacaagctcgcgggcactccgccggagtcggggccagcgtcatcgtcggccgcaactggagacggggtgagcggtgggcaggcggaggttgatgcgatccggcccgagacggaggagacgccggccccagagctgccgctggtggacgagatgttggaggcggtccgatcccgtggccctggcgtccatgtggtccctacctttgctggcagattttgacctctgttgtgtttgctataatgaagggaagttcgatccaggcatggccaaaactgatttcatcctcatggattctgcagaagtttcaggtgctagtggtactagttggactgatgaagagacattacttcttttagaaggtttggaaatttttggtggaaaatgggctgagattgctgaacatgttgctactaagacaaaagcacaatgcatgttgcactttcttcaaatgcaaatcgaagaccgcttccatgatggtgacgatattaatcaaaacatcccagtaagtacagagcaagccacaactgagaaagccattgttgaaacacctgagaaaatggaagttggagataaagtggaaggaagagataatgcggatgagaaggcctcggagaaaacagagggaagctgtgaagaaacaaaaactgaagatgcaaatgttgtaaataaagatactcagaaatcaggtggcaaagattcaggtgcatctccaagcactgaagaggcaaagcaatcttctgatgatcaacctatagtaaaggaaaattctgtagatgtagatacttctggtgaaaaactatcaaatgttgctattgatatcctaaaatgtgcatttgaggctgctggtcacagcccagaatatgaaggttcatttgctgatgcaggaaatccagttatagcactagcagcgtatttagctggtcttgtggaagatggtaacgctaccacttcattccgtagttcactaaaatctatatctgaggtgcctcctgcactccaattagcaagtaggcactgttttattcttgaggatccaccaaatgaactcaaagacatttgtgttagtgtaaggtaagcaatgcttctgcctattttgcatagaagtgctcacaagttttttctaacgatataaatgaaatgtgctcttagcagtaagaaaaatacagatgctgatcaaacaaaagatgaggatatgatttcaaattcaatcgccaatgagaaaaaagagatcaatgagaaagaagataagtctttatctgtggaaaagacaaataattcatccatgtcacaaaatgaccatcaagaatcaaacattaagagtgtctcacgtgatgattgctcctcagtggagccaaaaggcaataatgctaaggagtcaagtgattcaactggtattggggatatgagtgcaatcggcactacaaaagatgttgttgcaggcaattctaaacaagtgaacgactcacctagtgttgaggtggaggctcctgatgactcttctttaaaaagcaaggatgagctcaatgatactgaagatgcagtggcgacaccagctaccgtacaggaacagaaacacagccaaacattggaaaatggtgataaggcagaacctaacaatattgaacgtgtagttgtccatgagaagggctctatagtgactgccaaccaaaatgattccataactaggctcaaacgagcagcagccactgctgtttcagcagctgctgtcaaagctaagtttctcggtgatcaggaggaatatcatattcgaaggctgacagcacttatgattgaaaagctgttccagaaattagaagtgaagatgtcgttgttttcagagattgagcaggtggtccttcgaacaagagagtacaccgagaagaccagaaaaaaactcctaatggaacgaaatgcgattattgcagctcgtatgggtgcattgccgtctaggccaaaccagcctggtgtagccggcaacaggttaccacctggatatggcaaccctcctttgaggtctccaaacgcaatgccgcggccttccagctgaggaaaatccggattccggacacccagtggtctatactccattcatttagaagcatacggacctcaaaaacctcaaacctgccagtttgttgtagcattttttagaaagtacattgtacaattgcctgtataactgcttatatgaaaattcaccattttcacttaattttgatgcacttgcttctaccaaacctccgcaactgtttaaaccttccatcaacagcagtacagcaccaccgccgagagctttttaggctatctccatcaccttacttatcctcgttccaatattcaaatcctattctgcg

SEQ ID NO: 5118 - DNA, 2594 bp, Zea Mays
gaagagagcaaagagagaagaagaggaagacgcggcgcgctcccctttccagtccccatccccggctggtatcgccgggagtaagacgggaccgtcgggacgaagccaccggcgcgacatggaggccaagccgtcttcagcggcacatggtgacgcgcccgcggtcgaggccccccgccgccgtggcagcggcggtaagcgcaagtcggccgggtcctcgttcacgccgtcgaagcggcaggccaaggagcggaacgctgccttccacgtgccccagcatcttcttcacagcgggccgctcacccgcgccgcgcgccactcgccgcacaagctcgcgggcactccgccggagtcggggccagcgtcatcgtcggccgcaactggagacggggtgagcggtgggcaggcggaggttgatgcgatccggcccgagacggaggagacgccggccccagagctgccgctggtggacgagatgttggaggcggtccgatcccgtggccctggcgtccatgtggtccctacctttgctggcagattttgacctctgttgtgtttgctataatgaagggaagttcgatccaggcatggccaaaactgatttcatcctcatggattctgcagaagtttcaggtgctagtggtactagttggactgatgaagagacattacttcttttagaaggtttggaaatttttggtggaaaatgggctgagattgctgaacatgttgctactaagacaaaagcacaatgcatgttgcactttcttcaaatgcaaatcgaagaccgcttccatgatggtgacgatattaatcaaaacatcccagtaagtacagagcaagccacaactgagaaagccattgttgaaacacctgagaaaatggaagttggagataaagtggaaggaagagataatgcggatgagaaggcctcggagaaaacagagggaagctgtgaagaaacaaaaactgaagatgcaaatgttgtaaataaagatactcagaaatcaggtggcaaagattcaggtgcatctccaagcactgaagaggcaaagcaatcttctgatgatcaacctatagtaaaggaaaattctgtagatgtagatacttctggtgaaaaactatcaaatgttgctattgatatcctaaaatgtgcatttgaggctgctggtcacagcccagaatatgaaggttcatttgctgatgcaggaaatccagttatagcactagcagcgtatttagctggtcttgtggaagatggtaacgctaccacttcattccgtagttcactaaaatctatatctgaggtgcctcctgcactccaattagcaagtaggcactgttttattcttgaggatccaccaaatgaactcaaagacatttgtgttagtgtaagtaagaaaaatacagatgctgatcaaacaaaagatgaggatatgatttcaaattcaatcgccaatgagaaaaaagagatcaatgagaaagaagataagtctttatctgtggaaaagacaaataattcatccatgtcacaaaatgaccatcaagaatcaaacattaagagtgtctcacgtgatgattgctcctcagtggagccaaaaggcaataatgctaaggagtcaagtgattcaactggtattggggatatgagtgcaatcggcactacaaaagatgttgttgcaggcaattctaaacaagtgaacgactcacctagtgttgaggtggaggctcctgatgactcttctttaaaaagcaaggatgagctcaatgatactgaagatgcagtggcgacaccagctaccgtacaggaacagaaacacagccaaacattggaaaatggtgataagaacctaacaatattgaacgtgtagttgtccatgagaagggctctatagtgactgccaaccaaaatgattccataactaggctcaaacgagcagcagccactgctgtttcagcagctgctgtcaaagctaagtttctcggtgatcaggaggaatatcatattcgaaggctgacagcacttatgattgaaaagctgttccagaaattagaagtgaagatgtcgttgttttcagagattgagcaggtggtccttcgaacaagagagtacaccgagaagaccagaaaaaaactcctaatggaacgaaatgcgattattgcagctcgtatgggtgcattgccgtctaggccaaaccagcctggtgtagccggcaacaggttaccacctggatatggcaaccctcctttgaggtctccaaacgcaatgccgcggccttccagctgaggaaaatccggattccggacacccagtggtctatactccattcatttagaagcatacggacctcaaaaacctcaaacctgccagtttgttgtagcattttttagaaagtacattgtacaattgcctgtataactgcttatatgaaaattcaccattttcacttaattttgatgcacttgcttctaccaaacctccgcaactgtttaaaccttccatcaacagcagtacagcaccaccgccgagagctttttaggctatctccatcaccttacttatcctcgttccaatattcaaatcctattctgcg

SEQ ID NO: 5119 - DNA, 3309 bp, Zea Mays
gcaaagagagaagaagaggaagacgcggcgcgctcccctttccagtccccatccccggctggtatcgccgggagtaagacgggaccgtcgggacgaagccaccggcgcgacatggaggccaagccgtcttcagcggcacatggtgacgcgcccgcggtcgaggccccccgccgccgtggcagcggcggtaagcgcaagtcggccgggtcctcgttcacgccgtcgaagcggcaggccaaggagcggaacgctgccttccacgtgccccagcatcttcttcacagcgggccgctcacccgcgccgcgcgccactcgccgcacaagctcgcgggcactccgccggagtcggggccagcgtcatcgtcggccgcaactggagacggggtgagcggtgggcaggcggaggttgatgcgatccggcccgagacggaggagacgccggccccagagctgccgctggtggacgagatgttggaggcggtccgatcccgtggccctggcgtccatgtggtccctacctttgctgcttctgactattcaagacatattagcaaccgtttctttaggattaatatcgggctcaatatctcatctgtaaattgtggttattgtctactcaaggcatattataatctttctttggggtagaattgaagaattcaaaaaactcgcagacaaagcattcaagtgattcatgctgactttcaaggatggttttcatggaaagaaatccactcggttgagaagcagatcttgccttctttttttaatggaaaatctgtgaagcggacacctgaggtgtatttggcgattagaaattcaatcatgatgaaatttcatgccaatcctcaattgcagctggagtccaaagatctggctgagttgtcaatcggagagagcgatgctcgacaggaagtcttggaattcttggaccattggggcttgataaatttccaccctttcccaccagctggacatgaagagagtaagccagaggagagccaagacaactctaatgatgagaaagcttctttgatcgagcagctgtttaaatttgaatcagttcaatcatatatgacacctttactgaacaaagaagatgtgggagctccaccccctctgcctagcttgtttcctgaacctgtactcattgaaaatatggttgcagcagctgagccttctgttgagtaccactgcaactcctgttcagttgattgctcacggaagcgctaccattgtcgaacccaggcagattttgacctctgttgtgtttgctataatgaagggaagttcgatccaggcatggccaaaactgatttcatcctcatggattctgcagaagtttcaggtgctagtggtactagttggactgatgaagagacattacttcttttagaaggtttggaaatttttggtggaaaatgggctgagattgctgaacatgttgctactaagacaaaagcacaatgcatgttgcactttcttcaaatgcaaatcgaagaccgcttccatgatggtgacgatattaatcaaaacatcccagtaagtacagagcaagccacaactgagaaagccattgttgaaacacctgagaaaatggaagttggagataaagtggaaggaagagataatgcggatgagaaggcctcggagaaaacagagggaagctgtgaagaaacaaaaactgaagatgcaaatgttgtaaataaagatactcagaaatcaggtggcaaagattcaggtgcatctccaagcactgaagaggcaaagcaatcttctgatgatcaacctatagtaaaggaaaattctgtagatgtagatacttctggtgaaaaactatcaaatgttgctattgatatcctaaaatgtgcatttgaggctgctggtcacagcccagaatatgaaggttcatttgctgatgcaggaaatccagttatagcactagcagcgtatttagctggtcttgtggaagatggtaacgctaccacttcattccgtagttcactaaaatctatatctgaggtgcctcctgcactccaattagcaagtaggcactgttttattcttgaggatccaccaaatgaactcaaagacatttgtgttagtgtaagtaagaaaaatacagatgctgatcaaacaaaagatgaggatatgatttcaaattcaatcgccaatgagaaaaaagagatcaatgagaaagaagataagtctttatctgtggaaaagacaaataattcatccatgtcacaaaatgaccatcaagaatcaaacattaagagtgtctcacgtgatgattgctcctcagtggagccaaaaggcaataatgctaaggagtcaagtgattcaactggtattggggatatgagtgcaatcggcactacaaaagatgttgttgcaggcaattctaaacaagtgaacgactcacctagtgttgaggtggaggctcctgatgactcttctttaaaaagcaaggatgagctcaatgatactgaagatgcagtggcgacaccagctaccgtacaggaacagaaacacagccaaacattggaaaatggtgataagaacctaacaatattgaacgtgtagttgtccatgagaagggctctatagtgactgccaaccaaaatgattccataactaggctcaaacgagcagcagccactgctgtttcagcagctgctgtcaaagctaagtttctcggtgatcaggaggaatatcatattcgaaggctgacagcacttatgattgaaaagctgttccagaaattagaagtgaagatgtcgttgttttcagagattgagcaggtggtccttcgaacaagagagtacaccgagaagaccagaaaaaaactcctaatggaacgaaatgcgattattgcagctcgtatgggtgcattgccgtctaggccaaaccagcctggtgtagccggcaacaggttaccacctggatatggcaaccctcctttgaggtctccaaacgcaatgccgcggccttccagctgaggaaaatccggattccggacacccagtggtctatactccattcatttagaagcatacggacctcaaaaacctcaaacctgccagtttgttgtagcattttttagaaagtacattgtacaattgcctgtataactgcttatatgaaaattcaccattttcacttaattttgatgcacttgcttctaccaaacctccgcaactgtttaaaccttccatcaacagcagtacagcaccaccgccgagagctttttaggctatctccatcaccttacttatcctcgttccaatattcaaatcctattctgcg

SEQ ID NO: 5120 - DNA, 2667 bp, Zea Mays
agaattgaagaattcaaaaaactcgcagacaaagcattcaagtgattcatgctgactttcaaggatggttttcatggaaagaaatccactcggttgagaagcagatcttgccttctttttttaatggaaaatctgtgaagcggacacctgaggtgtatttggcgattagaaattcaatcatgatgaaatttcatgccaatcctcaattgcagctggagtccaaagatctggctgagttgtcaatcggagagagcgatgctcgacaggaagtcttggaattcttggaccattggggcttgataaatttccaccctttcccaccagctggacatgaagagagtaagccagaggagagccaagacaactctaatgatgagaaagcttctttgatcgagcagctgtttaaatttgaatcagttcaatcatatatgacacctttactgaacaaagaagatgtgggagctccaccccctctgcctagcttgtttcctgaacctgtactcattgaaaatatggttgcagcagctgagccttctgttgagtaccactgcaactcctgttcagttgattgctcacggaagcgctaccattgtcgaacccaggcagattttgacctctgttgtgtttgctataatgaagggaagttcgatccaggcatggccaaaactgatttcatcctcatggattctgcagaagtttcaggtgctagtggtactagttggactgatgaagagacattacttcttttagaaggtttggaaatttttggtggaaaatgggctgagattgctgaacatgttgctactaagacaaaagcacaatgcatgttgcactttcttcaaatgcaaatcgaagaccgcttccatgatggtgacgatattaatcaaaacatcccagtaagtacagagcaagccacaactgagaaagccattgttgaaacacctgagaaaatggaagttggagataaagtggaaggaagagataatgcggatgagaaggcctcggagaaaacagagggaagctgtgaagaaacaaaaactgaagatgcaaatgttgtaaataaagatactcagaaatcaggtggcaaagattcaggtgcatctccaagcactgaagaggcaaagcaatcttctgatgatcaacctatagtaaaggaaaattctgtagatgtagatacttctggtgaaaaactatcaaatgttgctattgatatcctaaaatgtgcatttgaggctgctggtcacagcccagaatatgaaggttcatttgctgatgcaggaaatccagttatagcactagcagcgtatttagctggtcttgtggaagatggtaacgctaccacttcattccgtagttcactaaaatctatatctgaggtgcctcctgcactccaattagcaagtaggcactgttttattcttgaggatccaccaaatgaactcaaagacatttgtgttagtgtaagtaagaaaaatacagatgctgatcaaacaaaagatgaggatatgatttcaaattcaatcgccaatgagaaaaaagagatcaatgagaaagaagataagtctttatctgtggaaaagacaaataattcatccatgtcacaaaatgaccatcaagaatcaaacattaagagtgtctcacgtgatgattgctcctcagtggagccaaaaggcaataatgctaaggagtcaagtgattcaactggtattggggatatgagtgcaatcggcactacaaaagatgttgttgcaggcaattctaaacaagtgaacgactcacctagtgttgaggtggaggctcctgatgactcttctttaaaaagcaaggatgagctcaatgatactgaagatgcagtggcgacaccagctaccgtacaggaacagaaacacagccaaacattggaaaatggtgataaggcagaacctaacaatattgaacgtgtagttgtccatgagaagggctctatagtgactgccaaccaaaatgattccataactaggctcaaacgagcagcagccactgctgtttcagcagctgctgtcaaagctaagtttctcggtgatcaggaggaatatcatattcgaaggctgacagcacttatgattgaaaagctgttccagaaattagaagtgaagatgtcgttgttttcagagattgagcaggtggtccttcgaacaagagagtacaccgagaagaccagaaaaaaactcctaatggaacgaaatgcgattattgcagctcgtatgggtgcattgccgtctaggccaaaccagcctggtgtagccggcaacaggttaccacctggatatggcaaccctcctttgaggtctccaaacgcaatgccgcggccttccagctgaggaaaatccggattccggacacccagtggtctatactccattcatttagaagcatacggacctcaaaaacctcaaacctgccagtttgttgtagcattttttagaaagtacattgtacaattgcctgtataactgcttatatgaaaattcaccattttcacttaattttgatgcacttgcttctaccaaacctccgcaactgtttaaaccttccatcaacagcagtacagcaccaccgccgagagctttttaggctatctccatcaccttacttatcctcgttccaatattcaaatcctattctgcg

SEQ ID NO: 5121 - DNA, 2624 bp, Zea Mays
aagcattcaagtgattcatgctgactttcaaggatggttttcatggaaagaaatccactcggttgagaagcagatcttgccttctttttttaatggaaaatctgtgaagcggacacctgaggtgtatttggcgattagaaattcaatcatgatgaaatttcatgccaatcctcaattgcagctggagtccaaagatctggctgagttgtcaatcggagagagcgatgctcgacaggaagtcttggaattcttggaccattggggcttgataaatttccaccctttcccaccagctggacatgaagagagtaagccagaggagagccaagacaactctaatgatgagaaagcttctttgatcgagcagctgtttaaatttgaatcagttcaatcatatatgacacctttactgaacaaagaagatgtgggagctccaccccctctgcctagcttgtttcctgaacctgtactcattgaaaatatggttgcagcagctgagccttctgttgagtaccactgcaactcctgttcagttgattgctcacggaagcgctaccattgtcgaacccaggcagattttgacctctgttgtgtttgctataatgaagggaagttcgatccaggcatggccaaaactgatttcatcctcatggattctgcagaagtttcaggtgctagtggtactagttggactgatgaagagacattacttcttttagaaggtttggaaatttttggtggaaaatgggctgagattgctgaacatgttgctactaagacaaaagcacaatgcatgttgcactttcttcaaatgcaaatcgaagaccgcttccatgatggtgacgatattaatcaaaacatcccagtaagtacagagcaagccacaactgagaaagccattgttgaaacacctgagaaaatggaagttggagataaagtggaaggaagagataatgcggatgagaaggcctcggagaaaacagagggaagctgtgaagaaacaaaaactgaagatgcaaatgttgtaaataaagatactcagaaatcaggtggcaaagattcaggtgcatctccaagcactgaagaggcaaagcaatcttctgatgatcaacctatagtaaaggaaaattctgtagatgtagatacttctggtgaaaaactatcaaatgttgctattgatatcctaaaatgtgcatttgaggctgctggtcacagcccagaatatgaaggttcatttgctgatgcaggaaatccagttatagcactagcagcgtatttagctggtcttgtggaagatggtaacgctaccacttcattccgtagttcactaaaatctatatctgaggtgcctcctgcactccaattagcaagtaggcactgttttattcttgaggatccaccaaatgaactcaaagacatttgtgttagtgtaagtaagaaaaatacagatgctgatcaaacaaaagatgaggatatgatttcaaattcaatcgccaatgagaaaaaagagatcaatgagaaagaagataagtctttatctgtggaaaagacaaataattcatccatgtcacaaaatgaccatcaagaatcaaacattaagagtgtctcacgtgatgattgctcctcagtggagccaaaaggcaataatgctaaggagtcaagtgattcaactggtattggggatatgagtgcaatcggcactacaaaaggcaattctaaacaagtgaacgactcacctagtgttgaggtggaggctcctgatgactcttctttaaaaagcaaggatgagctcaatgatactgaagatgcagtggcgacaccagctaccgtacaggaacagaaacacagccaaacattggaaaatggtgataaggcagaacctaacaatattgaacgtgtagttgtccatgagaagggctctatagtgactgccaaccaaaatgattccataactaggctcaaacgagcagcagccactgctgtttcagcagctgctgtcaaagctaagtttctcggtgatcaggaggaatatcatattcgaaggctgacagcacttatgattgaaaagctgttccagaaattagaagtgaagatgtcgttgttttcagagattgagcaggtggtccttcgaacaagagagtacaccgagaagaccagaaaaaaactcctaatggaacgaaatgcgattattgcagctcgtatgggtgcattgccgtctaggccaaaccagcctggtgtagccggcaacaggttaccacctggatatggcaaccctcctttgaggtctccaaacgcaatgccgcggccttccagctgaggaaaatccggattccggacacccagtggtctatactccattcatttagaagcatacggacctcaaaaacctcaaacctgccagtttgttgtagcattttttagaaagtacattgtacaattgcctgtataactgcttatatgaaaattcaccattttcacttaattttgatgcacttgcttctaccaaacctccgcaactgtttaaaccttccatcaacagcagtacagcaccaccgccgagagctttttaggctatctccatcaccttacttatcctcgttccaatattcaaatcctattctgcg

SEQ ID NO: 5122 - DNA, 527 bp, Zea Mays
gttttaccgaggttcggttctcgcaaacctactccccgttgaggtggtcacaaagaccgggtctcttttaaccctttccctctctcaaatggtccctcggaccgagtgagcttctcttctcaaatcaaccgggaacaaaacttccccgcaaggaccaccacacaattggtgtctcttgcctcggttacaatcgagttttgatcacaagaacaattgagaaagaaagaagcaatccaagcgcaagaactcaaaagaacacgacaaatctctctcactagtcactaaagccttgagtggaattgggagaggatttgatcacttggtgtgtcttgtattgaatgcctagctcttgtaagtagttggaaggtcgaaaacttggatgactttaatgtggggtggttgggggtatttatagccccaaccaccacaaagtggccgttggaaggctgcagtcgcatggtgcaccggacagtccggtgcgccaccggacactgtccggtgcgccagcctacgtcagcagaccgttg

SEQ ID NO: 5123 - DNA, 3743 bp, Zea Mays
cgacgcagcagccatcaaaatggtatccaatttgaacgcaggtcggctgaaccatgccttcagcagttcggctgtgcaaaccgcgtagacccgttccggtgcagtttgtctggagacgtccagccggacctacatgtcagtgacctactgtccgtggatatagcctaactatcagacatgcagtaccaccctctctgcagggatcgaggcaggcaggcccattcacgagccagcatcctcaaacacgcgatggttattgcaccctctgactgacgcgtagggccacacctgtggactcgaagtgaatgcggtcaaacatagttcgcgcagcagtagcgcatttttaaactgcgatgaacccacgatagaattgacggatgtacccccaccacgcccccagtcccccactgttgatggtttgatggtggcctacctacctggcagaagcgcaaatagatgaacaatccgagggccattctgcctccaactcctcgaactttcccgcctgaaaccctctcgcctccctcgccatctcctaaaatatagggccacagtccaggacccactagtttctgctctcggcctgttcccttctatttctcgccccctactgattaaattttcttcgcacgaggaaaaaaatcaagtggcaagggcttgatctggtggccgacccatggtggaagggatggtagtggccgtgccgaatggggtgaaggcggatggcgccgccgccaccgccgccgccgctaaggcagattctcctaaatccgttctggaggacgagaaaatttctgaatccaagaatgggaacgcctccttagccacggagccagttaagcaaggggacgagacctcggacgattttgtggatgcaatgatgtcccttcctgttgaccatgaaatcgacagtgccgatgtgccccctgctgttgaggcagtcaaggacgaagaccagcttctggagcctgccaaggaggagaaatttgatgatttcctggatgcaggtttatctatacctattgatcttgaggccaagaatggtgatgtatccctgatcacagaagcaatgaaaaaggaagaagaacagctcgaggaggcgcggattaaggcagaggaagaagaggaagccaggaagagggaggaagttgcaaaacttgcttttgatcctgagtcgcggtatagcaagttagatgagctactgacgaagacacaactattttcagagttcctacttgagaaaatggataaaatcgccgatgaagttgttgaacctcaaggtgaagagtcaccagtagagaagaagaaaagacgtggccgaaagaggaaagctaatgccacaccacaatacaatgataattatggtgcttgctctaaaaaggccaagacagcagtggcagccatgcttacaagatctcgtgaagatcgtcttgctgatgactctactctctcggaagaagaaaggttgaaaaaagagcaagccaatcttgtgcctttaatgactggtgggaagttgaagtcgtaccagatcaagggtgtaaagtggctaatttcattgtggcagaatgggctaaatgggatacttgctgaccaaatgggccttgggaaaacaatccagacaattggatttcttgctcacctgaagggcaaaggcatgcatggtccatacttgataattgctcctctttccactctctcaaattgggtgaatgagatctcgaggtttgttccatctgtttctagtatcatttatcatggagataaagtggcccgagctgagataagaagaaaatttatgcctaaaactgctggtcctgattttcctataatagtgacttcatatgagattgctatgttagatgcaaggtttcttgctcactataggtggacgtatgttgttgtggatgagggacatcggttgaaaaattctaagtgtaaactattgagggagatgaagcgcataccaatggctaacaagctccttttgactgggacacccctccagaacaatctggcagagctgtggtcactattgaacttcattttgcctgatatattctcatccaatgaggaatttgaatcatggtttgatttttctgcgaaaggaagtgaagaaccagaagaaagtgaagaaaaaagaagggttcatgttgtttcaaagcttcatgccattttgcgcccatttcttctgagacggatgaaggaggatgtagaacaaatgcttccacggaagaaagagataatcatttatgctaacatgactgaggttcagaagcgaatcctgtatcacttagttgagaaaacctttgatgtctacttgatgattatctctttcttcctgttgcgtagacctggcatcaagacaaagctaaatagtctctttattcaattgaggaagaactgcgcccatcctgatcttttggaagctgcatttggaacaacaagcctttatccacctgttaataagcttttagagcaatgtggcaaatttcagcttctggacaggctactaacttccctacttgcacgcaagcataaggttctaatattctcacaatggacaaaagttttggacattcttgagtattacctagattcaaaaggccttggggtttgcagaattgatggtagtgttaatttggaagagaggcggcggcagatagcagagtttaatgatttgaatagcagtctgaatgtctttattctgagcacacgggctggcggacttggtatcaaccttacttctgctgatacatgtatcctttatgacagtgactggaatcctcagatggatcagcaggccatggatcgatgccaccggattggtcaaacacgcccagtgcatgtatataggctggctacctcatattctgttgaggagcggatcatcaagaaagcttttgggaagttaaagctagagcatgtggtgataggcaagggacagtttgaacaagaaagagcaaagcctaacgctttagaggagggggagctgctggcgctgcttagggacgagcaggacgaggaagatcggatgatccagaccgacatcagcgacgaagacctcttgaagctgatggaccggagcgacctgtccggaccacctggtgctgccgatgccgctccactgatcccgctgaaaggccctggctgggaggtcgtggtcccaaccaagagcggtggcggtatgctctcgtcgctcaccagctgagcgatgccggcaccatgtttggggtgcccattttgctagtcactcatcatgtggacgatggggcgcttgttggccggtcgccgatcaggcggatattttgcatgtatgcccccctacaaactgttgatctgggtgttgagcctgcaacagtagggttaggttatttcctcccgtgtccgtgccagtgacacgcaagtcggattgagttatgctgtgaacttctgatgagtcgctgcaagctgcctttctgacttgagctttttgctgcttctgttgctgcgttctatgatgtagtaacagtagctgatggtttacaccaaagcggagatggatgccctctatgatgtagtccttgctatataacttgaacactgatgtgattttctgtagtgtcaactgccatgctttatcggttttagtgtccttgtcggcagaagcgttgcaccatttttgtgatttgtgtccgcgtgtatggtgccaccttgtggacgtctcttctgatgaaatagaaactgttgtgcgagaatgaatccag

SEQ ID NO: 5124 - DNA, 4110 bp, Zea Mays
tggcagaagcgcaaatagatgaacaatccgagggccattctgcctccaactcctcgaactttcccgcctgaaaccctctcgcctccctcgccatctcctaaaatatagggccacagtccaggacccactagtttctgctctcggcctgttcccttctatttctcgccccctactgattaaattttcttcgcacgaggaaaaaaatcaagtggcaagggcttgatctggtggccgacccatggtggaagggatggtagtggccgtgccgaatggggtgaaggcggatggcgccgccgccaccgccgccgccgctaaggcagattctcctaaatccgttctggaggacgagaaaatttctgaatccaagaatgggaacgcctccttagccacggagccagttaagcaaggggacgagacctcggacgattttgtggatgcaatgatgtcccttcctgttgaccatgaaatcgacagtgccgatgtgccccctgctgttgaggcagtcaaggacgaagaccagcttctggagcctgccaaggaggagaaatttgatgatttcctggatgcaggtttatctatacctattgatcttgaggccaagaatggtgatgtatccctgatcacagaagcaatgaaaaaggaagaagaacagctcgaggaggcgcggattaaggcagaggaagaagaggaagccaggaagagggaggaagttgcaaaacttgcttttgatcctgagtcgcggtatagcaagttagatgagctactgacgaagacacaactattttcagagttcctacttgagaaaatggataaaatcgccgatgaagttgttgaacctcaaggtgaagagtcaccagtagagaagaagaaaagacgtggccgaaagaggaaagctaatgccacaccacaatacaatgataattatggtgcttgctctaaaaaggccaagacagcagtggcagccatgcttacaagatctcgtgaagatcgtcttgctgatgactctactctctcggaagaagaaaggttgaaaaaagagcaagccaatcttgtgcctttaatgactggtgggaagttgaagtcgtaccagatcaagggtgtaaagtggctaatttcattgtggcagaatgggctaaatgggatacttgctgaccaaatgggccttgggaaaacaatccagacaattggatttcttgctcacctgaagggcaaaggcatgcatggtccatacttgataattgctcctctttccactctctcaaattgggtgaatgagatctcgaggtttgttccatctgtttctagtatcatttatcatggagataaagtggcccgagctgagataagaagaaaatttatgcctaaaactgctggtcctgattttcctataatagtgacttcatatgagattgctatgttagatgcaaggtttcttgctcactataggtggacgtatgttgttgtggatgagggacatcggttgaaaaattctaagtgtaaactattgagggagatgaagcgcataccaatggctaacaagctccttttgactgggacacccctccagaacaatctggcagagctgtggtcactattgaacttcattttgcctgatatattctcatccaatgaggaatttgaatcatggtttgatttttctgcgaaaggaagtgaagaaccagaagaaagtgaagaaaaaagaagggttcatgttgtttcaaagcttcatgccattttgcgcccatttcttctgagacggatgaaggaggatgtagaacaaatgcttccacggaagaaagagataatcatttatgctaacatgactgaggttcagaagcgaatcctgtatcacttagttgagaaaacctttgatgtctacttgatgattatctctttcttccgtggaatttgcatttattcatgtttagacttacattctattacatctctaatgtaagaaccttgtaatttgacattattttggtttaccagtgttgcgtagacctggcatcaagacaaagctaaatagtctctttattcaattgaggaagaactgcgcccatcctgatcttttggaagctgcatttggaacaacaagcctttatccacctgttaataagcttttagagcaatgtggcaaatttcagcttctggacaggctactaacttccctacttgcacgcaagcataaggttctaatattctcacaatggacaaaagttttggacattcttgagtattacctagattcaaaaggccttggggtttgcagaattgatggtagtgttaatttggaagagaggcggcggcaggtaacatgctagcctgtgccaatatattactcctttcattccaaattataaaatattgacttttctagatacattacttttgctatgtatctagaatatacactcatgtggggagcctccacactggatctgccctagatacacactaagtctatatgcataacaaaaagtgatgtatctagaaaagccaaacgtctgtaatttgggacgtgtactatttttctaaagaacatctaaactctgaggatttgcactgtgttagatatcttggtacatgtataaatttatttcccttgtctgaattagaatttgcattgttgcatgctcttggtattaatgactttttacttgcaccattctgatggcacttgtatgtgctcacatattctttattttgttgatactgtttgtgttcagttcgattgttattgacacttcccaatttctcatttaacatcggcacatccaagtggcaaattctttagttggtcagcacgtaacattttctctccaacaatccaaccacaatttatgaaaacccatcgtttacagtagcaaagaagcaagcagtacctgtcgttgggtaaacacaaagaataacaaaagttgccttttgagcttttctgttgctccttttttttgctgctcgataatcgtctatctgtcgctacttttacttcacaaaaaatcttttgttactgttttttgttgcagatagcagagtttaatgatttgaatagcagtctgaatgtctttattctgagcacacgggctggcggacttggtatcaaccttacttctgctgatacatgtatcctttatgacagtgactggaatcctcagatggatcagcaggccatggatcgatgccaccggattggtcaaacacgcccagtgcatgtatataggctggctacctcatattctgttgaggagcggatcatcaagaaagcttttgggaagttaaagctagagcatgtggtgataggcaagggacagtttgaacaagaaagagcaaagcctaacgctttagaggagggggagctgctggcgctgcttagggacgagcaggacgaggaagatcggatgatccagaccgacatcagcgacgaagacctcttgaagctgatggaccggagcgacctgtccggaccacctggtgctgccgatgccgctccactgatcccgctgaaaggccctggctgggaggtcgtggtcccaaccaagagcggtggcggtatgctctcgtcgctcaccagctgagcgatgccggcaccatgtttggggtgcccattttgctagtcactcatcatgtggacgatggggcgcttgttggccggtcgccgatcaggcggatattttgcatgtatgcccccctacaaactgttgatctgggtgttgagcctgcaacagtagggttaggttatttcctcccgtgtccgtgccagtgacacgcaagtcggattgagttatgctgtgaacttctgatgagtcgctgcaagctgcctttctgacttgagctttttgctgcttctgttgctgcgttctatgatgtagtaacagtagctgatggtttacaccaaagcggagatggatgccctctatgatgtagtccttgctatataacttgaacactgatgtgattttctgtagtgtcaactgccatgctttatcggttttagtgtccttgtcggcagaagcgttgcaccatttttgtgatttgtgtccgcgtgtatggtgccaccttgtggacgtctcttctgatgaaatagaaactgttgtgcgagaatgaatccag

SEQ ID NO: 5125 - DNA, 3102 bp, Zea Mays
attttttttgtcgttttttcctcttgttttgggcttgatctggtggccgacccatggtggaagggatggtagtggccgtgccgaatggggtgaaggcggatggcgccgccgccaccgccgccgccgctaaggcagattctcctaaatccgttctggaggacgagaaaatttctgaatccaagaatgggaacgcctccttagccacggagccagttaagcaaggggacgagacctcggacgattttgtggatgcaatgatgtcccttcctgttgaccatgaaatcgacagtgccgatgtgccccctgctgttgaggcagtcaaggacgaagaccagcttctggagcctgccaaggaggagaaatttgatgatttcctggatgcaggtttatctatacctattgatcttgaggccaagaatggtgatgtatccctgatcacagaagcaatgaaaaaggaagaagaacagctcgaggaggcgcggattaaggcagaggaagaagaggaagccaggaagagggaggaagttgcaaaacttgcttttgatcctgagtcgcggtatagcaagttagatgagctactgacgaagacacaactattttcagagttcctacttgagaaaatggataaaatcgccgatgaagttgttgaacctcaaggtgaagagtcaccagtagagaagaagaaaagacgtggccgaaagaggaaagctaatgccacaccacaatacaatgataaaaaggccaagacagcagtggcagccatgcttacaagatctcgtgaagatcgtcttgctgatgactctactctctcggaagaagaaaggttgaaaaaagagcaagccaatcttgtgcctttaatgactggtgggaagttgaagtcgtaccagatcaagggtgtaaagtggctaatttcattgtggcagaatgggctaaatgggatacttgctgaccaaatgggccttgggaaaacaatccagacaattggatttcttgctcacctgaagggcaaaggcatgcatggtccatacttgataattgctcctctttccactctctcaaattgggtgaatgagatctcgaggtttgttccatctgtttctagtatcatttatcatggagataaagtggcccgagctgagataagaagaaaatttatgcctaaaactgctggtcctgattttcctataatagtgacttcatatgagattgctatgttagatgcaaggtttcttgctcactataggtggacgtatgttgttgtggatgagggacatcggttgaaaaattctaagtgtaaactattgagggagatgaagcgcataccaatggctaacaagctccttttgactgggacacccctccagaacaatctggcagagctgtggtcactattgaacttcattttgcctgatatattctcatccaatgaggaatttgaatcatggtttgatttttctgcgaaaggaagtgaagaaccagaagaaagtgaagaaaaaagaagggttcatgttgtttcaaagcttcatgccattttgcgcccatttcttctgagacggatgaaggaggatgtagaacaaatgcttccacggaagaaagagataatcatttatgctaacatgactgaggttcagaagcgaatcctgtatcacttagttgagaaaacctttgatgtctacttgatgattatctctttcttcctgttgcgtagacctggcatcaagacaaagctaaatagtctctttattcaattgaggaagaactgcgcccatcctgatcttttggaagctgcatttggaacaacaagcctttatccacctgttaataagcttttagagcaatgtggcaaatttcagcttctggacaggctactaacttccctacttgcacgcaagcataaggttctaatattctcacaatggacaaaagttttggacattcttgagtattacctagattcaaaaggccttggggtttgcagaattgatggtagtgttaatttggaagagaggcggcggcagatagcagagtttaatgatttgaatagcagtctgaatgtctttattctgagcacacgggctggcggacttggtatcaaccttacttctgctgatacatgtatcctttatgacagtgactggaatcctcagatggatcagcaggccatggatcgatgccaccggattggtcaaacacgcccagtgcatgtatataggctggctacctcatattctgttgaggagcggatcatcaagaaagcttttgggaagttaaagctagagcatgtggtgataggcaagggacagtttgaacaagaaagagcaaagcctaacgctttagaggagggggagctgctggcgctgcttagggacgagcaggacgaggaagatcggatgatccagaccgacatcagcgacgaagacctcttgaagctgatggaccggagcgacctgtccggaccacctggtgctgccgatgccgctccactgatcccgctgaaaggccctggctgggaggtcgtggtcccaaccaagagcggtggcggtatgctctcgtcgctcaccagctgagcgatgccggcaccatgtttggggtgcccattttgctagtcactcatcatgtggacgatggggcgcttgttggccggtcgccgatcaggcggatattttgcatgtatgcccccctacaaactgttgatctgggtgttgagcctgcaacagtagggttaggttatttcctcccgtgtccgtgccagtgacacgcaagtcggattgagttatgctgtgaacttctgatgagtcgctgcaagctgcctttctgacttgagctttttgctgcttctgttgctgcgttctatgatgtagtaacagtagctgatggtttacaccaaagcggagatggatgccctctatgatgtagtccttgctatataacttgaacactgatgtgattttctgtagtgtcaactgccatgctttatcggttttagtgtccttgtcggcagaagcgttgcaccatttttgtgatttgtgtccgcgtgtatggtgccaccttgtggacgtctcttctgatgaaatagaaactgttgtgcgagaatgaatccag

SEQ ID NO: 5126 - DNA, 3151 bp, Zea Mays
cctgttttatcgcacactcccaatttgtgttgctagtttggcactatttctggtttagggttctagtctcgtcgtgtgagggcttgatctggtggccgacccatggtggaagggatggtagtggccgtgccgaatggggtgaaggcggatggcgccgccgccaccgccgccgccgctaaggcagattctcctaaatccgttctggaggacgagaaaatttctgaatccaagaatgggaacgcctccttagccacggagccagttaagcaaggggacgagacctcggacgattttgtggatgcaatgatgtcccttcctgttgaccatgaaatcgacagtgccgatgtgccccctgctgttgaggcagtcaaggacgaagaccagcttctggagcctgccaaggaggagaaatttgatgatttcctggatgcaggtttatctatacctattgatcttgaggccaagaatggtgatgtatccctgatcacagaagcaatgaaaaaggaagaagaacagctcgaggaggcgcggattaaggcagaggaagaagaggaagccaggaagagggaggaagttgcaaaacttgcttttgatcctgagtcgcggtatagcaagttagatgagctactgacgaagacacaactattttcagagttcctacttgagaaaatggataaaatcgccgatgaagttgttgaacctcaaggtgaagagtcaccagtagagaagaagaaaagacgtggccgaaagaggaaagctaatgccacaccacaatacaatgataaaaaggccaagacagcagtggcagccatgcttacaagatctcgtgaagatcgtcttgctgatgactctactctctcggaagaagaaaggttgaaaaaagagcaagccaatcttgtgcctttaatgactggtgggaagttgaagtcgtaccagatcaagggtgtaaagtggctaatttcattgtggcagaatgggctaaatgggatacttgctgaccaaatgggccttgggaaaacaatccagacaattggatttcttgctcacctgaagggcaaaggcatgcatggtccatacttgataattgctcctctttccactctctcaaattgggtgaatgagatctcgaggtttgttccatctgtttctagtatcatttatcatggagataaagtggcccgagctgagataagaagaaaatttatgcctaaaactgctggtcctgattttcctataatagtgacttcatatgagattgctatgttagatgcaaggtttcttgctcactataggtggacgtatgttgttgtggatgagggacatcggttgaaaaattctaagtgtaaactattgagggagatgaagcgcataccaatggctaacaagctccttttgactgggacacccctccagaacaatctggcagagctgtggtcactattgaacttcattttgcctgatatattctcatccaatgaggaatttgaatcatggtttgatttttctgcgaaaggaagtgaagaaccagaagaaagtgaagaaaaaagaagggttcatgttgtttcaaagcttcatgccattttgcgcccatttcttctgagacggatgaaggaggatgtagaacaaatgcttccacggaagaaagagataatcatttatgctaacatgactgaggttcagaagcgaatcctgtatcacttagttgagaaaacctttgatgtctacttgatgattatctctttcttcctgttgcgtagacctggcatcaagacaaagctaaatagtctctttattcaattgaggaagaactgcgcccatcctgatcttttggaagctgcatttggaacaacaagcctttatccacctgttaataagcttttagagcaatgtggcaaatttcagcttctggacaggctactaacttccctacttgcacgcaagcataaggttctaatattctcacaatggacaaaagttttggacattcttgagtattacctagattcaaaaggccttggggtttgcagaattgatggtagtgttaatttggaagagaggcggcggcagatagcagagtttaatgatttgaatagcagtctgaatgtctttattctgagcacacgggctggcggacttggtatcaaccttacttctgctgatacatgtatcctttatgacagtgactggaatcctcagatggatcagcaggccatggatcgatgccaccggattggtcaaacacgcccagtgcatgtatataggctggctacctcatattctgttgaggagcggatcatcaagaaagcttttgggaagttaaagctagagcatgtggtgataggcaagggacagtttgaacaagaaagagcaaagcctaacgctttagaggagggggagctgctggcgctgcttagggacgagcaggacgaggaagatcggatgatccagaccgacatcagcgacgaagacctcttgaagctgatggaccggagcgacctgtccggaccacctggtgctgccgatgccgctccactgatcccgctgaaaggccctggctgggaggtcgtggtcccaaccaagagcggtggcggtatgctctcgtcgctcaccagctgagcgatgccggcaccatgtttggggtgcccattttgctagtcactcatcatgtggacgatggggcgcttgttggccggtcgccgatcaggcggatattttgcatgtatgcccccctacaaactgttgatctgggtgttgagcctgcaacagtagggttaggttatttcctcccgtgtccgtgccagtgacacgcaagtcggattgagttatgctgtgaacttctgatgagtcgctgcaagctgcctttctgacttgagctttttgctgcttctgttgctgcgttctatgatgtagtaacagtagctgatggtttacaccaaagcggagatggatgccctctatgatgtagtccttgctatataacttgaacactgatgtgattttctgtagtgtcaactgccatgctttatcggttttagtgtccttgtcggcagaagcgttgcaccatttttgtgatttgtgtccgcgtgtatggtgccaccttgtggacgtctcttctgatgaaatagaaactgttgtgcgagaatgaatccag

SEQ ID NO: 5127 - DNA, 879 bp, Zea Mays
cacaatataagctattaagctgttgcccccccctcccgaattaagattattgagggcatatgggtggttgaaaatcaggttggcaagaagacccttgctattgatgattgtgattccagacaatctgtctatgtgtatggatgcaaagattctgtccttcaagtaaacggcaaggttaacaatatcactgttgacaaatgcactaaatttggaatcgttttcaaggatgttgtagcagcttttgaggttgtcaactgcaatggcgttgaggtccaatgtcagggtacgtcaccgacaatatcaattgacaacacatctggatgtcaattatacttaagcaaagattcgctgggagcttcaattacttctgctaaatctagtgaaatcaatgtgatggttccaagtggcggctctgacggtgattgggtggagcatgcattgcctcagcagtacatccatagtttcaaggatgggcaattcaccacttcaccagtttcacactcgggggcgtaaatacaatttgttgctgctgtgtttgttttttatttcgcttttgccttgtttttgaagatgaacgtatgatgatgaggtttgtaacagttttgggtctcgcagcactggactggaccctgactgcgattgttgtttgtgttgccccttgctcggtgcgcggtgtgtatgttctgcatgcacgtggttccattcgattggtgtatttgtgtgccaacaaaccactatacgtggtgtgtgtgtgtgtctttagctgaccattctttgacactgaatctcactatatttgaattgatgtggacgcttgctttttcgagtctcttttcagattcttgtttaacaaagtgacaatgacaatgcagttatcgt

SEQ ID NO: 5128 - DNA, 1992 bp, Zea Mays
gttcgccggaggacagtcccgtaattgcgctccgcataatgcctgcgagtgtgccactgccactacagtgcccgcgccactgttttaaatcccctgccgccgctcaaccccgccgtcccccctctccggctctccgcgacgagatcctctgcaccggctctcccccattccatccattctcccaaaacagcactttcgaattccacggccgcgccgctccccacccaccattctgcgattctcccactggaaacggaggggagcgccatggcgtacatgtgcgcggacagcggcaacctcatggccatcgcgcagcaggtgattcagcagcagcagcagcaacagcagcaccagaggcaccaccaccacctgccgccgctcccgctcccgctcccgccgcgccaggcgccgccgatgccgccggccccggccccggcttccccgcacggccagatcccggcggcatccctaccgtacggcggcggcgcgtggtcccaggcggaccatttcttccctgacgccttcgtcggaacgtccccggccgacgcggtgttcccggacctctccgccgccgcggacttcgactccgatgtgtggatggacagcctcatcggggacgcaccggtcttcgcggactccgacctcgagcgcctcatcttcaccaccccgccgccgcccgtcgacgcggcggcccagcccgagtccgccactcgcgcgtcgcttccccagcctgccgccgtcgcaacggcggcagcgtgttcctctccgagctccttggacgcctcctgctccgcgcccatcctccagtccctcctcgcctgctcccgtacagcggccgctgacccagggctcgcggccgtagagctcgtcaaggtgcgtgctgccgcctccgaagatggggaccccgcggagcgcgtggcgttctacttcggggacgcgctggcgcgccgcctggcctgcggcggcggggcgcaagcgcaacccttgacggcggtggacgcgcgcttcgccaccgacgagctcacgctctgctacaagacactcaatgacgcctgcccctactccaagttcgcgcacctgaccgccaaccaggccatcctggaggctacgggcacggcgaccaagatccatatcgttgacttcgggatcgtgcagggtatccaatgggcggcgctgctccaggcgctcgccactcgcccaggggagaagccgtcccgagtgcgtatctccggtttaccctcgccgtacttggggccaaagccagcgacgtccctcgccgcaaccagtgcccgtctccgcgacttcgcaaagcttctcggggtggagttcgagtttgtcccattgctgcggtcagtgcacgagctggatcggtcggatttcttggttgagcctgacgagactgtagccgtcaatttcatgctccagttgtaccaccttcttggcgactccgatgagcccgtgcggcgagtcctccggctggttaagtcactcgatccatcagtcgtcacccttggcgagtatgaggtcagtctgaaccgagctgggttcgtcgaccggttttccaatgcactgttgtattacaagccagtgttcgagtcacttgatgtggcgatgccacgggactcaccggagagggtgagggtggagcgatgcatgtttggggagcgcattagaagggccattgggccagaggaaggcgctgagaggaccgataggatggcggctagtagggagtggcagacgctgatggagtggtgtggctttgaacccgtcaaactcagcaactacgccatgagccaggctgatcttttgctttggaattacgattcgaagtacaagtattcgcttgttgagctaccaccagcgttcttatctctggcttgggagaagcggccgctgctcaccgtgtctgcttggcggagatatggatccctaccgcacctttctgctcgccaccatcgccgtcccctctccttccctcatctacttcca

SEQ ID NO: 5129 - DNA, 1508 bp, Zea Mays
agcccgtggaaatggaaaggaatgctacagaaccaatcaacaagccaagccaactgaccccttccgtcccggtgaagtgccaaacgcgtgattccattcgggaggcagggttgagcatcattggagtggaagaaaggaatcatgttcaggagaaagcatgcttctcattccaactcaagtgatgctgagcagcaagaagcaaagataaatgaattaaaatctgcacttggtcctttgtctgcccatggcgagaagtactgcagtgacacatgtttcagaagatatcttgaagcccggaactggaatgtcactaagtcgagaaaaatgcttgaagaaagtctcaaatggagggcaacttataagccagaggatattcgctggcctgatgtttctgttgaagcggaaacgggaaaaatgtacaaggcaaattttcgagatagagaggggagaactgtaatcattatgaggcctacaaaggagaattcaacgtcccatgacggtcagattcggtttcttgtgtatgttttggagaatgcgatcctggaccaacgtgaaggtcaagagaaaatggtatggctgatagacttcacgggatggacaatggcccatgccacacccataaagactgcaagagaatgtacaagcatcctgcaaaatcattaccctgagaggctggccattgcatttctgttgaatcccccaaaagtattcgaagccttttacagggctgttaaatatttccttgacccaagatcgatcgagaaactgaacttcgtgtacctgaaggatgaggagagcatgaaggtcctgtacaagtgcattgatcccgtggtccttcctgtggagttcgggggaaagaacagtgttgtgtacaaccatgaggactactccaagttgatgctgcaagaagatatcgaaacatcaagcttctgggaggatgatgcgaaaactgttaaccatgctatcaatgggaccttggttcctgatgttgcatctcagctgtcacggattgctgctaaagccagttaatgagctactacgatgggagctattcagaatgctttaatggagtaactagaaagtcgagcgccaataaaatgttcatagtaaacagaaatagagcaaataacagatgagatatcacttgtccatagtcgaaatagttgcacttatcgaacactttattcagtacacgatgagttacaggagactatcgtaatgatgtaagaggtagaagtgctacctgcttaatgtacctcaaaagcccttaaggctttacttgttttagccgtggctacggagaagctaattctgggttatggcttttaaaatgctggttctatatttggatttgattatggctgaagtagctcaccatcttatggattctagtagtagtggcactccgtcgcaaattatagtgtactttagatgtatcgtcgcaaacattatcatgctgtgatttcaacggccttatgatatacaccctgttgaacatctggaaggag

SEQ ID NO: 5130 - DNA, 2831 bp, Zea Mays
caatcaacaagccaagccaactgaccccttccgtcccggtgaagtgccaaacgcgtgattccattcgggaggcaggttggtgtgcgttgagccgttgattcctgcgcactgcgctgcgcctcaaggccaacgcccggcgaggacaggatgaggggacagcgggcgacgagagggaggaaaatcccagtccaactctaggcgcttcccttctcccttttcctttcttcttccctgaggcgccggccccgctcaggtcgggacctgccgccatttcagaactcctagcttcttctagttcgtggttgctgcgcgccttgcgtaccctggtacggacctcgatgcgtttttctttctgccccctcctcctgccatctcggttgatggattgctgtaaggtgtggtggatctcggtggattgctgcgaggcgtggcggattcgttgccggctcgtgttccgatgacacgcagtagctagagtttctgttctgctacattcctggctttcttgttatctgtttattgctagttcaccgcttgaatttgatcggacgtctccaccattgagcatgtggagaatacgccaattcggagatcttgcctaccttttccgttcaacggatgttcgtctgtgtacctatcatattcatctgtcagatctattattcttctcccatcccatatgattaattgggacatcatcgaatgtgtcattttcgccgtttatgtacgttatcctgagagaattcaatgggcccttcccagcttatcgagtttctctagtataattgagttttttatcttctctttccttctacgttgttaacagtacatagaacatgtaactatataattagttgctgccggcacctgtacctgctcattttcatattccaattttatatgtccaactggagccagatggtaaatcatctgttgcctttcctgacatggcagggctctggcccacataacaatagaatattgaatatttaatacttaatctaaattatagttttttaacctactttttttcacattcaaatgataatgaatataaacatatatgaaaactacatttatatgttacttaataaatatataattagtctaaaacgaattatattttagaatggagggagtagaagattgtttctttcctggatagcaacaactgaacacgtcggtgttatttgcaaatccagagctgggcccaaatctgggcatggtctattcctcatcttaactcaatcagactccacatatttatgtaaatattctgaaagcgaaagcaagtattactctgcagtgtctcactttgcatactatcaccagtgttgtgtaaaatacctttgaattatgttgtgagattgaattggtggtgtgttattattttgtattgtttaatattttcttatgtgtcatacatcatagggttgagcatcattggagtggaagaaaggaatcatgttcaggagaaagcatgcttctcattccaactcaagtgatgctgagcagcaagaagcaaagataaatgaattaaaatctgcacttggtcctttgtctgcccatggcgagaagtactgcagtgacacatgtttcagaagatatcttgaagcccggaactggaatgtcactaagtcgagaaaaatgcttgaagaaagtctcaaatggagggcaacttataagccagaggatattcgctggcctgatgtttctgttgaagcggaaacgggaaaaatgtacaaggcaaattttcgagatagagaggggagaactgtaatcattatgaggcctacaaaggagaattcaacgtcccatgacggtcagattcggtttcttgtgtatgttttggagaatgcgatcctggaccaacgtgaaggtcaagagaaaatggtatggctgatagacttcacgggatggacaatggcccatgccacacccataaagactgcaagagaatgtacaagcatcctgcaaaatcattaccctgagaggctggccattgcatttctgttgaatcccccaaaagtattcgaagccttttacagggctgttaaatatttccttgacccaagatcgatcgagaaactgaacttcgtgtacctgaaggatgaggagagcatgaaggtcctgtacaagtgcattgatcccgtggtccttcctgtggagttcgggggaaagaacagtgttgtgtacaaccatgaggactactccaagttgatgctgcaagaagatatcgaaacatcaagcttctgggaggatgatgcgaaaactgttaaccatgctatcaatgggaccttggttcctgatgttgcatctcagctgtcacggattgctgctaaagccagttaatgagctactacgatgggagctattcagaatgctttaatggagtaactagaaagtcgagcgccaataaaatgttcatagtaaacagaaatagagcaaataacagatgagatatcacttgtccatagtcgaaatagttgcacttatcgaacactttattcagtacacgatgagttacaggagactatcgtaatgatgtaagaggtagaagtgctacctgcttaatgtacctcaaaagcccttaaggctttacttgttttagccgtggctacggagaagctaattctgggttatggcttttaaaatgctggttctatatttggatttgattatggctgaagtagctcaccatcttatggattctagtagtagtggcactccgtcgcaaattatagtgtactttagatgtatcgtcgcaaacattatcatgctgtgatttcaacggccttatgatatacaccctgttgaacatctggaaggag

SEQ ID NO: 5131 - DNA, 1473 bp, Zea Mays
cagatctattattcttctcccatcccatatgattaattgggacatcatcgaatgtgtcattttcgccgtttatggttgagcatcattggagtggaagaaaggaatcatgttcaggagaaagcatgcttctcattccaactcaagtgatgctgagcagcaagaagcaaagataaatgaattaaaatctgcacttggtcctttgtctgcccatggcgagaagtactgcagtgacacatgtttcagaagatatcttgaagcccggaactggaatgtcactaagtcgagaaaaatgcttgaagaaagtctcaaatggagggcaacttataagccagaggatattcgctggcctgatgtttctgttgaagcggaaacgggaaaaatgtacaaggcaaattttcgagatagagaggggagaactgtaatcattatgaggcctacaaaggagaattcaacgtcccatgacggtcagattcggtttcttgtgtatgttttggagaatgcgatcctggaccaacgtgaaggtcaagagaaaatggtatggctgatagacttcacgggatggacaatggcccatgccacacccataaagactgcaagagaatgtacaagcatcctgcaaaatcattaccctgagaggctggccattgcatttctgttgaatcccccaaaagtattcgaagccttttacagggctgttaaatatttccttgacccaagatcgatcgagaaactgaacttcgtgtacctgaaggatgaggagagcatgaaggtcctgtacaagtgcattgatcccgtggtccttcctgtggagttcgggggaaagaacagtgttgtgtacaaccatgaggactactccaagttgatgctgcaagaagatatcgaaacatcaagcttctgggaggatgatgcgaaaactgttaaccatgctatcaatgggaccttggttcctgatgttgcatctcagctgtcacggattgctgctaaagccagttaatgagctactacgatgggagctattcagaatgctttaatggagtaactagaaagtcgagcgccaataaaatgttcatagtaaacagaaatagagcaaataacagatgagatatcacttgtccatagtcgaaatagttgcacttatcgaacactttattcagtacacgatgagttacaggagactatcgtaatgatgtaagaggtagaagtgctacctgcttaatgtacctcaaaagcccttaaggctttacttgttttagccgtggctacggagaagctaattctgggttatggcttttaaaatgctggttctatatttggatttgattatggctgaagtagctcaccatcttatggattctagtagtagtggcactccgtcgcaaattatagtgtactttagatgtatcgtcgcaaacattatcatgctgtgatttcaacggccttatgatatacaccctgttgaacatctggaaggag

SEQ ID NO: 5132 - DNA, 1611 bp, Zea Mays
atgaccaccggccacatgaaccccaactacactttgtcaatgatcatgccgctagtaacaaagaccttcaacctattgtcgatgctcgagggcacaaaactgaagcgtacaatggtggggaagatcaagaaacaatgttgggctttgagggaccttgttgctagtgtgaaggacaagacaaaggctcatgtgcgtcgcgtcgattcctggtcttcgagaggagcggaggaggagggcggcgagtgcggaggagaggcgagttcagctgtagcgtttcgcttcttgcccgtggcggcggcggtgccacctcgaacgctgctccctgttctggggcttactgcggatcctgatctgagcatcattcagagaggaagaaatatgtttaggagaaagcatggcgctgatgtcaactcagatgatgctgagcaaagagaagcaaagattagtgaactgaaagctgctcttgggactttgtctgcccgtggcgagaagtactgcagtgaagcatgcttgagaagatatctggaagcccgtaactggaatgttgctaagtcgagaaaaatgctggaagaaagtctcaagtggagggcagcttacaagccagaggatattcgttggaatacttcatcccatgaagggcagatacggttcctagtatatactttggagaatgcaatcttcagcctgcctgaaggccaagaaaaaatggtatggctgattgatttcacaggatggacagtgtcccatgcttcgccaataaagacttgtagagaaactgcaaatatactgcaaaatcattttcctgaaaggctggccattggatttctatttaacccccccaaagtatttgaagctttttataaggtcatcaagattttcctcgatccaaaatcggtcgagaaggtgaacttcgtgtaccagaaggatgaggagagcatgaaggtcatgtacaaatacatcgatccggaagtccttcctgtagagtttggggggaagagcaatgtggtgtacaaccacgaggagtactccgagttaatgatacaagatgacatcaaaacagcaagcttttgggcagttgatgcgaaaactaaccatgctaaccctgccatcaatgggaccttggttcctgaggttgcgccacagtcgtcgtcgctggctgctaaagctagttgaagagtatctgcattctctgagaaaattgagaagccgaagactaatggaaccttgagagaaacatatgaaataagaaacatggtatactcgttcatcctcaagagttgtttcagtactggaagtttattcagcacacaataagctactagagaatgtcaccatgtgtgatttgatgcccaaaagagatggtttacaaggtacagccaagtttttgtacttgaattaattactatatgtcagtgattatcacatggataagtaactagcacaagcttaaccgtttacttttctcttattccttttacgatatactttgtcttctcgctaatcaatcgagtgtttctttcgatgatttaaaggttttgagctgtcctagtgctaataactctgcatgaaacagcaagcgtctcctcatgaaatgtcatagaaaaaactctg

SEQ ID NO: 5133 - DNA, 1710 bp, Zea Mays
atgaccaccggccacatgaaccccaactacactttgtcaatgatcatgccgctagtaacaaagaccttcaacctattgtcgatgctcgagggcacaaaactgaagcgtacaatggtggggaagatcaagaaacaatgttgggctttgagggaccttgttgctagtgtgaaggacaagacaaaggctcatgtgcgtcgcgtcgattcctggtcttcgagaggagcggaggaggagggcggcgagtgcggaggagaggcgagttcagctgtagcgtttcgcttcttgcccgtggcggcggcggtgccacctcgaacgctgctccctgttctggggcttactgcggatcctgatctgagcatcattcagagaggaagaaatatgtttaggagaaagcatggcgctgatgtcaactcagatgatgctgagcaaagagaagcaaagattagtgaactgaaagctgctcttgggactttgtctgcccgtggcgagaagtactgcagtgaagcatgcttgagaagatatctggaagcccgtaactggaatgttgctaagtcgagaaaaatgctggaagaaagtctcaagtggagggcagcttacaagccagaggatattcgttggcctgatgtttctgtcgaagcggaaacaggtaaaatgtacagggcaagtttccgagacagggagggcagaactgttgttgtcatgaaacctacaaaacaaaatacttcatcccatgaagggcagatacggttcctagtatatactttggagaatgcaatcttcagcctgcctgaaggccaagaaaaaatggtatggctgattgatttcacaggatggacagtgtcccatgcttcgccaataaagacttgtagagaaactgcaaatatactgcaaaatcattttcctgaaaggctggccattggatttctatttaacccccccaaagtatttgaagctttttataaggtcatcaagattttcctcgatccaaaatcggtcgagaaggtgaacttcgtgtaccagaaggatgaggagagcatgaaggtcatgtacaaatacatcgatccggaagtccttcctgtagagtttggggggaagagcaatgtggtgtacaaccacgaggagtactccgagttaatgatacaagatgacatcaaaacagcaagcttttgggcagttgatgcgaaaactaaccatgctaaccctgccatcaatgggaccttggttcctgaggttgcgccacagtcgtcgtcgctggctgctaaagctagttgaagagtatctgcattctctgagaaaattgagaagccgaagactaatggaaccttgagagaaacatatgaaataagaaacatggtatactcgttcatcctcaagagttgtttcagtactggaagtttattcagcacacaataagctactagagaatgtcaccatgtgtgatttgatgcccaaaagagatggtttacaaggtacagccaagtttttgtacttgaattaattactatatgtcagtgattatcacatggataagtaactagcacaagcttaaccgtttacttttctcttattccttttacgatatactttgtcttctcgctaatcaatcgagtgtttctttcgatgatttaaaggttttgagctgtcctagtgctaataactctgcatgaaacagcaagcgtctcctcatgaaatgtcatagaaaaaactctg

SEQ ID NO: 5134 - DNA, 1773 bp, Zea Mays
atggcccccgtcctcaccgttgccccctcctccaaccagatccgtcgcatggccccctgtcctacccgcgacgccgccgctgctgtttgggtttttgcggttgactccgaatcccgccgccgctgctcgtgcaggaggcctcgagctcccagtgctcccctcctcaaccaccccgggctttccggagcgcagcaaggacgcttgggtaggtcggcttccaagcagccccggagatctcggtcctcgcccacactcttgcctcgaatcccgccgccgctgctcgtgcaggaggccttgagctcccagtgctcccctcctcaaccaccccggaatcttcatgatgcagctaatatcgctgcattggcagctttatctactttctggaggcctgaatgcacggttggtggggacgatggtcagcaagttacagtgcatgatcctgaggttagggatccacttcctcttacgatacaccatatgcccatagctgtaacatttgcatattttggtgaaggtaacatcgtggttcttgatcccacatacaaggaagaagcagtaatgggagggaggatgactgctatagttaactcaaatggggatgtttgtgccattcagaaagctggtggagagggtctcatgtcaagtgttaccatgcagtgtttaagaattgcttcggtaaaggctactgatataacaagcaaaataaagaaagcagtacttatttgggatgttgaagcacaaccaaatagacatgctgtcctaggatcaagcgagtctcgccctgatctgatattaacaggacataaggaaaatgcggaatttgcgcttgccatgtgtccagcagaaccatatgtcctatcaggagatgttgaagacgagaagatggcagcgtggaaggcgcttggcgcgatgttgctggtgcagctgttcaacacgggcaaggcctgtgcttgtgcagaatgcaccaaggacaagactggatgcagggacatgggggacgatggggattggattggggtgaacaagggcttcaacagtgatgctgttttagcaatggagacgatccattccctgtcagcttcaaaatcaagttacccaatggctgatctcacccaactcttcatgacagctacccaagaagggaaaagatcagaatcgcaaggccagattcttagggtggaatgctatagcttaatgccctaatctttatatgcctcttcttatatctgcacttccatgggcaccgggcgacactaaattcacaagataccccctccacctcaaggtgtggtatggagttctgtgtatcacaagaggcatctaggttgacctcactcttcttagtgttcatgcccactacgcaagacaacaccgcaacgccgatggagttggaagatttcattagtttcgactggatctggatgagatggactctgcttgtaaggagagagagagtgcatggcttgggaggagcatatttttgttcatccttttcatgagtcatgttacctgccatgtcagattatgtaacttcagatatttctgtttttgttagaaaagtaccaaaatagtttcacttcatggctactctcagatgtgttattgttgctgccactaatcatataagggtaacattgtatttgttagccaacaatttttgagatattaaagttggtgataatataattgttgtttgtttctatgtaatcgttgtgcactaatattttgctgaatattttattgtgtcgttgcaaagcacgggcacatacctag

SEQ ID NO: 5135 - DNA, 2168 bp, Zea Mays
atggcccccgtcctcaccgttgccccctcctccaaccagatccgtcgcatggccccctgtcctacccgcgacgccgccgctgctgtttgggtttttgcggttgactccgaatcccgccgccgctgctcgtgcaggaggcctcgagctcccagtgctcccctcctcaaccaccccgggctttccggagcgcagcaaggacgcttgggtaggtcggcttccaagcagccccggagatctcggtcctcgcccacactcttgcctcgaatcccgccgccgctgctcgtgcaggaggccttgagctcccagtgctcccctcctcaaccaccccggaatcttcatgatgcagctaatatcgctgcattggcagctttatctactttctggaggcctgaatgcacggttggtggggacgatggtcagcaagttacagtgcatgatcctgaggttagggatccacttcctcttacgatacaccatatgcccatagctgtaacatttgcatattttggtgaaggtaacatcgtggttcttgatcccacatacaaggaagaagcagtaatgggagggaggatgactgctatagttaactcaaatggggatgtttgtgccattcagaaagctggtggagagggtctcatgtcaagtgttaccatgcagtgtttaagaattgcttcggtaaaggctactgatataacaagcaaaataaagaaagcagtacttatttgggatgttgaagcacaaccaaatagacatgctgtcctaggatcaagcgagtctcgccctgatctgatattaacaggacataaggaaaatgcggaatttgcgcttgccatgtgtccagcagaaccatatgtcctatcaggagatgttgaagacgagaagatggcagcgtggaaggcgcttggcgcgatgttgctggtgcagctgttcaacacgggcaaggcctgtgcttgtgcagaatgcaccaaggacaagactggatgcagggacatgggggacgatggggattggattggggtactgtattgcagctgcagtagctgaacctgaatgactcgtggttgctgtggagggcgattctggatttggcttcagtgcaatggaggttgatgtacgaatacaaacatgacagcttcactttgaaagactaatctctactactctataagtctgcatgggttgctttatagtttgctcttagagttattggtcaatctgcttcttgtatctctggaatgcgatattatattggttaatataacaacatgccccccttgaattttaaggtgaacaagggcttcaacagtgatgctgttttagcaatggagacgatccattccctgtcagcttcaaaatcaagttacccaatggctgatctcacccaactcttcatgacagctacccaagaagggaaaagatcagaatcgcaaggccagattcttagggtggttcttgatgttaatgggctgaagcgcgaggcggcgtcccgcggcggcgccacggggcacgacaaactgcggctgctcatcatctcccggcgtggctcacgacggttcctgaacgagcgggagatggagcgcgccgcgggcgacgccgggttctaggtgcgggtggcggagctcgaccagccacggacatggcgacgttcgtggcgctggtgaactattcccatagagtaaaaggtggtatggagttctgtgtatcacaagaggcatctaggttgacctcactcttcttagtgttcatgcccactacgcaagacaacaccgcaacgccgatggagttggaagatttcattagtttcgactggatctggatgagatggactctgcttgtaaggagagagagagtgcatggcttgggaggagcatatttttgttcatccttttcatgagtcatgttacctgccatgtcagattatgtaacttcagatatttctgtttttgttagaaaagtaccaaaatagtttcacttcatggctactctcagatgtgttattgttgctgccactaatcatataagggtaacattgtatttgttagccaacaatttttgagatattaaagttggtgataatataattgttgtttgtttctatgtaatcgttgtgcactaatattttgctgaatattttattgtgtcgttgcaaagcacgggcacatacctag

SEQ ID NO: 5136 - DNA, 1505 bp, Zea Mays
ggcatgttcgtcttggccctcctcacctaccgcagcttcttcgcggcgccatcatcctccctgtccgtctgattttctatcagccgccgccgccgacgatggaggagcagcacctctcgtctgtccaccgctgaccgctcgtttgtcagcctagcaccggggtgcatgaacgcccagtatatgctacagcaccgccgcccctggccctgccgcctgcgccgctcgttgccctgtgcactccgcgggccttgggaatggccaaccaggatatttatcggtttgcccaccctctcctctcttctcttctctcccgcccgctctccctctctcccttctctccggcttccgattgggtattgtttattggcttctggctttaattaattactgtatttgcatgttcaggtgtatttttctgtttcagttggcatatcatcatgaggatgtgaattccacaggaagacccatgtgatcttattgctcccttagatcttccacattttttacagtcttattccttgccgaggggagtcctgctccagtagtggtctcagaaggggcaaataccatggatgttggcaggcctgtgcttgtgcagaatgcaccaaggacaagactggatgcagggacatgggggacgatggggattggattggggtactgtattgcagctgcagtagctgaacctgaatgactcgtggttgctgtggagggcgattctggatttggcttcagtgcaatggaggttgatgtgaacaagggcttcaacagtgatgctgttttagcaatggagacgatccattccctgtcagcttcaaaatcaagttacccaatggctgatctcacccaactcttcatgacagctacccaagaagggaaaagatcagaatcgcaaggccagattcttagggtggaatgctatagcttaatgccctaatctttatatgcctcttcttatatctgcacttccatgggcaccgggcgacactaaattcacaagataccccctccacctcaaggtggtatggagttctgtgtatcacaagaggcatctaggttgacctcactcttcttagtgttcatgcccactacgcaagacaacaccgcaacgccgatggagttggaagatttcattagtttcgactggatctggatgagatggactctgcttgtaaggagagagagagtgcatggcttgggaggagcatatttttgttcatccttttcatgagtcatgttacctgccatgtcagattatgtaacttcagatatttctgtttttgttagaaaagtaccaaaatagtttcacttcatggctactctcagatgtgttattgttgctgccactaatcatataagggtaacattgtatttgttagccaacaatttttgagatattaaagttggtgataatataattgttgtttgtttctatgtaatcgttgtgcactaatattttgctgaatattttattgtgtcgttgcaaagcacgggcacatacctag

SEQ ID NO: 5137 - DNA, 764 bp, Zea Mays
gaaacagcagctagagtgaaagtaattgattttggatcagcacttccatggaggttaatgggctgaagcgcgaggcggcgtcccgcggcggcgccacggggcacgacaaactgcggctgctcatcatctcccggcgtggctcacgacggttcctgaacgagcgggagatggagcgcgccgcgggcgacgccgggttctaggtgcgggtggcggagctcgaccagccacggacatggcgacgttcgtggcgctggtgaactattcccatagagtaaaaggtggtatggagttctgtgtatcacaagaggcatctaggttgacctcactcttcttagtgttcatgcccactacgcaagacaacaccgcaacgccgatggagttggaagatttcattagtttcgactggatctggatgagatggactctgcttgtaaggagagagagagtgcatggcttgggaggagcatatttttgttcatccttttcatgagtcatgttacctgccatgtcagattatgtaacttcagatatttctgtttttgttagaaaagtaccaaaatagtttcacttcatggctactctcagatgtgttattgttgctgccactaatcatataagggtaacattgtatttgttagccaacaatttttgagatattaaagttggtgataatataattgttgtttgtttctatgtaatcgttgtgcactaatattttgctgaatattttattgtgtcgttgcaaagcacgggcacatacctag

SEQ ID NO: 5138 - DNA, 547 bp, Zea Mays
atggagtccgttgcttcggtcggtttatagccgagattgaaaatctgtaagggacagctaggtggtatggagttctgtgtatcacaagaggcatctaggttgacctcactcttcttagtgttcatgcccactacgcaagacaacaccgcaacgccgatggagttggaagatttcattagtttcgactggatctggatgagatggactctgcttgtaaggagagagagagtgcatggcttgggaggagcatatttttgttcatccttttcatgagtcatgttacctgccatgtcagattatgtaacttcagatatttctgtttttgttagaaaagtaccaaaatagtttcacttcatggctactctcagatgtgttattgttgctgccactaatcatataagggtaacattgtatttgttagccaacaatttttgagatattaaagttggtgataatataattgttgtttgtttctatgtaatcgttgtgcactaatattttgctgaatattttattgtgtcgttgcaaagcacgggcacatacctag

SEQ ID NO: 5139 - DNA, 254 bp, Zea Mays
ccttgcttcacgaggagaacctcttgtcttgtagctgggaggggagggagcattgacatccgtggataacatatcacattcaggtgaaacaggtggctgtctcttatgttctgtctttatcaccaaatttgagttatgaccagaattattaatcttatctgttggatatggcttaccctcctcaacatcatggactcctttataacctctttgagaatctttttcagtttggtccactgtctcatcatccattg

SEQ ID NO: 5140 - DNA, 235 bp, Zea Mays
cttgtgaggaggaagtgtgaaatctagtccgccaccaaaaccgcgccctgaaccaccccatggagcggttccataacctgaatgaaaacttttattcatgcctcgaccagcagcaggcctccagtcacctctaccacgaccagagaaagggcctgaaggtccagcagggcggaactgaccaggaccaccaggtaccccacctgctgaagcaacaggagcgccagggcgtacatac

SEQ ID NO: 5141 - DNA, 2050 bp, Zea Mays
ccgcggcccactcaaaccaaaccccactcgcccagccgccgcgtaccgcaccacaccacaccacaccaggctcctcgacagtcgatagcctcccaagtcccaactcgacctgagccgattcggaaggacggtttgcctacctctggttccggcggccatggcggtggcggcccctggccagctcaacctcgacgaggccccgtcatggggctcccgcagcgtagactgcttcgagaagctcgagcagatcggcgagggcacctacgggcaagtgtacatggcgaaggagacgggcaccaacgagatcgtcgcgctcaagaagatccgcatggacaacgagcgcgaagggttcccgatcaccgccatacgcgagatcaaaatcctgaagaagcttcaccaccagaacgttatcaagctcaaggagatcgtcacctccccaggcccagagcgggacgagcaagggaagccaattgacggtaacaagtacaaggggagcatttacatggttttcgagtatatggaccatgatctcaccgggcttgctgatcggccaggaatgcggttcactgtgccgcagattaagctgcttacaggcctgcactattgtcatgtcaaccaagttctgcatcgagatatcaaaggatctaaccttttgatagacaatgagggtaacttgaagcttgctgattttggccttgcaagatcattctcgagtgatcacaatggcaaccttactaaccgtgtgatcactttgtggtatagacctccagagttgctacttggaagcacaaagtatggcccagccgttgacatgtggtcagtgggctgtatttttgcagaacttctcaatgggaagccaatattgcctggaaagaatgagccagagcagctgactaagatcttcgagctttgtggtacccctgatgacacaatctggcctggtgtcacaaaaatgccttggtacaacaacttcaagcctccccggccattaaagagacgagttaaagatttctttaagcattttgatcgacatgcactggatctgttagagaagatgttgactttagatccatcacagaggatatcagcaaaagatgcacttgatgcggaatatttctggactgatcccttaccatgcgatccaaaaagcttgcccaagtatgaggcatcgcatgaattccagactaagaaaaagcgtcagcaacagaggcaagcagaggaagctgcaaagcgtcaaaaacttaaccatcctccaccacattctcgtttgcctccactccagcagcctggccaagcacatcctcaaatgaggcctggccagggtatgcacaatgtgcctcctgtggcagccggcccaggccatcactatgcaaaaccccgaggaccaggaggccctaaccggtatcctcagggtgggaatcaagggggaggctacaatccgaaccgtggagggcagggtggtggctatggcagtggcccttatccccagcaagggcgagggcctccttaccctggagcagctggcccacggggcagcggtggcagtggctatggggctggagggccaaactaccaacagggtggcccatatggtacgtccggtccaggccgaggaccaaactactctcaaggtagtggttcccgcaaccaacagcagtatgggaactggcaataatgtggcagtattatgccattgatatgtatgtatttgcagaatgcatttgcagcacctttgcactttaagcatgttgtgagatgtatgtcatgatagtactctaattcagtccagatgtctcaaaaagatgtttatgactccagatgtagattatgattatcgagaaatgttttgtacttagaacccttgattcacttattagaagtatgccacaaagacctagcagagcttgctattagccccagtttcatacttcatatccatattggaatcatgaatgcatggaagaagcctgaagttcagaaatgaaatttgttatggttgtgtacagttttgttatcacttcgcttcaatcacattatcaagcttaaaaca

SEQ ID NO: 5142 - DNA, 2040 bp, Zea Mays
ccgcggcccactcaaaccaaaccccactcgcccagccgccgcgtaccgcaccacaccacaccacaccaggctcctcgacagtcgatagcctcccaagtcccaactcgacctgagccgattcggaaggacggtttgcctacctctggttccggcggccatggcggtggcggcccctggccagctcaacctcgacgaggccccgtcatggggctcccgcagcgtagactgcttcgagaagctcgagcagatcggcgagggcacctacgggcaagtgtacatggcgaaggagacgggcaccaacgagatcgtcgcgctcaagaagatccgcatggacaacgagcgcgaagggttcccgatcaccgccatacgcgagatcaaaatcctgaagaagcttcaccaccagaacgttatcaagctcaaggagatcgtcacctccccaggcccagagcgggacgagcaagggaagccaattgacggtaacaagtacaaggggagcatttacatggttttcgagtatatggaccatgatctcaccgggcttgctgatcggccaggaatgcggttcactgtgccgcagattaaggcctgcactattgtcatgtcaaccaagttctgcatcgagatatcaaaggatctaaccttttgatagacaatgagggtaacttgaagcttgctgattttggccttgcaagatcattctcgagtgatcacaatggcaaccttactaaccgtgtgatcactttgtggtatagacctccagagttgctacttggaagcacaaagtatggcccagccgttgacatgtggtcagtgggctgtatttttgcagaacttctcaatgggaagccaatattgcctggaaagaatgagccagagcagctgactaagatcttcgagctttgtggtacccctgatgacacaatctggcctggtgtcacaaaaatgccttggtacaacaacttcaagcctccccggccattaaagagacgagttaaagatttctttaagcattttgatcgacatgcactggatctgttagagaagatgttgactttagatccatcacagaggatatcagcaaaagatgcacttgatgcggaatatttctggactgatcccttaccatgcgatccaaaaagcttgcccaagtatgaggcatcgcatgaattccagactaagaaaaagcgtcagcaacagaggcaagcagaggaagctgcaaagcgtcaaaaacttaaccatcctccaccacattctcgtttgcctccactccagcagcctggccaagcacatcctcaaatgaggcctggccagggtatgcacaatgtgcctcctgtggcagccggcccaggccatcactatgcaaaaccccgaggaccaggaggccctaaccggtatcctcagggtgggaatcaagggggaggctacaatccgaaccgtggagggcagggtggtggctatggcagtggcccttatccccagcaagggcgagggcctccttaccctggagcagctggcccacggggcagcggtggcagtggctatggggctggagggccaaactaccaacagggtggcccatatggtacgtccggtccaggccgaggaccaaactactctcaaggtagtggttcccgcaaccaacagcagtatgggaactggcaataatgtggcagtattatgccattgatatgtatgtatttgcagaatgcatttgcagcacctttgcactttaagcatgttgtgagatgtatgtcatgatagtactctaattcagtccagatgtctcaaaaagatgtttatgactccagatgtagattatgattatcgagaaatgttttgtacttagaacccttgattcacttattagaagtatgccacaaagacctagcagagcttgctattagccccagtttcatacttcatatccatattggaatcatgaatgcatggaagaagcctgaagttcagaaatgaaatttgttatggttgtgtacagttttgttatcacttcgcttcaatcacattatcaagcttaaaaca

SEQ ID NO: 5143 - DNA, 459 bp, Zea Mays
aaaacgggtagtcagattacccggactcacgcgttgcagtttatatatgtcaagacgtcaagtgttacaagaaaatgggccgttaccatacaattaaaagaaagaaaagtagcccattcatctgtaagcagataagcccaacacagcctactcaacatgcaaagatatttctcattttctttcacaagtagatccataagccataatcccgggtataccgtttactccatccggacccgcggcagcatagttaggccattgactggatgcaacgaaagcgtttagactgtgaccaatatttggctttgatgactctagcttgttgcttgcatggccgatgcagttcattctagtgactcccaagcggccagatcggggcgacccaatctgctgcctaatcttggccgggccgggctgcgcaggttaggcagggtttatgtgggacaatccaacgcgatg

SEQ ID NO: 5144 - DNA, 1635 bp, Zea Mays
gtggtcgacgccccggtacgaagtgggtggggaggcgcagagacaggcgtcttcgtactcgcctatctccgcgactcaaagcttcttccatttcctaccgccgccgctgcagctccaccccattccgtcgacaccatgagggagtgcatctcgatccacatcggccaagccggtatccaggtcggaaacgcgtgctgggagctctactgcctcgagcatggcattcaggccgatggtcagatgcccggtgacaagaccattgggggtggtgatgatgctttcaacaccttcttcagtgagactggtgctgggaagcacgtccctcgtgctgtttttgttgaccttgaaccaactgtcatcgatgaggtgaggactggcacctaccgccagctcttccaccctgagcagcttatcagtggcaaggaggatgcagccaacaacttcgcccgtggtcactacaccattggcaaggagattgttgacctgtgccttgatcgcatcaggaagcttgccgacaactgcactggtctccagggcttcctcgtcttcaacgctgttggcggaggaacaggctctggccttggttccctcctcctggagcgtctgtctgttgactacggcaagaagtctaagcttggtttcactgtgtacccatccccccaagtttcgacctcagtggttgagccatacaacagtgtcctgtccacccactccctccttgagcacactgatgtgaatgagttccagaccaacttggtgccctacccgaggatccacttcatgctttcctcctatgctccagtcatctctgctgagaaggcctaccacgagcagctgtctgtggccgagatcaccaacagcgccttcgagccatcctccatgatggccaagtgcgatccccgccatggtaagtacatggcctgctgcctcatgtaccgtggtgatgtggtccccaaggatgtgaatgctgctgtggccaccatcaagaccaagcgcaccatccagtttgtggactggtgcccaactggctttaagtgcggcattaactaccagcctccaagtgtggtgcctggtggtgacctggccaaggtgcagcgcgctgtgtgcatgatctccaactccaccagtgttgtggaggtgttctcccgcatcgaccacaagttcgacctcatgtacgccaagcgtgccttcgtgcactggtatgtcggtgagggtatggaggagggcgagttctctgaggcccgtgaggatctggcagcgctcgagaaggactacgaggaggttggtgctgagtttgatgagggtgaggaaggtgatgatggtgatgagtactagaagtatcctgatgcggtcatcgtcaggcttgtgtgctgctcttgtccccgttgtggtttgcaacacctgatgttgtaagactttctggttatgtccgccccgctgtgccactgggttattaagaacgtcgttatggatggttgtctacactacattattgcttctcgatattggaaaactgttatgcgcctcggtggattgtgttgttgtcgtaatgtcatcactcatacgccgctgggaattttgaggcctgtcaagcatcaggattgcgttatgagttaaatgcttcagcgacgttta

SEQ ID NO: 5145 - DNA, 1863 bp, Zea Mays
gtggtcgacgccccggtacgaagtgggtggggaggcgcagagacaggcgtcttcgtactcgcctatctccgcgactcaaagcttcttccatttcctaccgccgccgctgcagctccaccccattccgtcgacaccatgagggagtgcatctcgatccacatcggccaagccggtatccaggtcggaaacgcgtgctgggagctctactgcctcgagcatggcattcaggccgatggtcagatgcccggtgacaagaccattgggggtggtgatgatgctttcaacaccttcttcagtgagactggtgctgggaagcacgtccctcgtgctgtttttgttgaccttgaaccaactgtcatcgatgaggtgaggactggcacctaccgccagctcttccaccctgagcagcttatcagtggcaaggaggatgcagccaacaacttcgcccgtggtcactacaccattggcaaggagattgttgacctgtgccttgatcgcatcaggaagcttgccgacaactgcactggtctccagggcttcctcgtcttcaacgctgttggtggaggaacgggctctggccttggttccctcctcctagagcgcctgtctgttgactacggcaagaaatccaagcttgggttcactgtgtacccttccccccaagtttctacttcggtagttgagccatacaacagtgtactgtccacccactccctcctcgagcacactgatgtggctatactgctggacaatgaggccatctacgacatctgccgccgatcccttgacattgagcgcccaacctacaccaacctcaacaggcttgtgtcccaggtcatctcatcccttactgcctccctgaggttcgatggtgctctgaacgtggatgttaacgagttccagaccaacctggtaccctacccgaggatccacttcatgctttcttcgtacgctccagtcatctctgctgagaaggcctaccacgagcagctctctgtggctgagatcaccaacagtgccttcgagccatcttccatgatggccaagtgcgacccacgccatggcaagtacatggcctgctgcctcatgtaccgtggtgatgtggtccccaaggatgtgaatgctgctgtggccaccatcaagaccaaacgcaccatccagttcgtggattggtgcccgactggcttcaagtgcggcatcaactaccagcctcctagcgttgtgcctggtggcgacctggccaaggtgcagcgtgccgtgtgcatgatctccaactccaccagtgttgtggaggtgttctcccgcatcgaccacaagttcgacctcatgtacgccaagcgtgccttcgtgcactggtacgtcggtgagggtatggaggaaggtgagttctctgaggcccgtgaggacctggcggcgctcgagaaggactacgaggaggtcggtgctgagttcgatgagggcgaggatggcgacgagggtgacgagtactagagaagtttgctgatgacgcagcatcaggccagtgtgctgcccttatcccgtgatctgccgagagttgctcctgctatcgtgttatgtgtgtctgttctgaagtattgtgtggtttacaacacctgatgttgtaagagttgttaattcccctgcattgctaccgggttattgagaataattatggctgtttacgttgttgcttcatctcggagatgctttacatttaccaccttgttcatcttttgtcatcagtaaaatcgagtcggcggatgattttcttgcgtcttgtcatgagtattgagtagtatggattgtttgatgctttatatcacattgcagaagatagtacgatctctagctatatatatgttc

SEQ ID NO: 5146 - DNA, 693 bp, Zea Mays
gtggtcgacgccccggtacgaagtgggtggggaggcgcagagacaggcgtcttcgtactcgcctatctccgcgactcaaagcttcttccatttcctaccgccgccgctgcagctccaccccattccgtcgacaccatgagggagtgcatctcgatccacatcggccaagccggtatccaggtcggaaacgcgtgctgggagctctactgcctcgagcatggcattcaggctgacggtcagatgcccggtgacaagaccattgggggaggtgatgctgagttcgatgagggcgaggatggcgacgagggtgacgagtactagagaagtttgctgatgacgcagcatcaggccagtgtgctgcccttatcccgtgatctgccgagagttgctcctgctatcgtgttatgtgtgtctgttctgaagtattgtgtggtttacaacacctgatgttgtaagagttgttaattcccctgcattgctaccgggttattgagaataattatggctgtttacgttgttgcttcatctcggagatgctttacatttaccaccttgttcatcttttgtcatcagtaaaatcgagtcggcggatgattttcttgcgtcttgtcatgagtattgagtagtatggattgtttgatgctttatatcacattgcagaagatagtacgatctctagctatatatatgttc

SEQ ID NO: 5147 - DNA, 1701 bp, Zea Mays
cagaggcaaagttgctcccatcctccgcctacaaatacgcaggcgcccccacctctcttccactctcctctcctctccgcctcaccttgccctgcccgcacacaccacctgtccccgcacggccgcaccgctccgctcccgaggcttagggctccggccgcgctcccttcccttcccggcattcccgatctctcgccgccgcccgcctggccttgatctcgatcgccctcccctctccgctctcgctccggcaggccggcccgggtttgtctcgccgctattgggcctcggcacgctgcgatggtgtcgggcgtgtgcgtggggacggaggggcaggtggaccctgaggcggtggcgccggctgtcgcggaggaggcggtggtgccggcgcccgcgagggaggtcgtggtggggtacgcgctcacgagtaagaaggccaagagcttcctccaacccaagctccgggggctcgccaggaaaaagggaatcttgtttgtcgctattgatcagaaacgcccattgtctgatcaaggtccatttgacattgttcttcataagttgactggaagggggtggcagcaattgctggaggaatatagggaggcacacccagaagttactgttcttgatccacctggcgcaatagcaaacttgcttgatcgccagtctatgcttcaagaagtatctgaattggacctcacagattgtcatgttctcttctgcaggtaaagtacgtgtgcctaagcagctattcgttaatactgatccctcatcaataccagctgcagttaggagggcaggtctctctctcccattggtggcaaaacccttggtggcgaagtcccatgagctatcccttgcttatgatccaacttcactgaccaaacttgagccccccttggttcttcaggaatttgttaaccatggtggcgtcatgtttaaggtgtacattgttggggatgcaataagggttgtacgtcgattttcactcccaaatgttgatgaaggcgatctatcgaacaatgctggggtatttcggtttccaagggtctcttgtgctgcagccagtgcagatgatgcagatcttgaccctcgtgttgctgaacttcctccgagaccattgcttgagatcttggcacgagagctgcgccgacgactgggtcttagactattcaacatcgatatgattagggagcatgggacgcgagatcggttttatgtcatagacatgaactactttcctgggtacggcaaaatgcctggatacgagcacgtgttcaccgacttcctgctgagccttgccaagaaagagtacaagagacgacaaagctatagctcgctaagctcaggcgaatggtgataagcgaggagactactcggcggggcatgtatatgtctatcatccacgatgcgtgcgtacagatgtacttgtgcatgacgagagataatgggtcgtagaagcggagggctgttgtcaggctataactaactgttgctttacatgtgctaactgttgatgcttcagaataaattttgtttgggtggatgatggctctgctgaaatcgagctacttgtagaacttatgactggaacctcgaaataaacggagaatttggattacgtaccgtactacttgcaaacgtagggactgtatgattgcctggaccagctggcctgggcagcctagcctgcacaacagg

SEQ ID NO: 5148 - DNA, 1803 bp, Zea Mays
ttccactctcctctcctctccgcctcaccttgccctgcccgcacacaccacctgtccccgcacggccgcaccgctccgctcccgaggcttagggctccggccgcgctcccttcccttcccggcattcccgatctctcgccgccgcccgcctggccttgatctcgatcgccctcccctctccgctctcgctccggcaggccggcccgggtttgtctcgccgctattgggcctcggcacgctgcgatggtgtcgggcgtgtgcgtggggacggaggggcaggtggaccctgaggcggtggcgccggctgtcgcggaggaggcggtggtgccggcgcccgcgagggaggtcgtggtggggtacgcgctcacgagtaagaaggccaagagcttcctccaacccaagctccgggggctcgccaggaaaaagggaatcttgtttgtcgctattgatcagaaacgcccattgtctgatcaaggtccatttgacattgttcttcataagttgactggaagggggtggcagcaattgctggaggaatatagggaggcacacccagaagttactgttcttgatccacctggcgcaatagcaaacttgcttgatcgccagtctatgcttcaagaagtatctgaattggacctcacagattgtcatgttctcttctgcaggtaaagtacgtgtgcctaagcagctattcgttaatactgatccctcatcaataccagctgcagttaggagggcaggtctctctctcccattggtggcaaaacccttggtggcgaagtcccatgagctatcccttgcttatgatccaacttcactgaccaaacttgagccccccttggttcttcaggaatttgttaaccatggtggcgtcatgtttaaggtgtacattgttggggatgcaataagggttgtacgtcgattttcactcccaaatgttgatgaaggcgatctatcgaacaatgctggggtatttcggtttccaagggtctcttgtgctgcagccagtgcagatgatgcagatcttgaccctcgtgttgctgaacttcctccgagaccattgcttgagatcttggcacgagagctgcgccgacgactgggtcttagactattcaacatcgatatgattagggagcatgggacgcgagatcggttttatgtcatagacatgaactactttcctgtgcattgctgacactaatatgaaataccaaattggagacactgcgaatagaggtagtttatctcccgtgtcatcatgactaatgatgatatcagtttggagtccaaagagtggctagaacctggcacgccgaagttatcccagctcagcctgttttcttggtacggcaaaatgcctggatacgagcacgtgttcaccgacttcctgctgagccttgccaagaaagagtacaagagacgacaaagctatagctcgctaagctcaggcgaatggtgataagcgaggagactactcggcggggcatgtatatgtctatcatccacgatgcgtgcgtacagatgtacttgtgcatgacgagagataatgggtcgtagaagcggagggctgttgtcaggctataactaactgttgctttacatgtgctaactgttgatgcttcagaataaattttgtttgggtggatgatggctctgctgaaatcgagctacttgtagaacttatgactggaacctcgaaataaacggagaatttggattacgtaccgtactacttgcaaacgtagggactgtatgattgcctggaccagctggcctgggcagcctagcctgcacaacagg

SEQ ID NO: 5149 - DNA, 2085 bp, Zea Mays
actctcctctcctctccgcctcaccttgccctgcccgcacacaccacctgtccccgcacggccgcaccgctccgctcccgaggcttagggctccggccgcgctcccttcccttcccggcattcccgatctctcgccgccgcccgcctggccttgatctcgatcgccctcccctctccgctctcgctccggcaggccggcccgggtttgtctcgccgctattgggcctcggcacgctgcgatggtgtcgggcgtgtgcgtggggacggaggggcaggtggaccctgaggcggtggcgccggctgtcgcggaggaggcggtggtgccggcgcccgcgagggaggtcgtggtggggtacgcgctcacgagtaagaaggccaagagcttcctccaacccaagctccgggggctcgccagaaggtggtgaaaagcgtcctttgagattgaaaagtctgaccgaatctctgctttctgatatggaaaaagggaatcttgtttgtcgctattgatcagaaacgcccattgtctgatcaaggtccatttgacattgttcttcataagttgactggaagggggtggcagcaattgctggaggaatatagggaggcacacccagaagttactgttcttgatccacctggcgcaatagcaaacttgcttgatcgccagtctatgcttcaagaagtatctgaattggacctcacagattgtcatggtaaagtacgtgtgcctaagcagctattcgttaatactgatccctcatcaataccagctgcagttaggagggcaggtctctctctcccattggtggcaaaacccttggtggcgaagtcccatgagctatcccttgcttatgatccaacttcactgaccaaacttgagccccccttggttcttcaggaatttgttaaccatggtggcgtcatgtttaaggtgtacattgttggggatgcaataagggttgtacgtcgattttcactcccaaatgttgatgaaggcgatctatcgaacaatgctggggtatttcggtttccaagggtctcttgtgctgcagccagtgcagatgatgcagatcttgaccctcgtgttgctgaacttcctccgagaccattgcttgagatcttggcacgagagctgcgccgacgactgggtcttagactattcaacatcgatatgattagggagcatgggacgcgagatcggttttatgtcatagacatgaactactttcctggtatgcaatctgacattcttgagcttgcacaagctatcttttgtttcggtaaagctgacccctacatgtacattttagaattattgatcaaagaatctcctgtttaatcctgttctactatagctaagtctttaaattaattcgcagtgcattgctgacactaatatgaaataccaaattggagacactgcgaatagaggtagtttatctcccgtgtcatcatgactaatgatgatatcaggtatactgcttgatggatgtactgaacgaacgagatgcctgtgctgtgacacttgttccactctgtcggttttattgtttttaaaaacagtttggagtccaaagagtggctagaacctggcacgccgaagttatcccagctcagcctgttttcttggtacggcaaaatgcctggatacgagcacgtgttcaccgacttcctgctgagccttgccaagaaagagtacaagagacgacaaagctatagctcgctaagctcaggcgaatggtgataagcgaggagactactcggcggggcatgtatatgtctatcatccacgatgcgtgcgtacagatgtacttgtgcatgacgagagataatgggtcgtagaagcggagggctgttgtcaggctataactaactgttgctttacatgtgctaactgttgatgcttcagaataaattttgtttgggtggatgatggctctgctgaaatcgagctacttgtagaacttatgactggaacctcgaaataaacggagaatttggattacgtaccgtactacttgcaaacgtagggactgtatgattgcctggaccagctggcctgggcagcctagcctgcacaacagg

SEQ ID NO: 5150 - DNA, 1691 bp, Zea Mays
actctcctctcctctccgcctcaccttgccctgcccgcacacaccacctgtccccgcacggccgcaccgctccgctcccgaggcttagggctccggccgcgctcccttcccttcccggcattcccgatctctcgccgccgcccgcctggccttgatctcgatcgccctcccctctccgctctcgctccggcaggccggcccgggtttgtctcgccgctattgggcctcggcacgctgcgatggtgtcgggcgtgtgcgtggggacggaggggcaggtggaccctgaggcggtggcgccggctgtcgcggaggaggcggtggtgccggcgcccgcgagggaggtcgtggtggggtacgcgctcacgagtaagaaggccaagagcttcctccaacccaagctccgggggctcgccaggaaaaagggaatcttgtttgtcgctattgatcagaaacgcccattgtctgatcaaggtccatttgacattgttcttcataagttgactggaagggggtggcagcaattgctggaggaatatagggaggcacacccagaagttactgttcttgatccacctggcgcaatagcaaacttgcttgatcgccagtctatgcttcaagaagtatctgaattggacctcacagattgtcatgttctcttctgcaggtaaagtacgtgtgcctaagcagctattcgttaatactgatccctcatcaataccagctgcagttaggagggcaggtctctctctcccattgggtggcgtcatgtttaaggtgtacattgttggggatgcaataagggttgtacgtcgattttcactcccaaatgttgatgaaggcgatctatcgaacaatgctggggtatttcggtttccaagggtctcttgtgctgcagccagtgcagatgatgcagatcttgaccctcgtgttgctgaacttcctccgagaccattgcttgagatcttggcacgagagctgcgccgacgactgggtcttagactattcaacatcgatatgattagggagcatgggacgcgagatcggttttatgtcatagacatgaactactttcctgtgcattgctgacactaatatgaaataccaaattggagacactgcgaatagaggtagtttatctcccgtgtcatcatgactaatgatgatatcagtttggagtccaaagagtggctagaacctggcacgccgaagttatcccagctcagcctgttttcttggtacggcaaaatgcctggatacgagcacgtgttcaccgacttcctgctgagccttgccaagaaagagtacaagagacgacaaagctatagctcgctaagctcaggcgaatggtgataagcgaggagactactcggcggggcatgtatatgtctatcatccacgatgcgtgcgtacagatgtacttgtgcatgacgagagataatgggtcgtagaagcggagggctgttgtcaggctataactaactgttgctttacatgtgctaactgttgatgcttcagaataaattttgtttgggtggatgatggctctgctgaaatcgagctacttgtagaacttatgactggaacctcgaaataaacggagaatttggattacgtaccgtactacttgcaaacgtagggactgtatgattgcctggaccagctggcctgggcagcctagcctgcacaacagg

SEQ ID NO: 5151 - DNA, 1678 bp, Zea Mays
actctcctctcctctccgcctcaccttgccctgcccgcacacaccacctgtccccgcacggccgcaccgctccgctcccgaggcttagggctccggccgcgctcccttcccttcccggcattcccgatctctcgccgccgcccgcctggccttgatctcgatcgccctcccctctccgctctcgctccggcaggccggcccgggtttgtctcgccgctattgggcctcggcacgctgcgatggtgtcgggcgtgtgcgtggggacggaggggcaggtggaccctgaggcggtggcgccggctgtcgcggaggaggcggtggtgccggcgcccgcgagggaggtcgtggtggggtacgcgctcacgagtaagaaggccaagagcttcctccaacccaagctccgggggctcgccaggaaaaagggaatcttgtttgtcgctattgatcagaaacgcccattgtctgatcaaggtccatttgacattgttcttcataagttgactggaagggggtggcagcaattgctggaggaatatagggaggcacacccagaagttactgttcttgatccacctggcgcaatagcaaacttgcttgatcgccagtctatgcttcaagaagtatctgaattggacctcacagattgtcatggtaaagtacgtgtgcctaagcagctattcgttaatactgatccctcatcaataccagctgcagttaggagggcaggtctctctctcccattgggtggcgtcatgtttaaggtgtacattgttggggatgcaataagggttgtacgtcgattttcactcccaaatgttgatgaaggcgatctatcgaacaatgctggggtatttcggtttccaagggtctcttgtgctgcagccagtgcagatgatgcagatcttgaccctcgtgttgctgaacttcctccgagaccattgcttgagatcttggcacgagagctgcgccgacgactgggtcttagactattcaacatcgatatgattagggagcatgggacgcgagatcggttttatgtcatagacatgaactactttcctgtgcattgctgacactaatatgaaataccaaattggagacactgcgaatagaggtagtttatctcccgtgtcatcatgactaatgatgatatcagtttggagtccaaagagtggctagaacctggcacgccgaagttatcccagctcagcctgttttcttggtacggcaaaatgcctggatacgagcacgtgttcaccgacttcctgctgagccttgccaagaaagagtacaagagacgacaaagctatagctcgctaagctcaggcgaatggtgataagcgaggagactactcggcggggcatgtatatgtctatcatccacgatgcgtgcgtacagatgtacttgtgcatgacgagagataatgggtcgtagaagcggagggctgttgtcaggctataactaactgttgctttacatgtgctaactgttgatgcttcagaataaattttgtttgggtggatgatggctctgctgaaatcgagctacttgtagaacttatgactggaacctcgaaataaacggagaatttggattacgtaccgtactacttgcaaacgtagggactgtatgattgcctggaccagctggcctgggcagcctagcctgcacaacagg

SEQ ID NO: 5152 - DNA, 1795 bp, Zea Mays
actctcctctcctctccgcctcaccttgccctgcccgcacacaccacctgtccccgcacggccgcaccgctccgctcccgaggcttagggctccggccgcgctcccttcccttcccggcattcccgatctctcgccgccgcccgcctggccttgatctcgatcgccctcccctctccgctctcgctccggcaggccggcccgggtttgtctcgccgctattgggcctcggcacgctgcgatggtgtcgggcgtgtgcgtggggacggaggggcaggtggaccctgaggcggtggcgccggctgtcgcggaggaggcggtggtgccggcgcccgcgagggaggtcgtggtggggtacgcgctcacgagtaagaaggccaagagcttcctccaacccaagctccgggggctcgccaggaaaaagggaatcttgtttgtcgctattgatcagaaacgcccattgtctgatcaaggtccatttgacattgttcttcataagttgactggaagggggtggcagcaattgctggaggaatatagggaggcacacccagaagttactgttcttgatccacctggcgcaatagcaaacttgcttgatcgccagtctatgcttcaagaagtatctgaattggacctcacagattgtcatgttctcttctgcaggtaaagtacgtgtgcctaagcagctattcgttaatactgatccctcatcaataccagctgcagttaggagggcaggtctctctctcccattggtggcaaaacccttggtggcgaagtcccatgagctatcccttgcttatgatccaacttcactgaccaaacttgagccccccttggttcttcaggaatttgttaaccatggtggcgtcatgtttaaggtgtacattgttggggatgcaataagggttgtacgtcgattttcactcccaaatgttgatgaaggcgatctatcgaacaatgctggggtatttcggtttccaagggtctcttgtgctgcagccagtgcagatgatgcagatcttgaccctcgtgttgctgaacttcctccgagaccattgcttgagatcttggcacgagagctgcgccgacgactgggtcttagactattcaacatcgatatgattagggagcatgggacgcgagatcggttttatgtcatagacatgaactactttcctggtatactgcttgatggatgtactgaacgaacgagatgcctgtgctgtgacacttgttccactctgtcggttttattgtttttaaaaacagtttggagtccaaagagtggctagaacctggcacgccgaagttatcccagctcagcctgttttcttggtacggcaaaatgcctggatacgagcacgtgttcaccgacttcctgctgagccttgccaagaaagagtacaagagacgacaaagctatagctcgctaagctcaggcgaatggtgataagcgaggagactactcggcggggcatgtatatgtctatcatccacgatgcgtgcgtacagatgtacttgtgcatgacgagagataatgggtcgtagaagcggagggctgttgtcaggctataactaactgttgctttacatgtgctaactgttgatgcttcagaataaattttgtttgggtggatgatggctctgctgaaatcgagctacttgtagaacttatgactggaacctcgaaataaacggagaatttggattacgtaccgtactacttgcaaacgtagggactgtatgattgcctggaccagctggcctgggcagcctagcctgcacaacagg

SEQ ID NO: 5153 - DNA, 1855 bp, Zea Mays
actctcctctcctctccgcctcaccttgccctgcccgcacacaccacctgtccccgcacggccgcaccgctccgctcccgaggcttagggctccggccgcgctcccttcccttcccggcattcccgatctctcgccgccgcccgcctggccttgatctcgatcgccctcccctctccgctctcgctccggcaggccggcccgggtttgtctcgccgctattgggcctcggcacgctgcgatggtgtcgggcgtgtgcgtggggacggaggggcaggtggaccctgaggcggtggcgccggctgtcgcggaggaggcggtggtgccggcgcccgcgagggaggtcgtggtggggtacgcgctcacgagtaagaaggccaagagcttcctccaacccaagctccgggggctcgccaggaaaaagggaatcttgtttgtcgctattgatcagaaacgcccattgtctgatcaaggtccatttgacattgttcttcataagttgactggaagggggtggcagcaattgctggaggaatatagggaggcacacccagaagttactgttcttgatccacctggcgcaatagcaaacttgcttgatcgccagtctatgcttcaagaagtatctgaattggacctcacagattgtcatggtaaagtacgtgtgcctaagcagctattcgttaatactgatccctcatcaataccagctgcagttaggagggcaggtctctctctcccattggtggcaaaacccttggtggcgaagtcccatgagctatcccttgcttatgatccaacttcactgaccaaacttgagccccccttggttcttcaggaatttgttaaccatggtggcgtcatgtttaaggtgtacattgttggggatgcaataagggttgtacgtcgattttcactcccaaatgttgatgaaggcgatctatcgaacaatgctggggtatttcggtttccaagggtctcttgtgctgcagccagtgcagatgatgcagatcttgaccctcgtgttgctgaacttcctccgagaccattgcttgagatcttggcacgagagctgcgccgacgactgggtcttagactattcaacatcgatatgattagggagcatgggacgcgagatcggttttatgtcatagacatgaactactttcctgtgcattgctgacactaatatgaaataccaaattggagacactgcgaatagagtttggagtccaaagagtggctagaacctggcacgccgaagttatcccagctcagcctgttttcttgtgggtagattctttgatttgacaatgatattagccataaacccataacttctcggccccctattctacttatgctgccttttttcctgaccaaacttttgttggtcgcagggtacggcaaaatgcctggatacgagcacgtgttcaccgacttcctgctgagccttgccaagaaagagtacaagagacgacaaagctatagctcgctaagctcaggcgaatggtgataagcgaggagactactcggcggggcatgtatatgtctatcatccacgatgcgtgcgtacagatgtacttgtgcatgacgagagataatgggtcgtagaagcggagggctgttgtcaggctataactaactgttgctttacatgtgctaactgttgatgcttcagaataaattttgtttgggtggatgatggctctgctgaaatcgagctacttgtagaacttatgactggaacctcgaaataaacggagaatttggattacgtaccgtactacttgcaaacgtagggactgtatgattgcctggaccagctggcctgggcagcctagcctgcacaacagg

SEQ ID NO: 5154 - DNA, 1439 bp, Zea Mays
agccggtgtgggaacttatgttttccaacaatcaagatttaagaaatggtggcaaaacccttggtggcgaagtcccatgagctatcccttgcttatgatccaacttcactgaccaaacttgagccccccttggttcttcaggaatttgttaaccatggtggcgtcatgtttaaggtgtacattgttggggatgcaataagggttgtacgtcgattttcactcccaaatgttgatgaaggcgatctatcgaacaatgctggggtatttcggtttccaagggtctcttgtgctgcagccagtgcagatgatgcagatcttgaccctcgtgttgctgaacttcctccgagaccattgcttgagatcttggcacgagagctgcgccgacgactgggtcttagactattcaacatcgatatgattagggagcatgggacgcgagatcggttttatgtcatagacatgaactactttcctggtatgcaatctgacattcttgagcttgcacaagctatcttttgtttcggtaaagctgacccctacatgtacattttagaattattgatcaaagaatctcctgtttaatcctgttctactatagctaagtctttaaattaattcgcagtgcattgctgacactaatatgaaataccaaattggagacactgcgaatagaggtagtttatctcccgtgtcatcatgactaatgatgatatcaggtatactgcttgatggatgtactgaacgaacgagatgcctgtgctgtgacacttgttccactctgtcggttttattgtttttaaaaacagtttggagtccaaagagtggctagaacctggcacgccgaagttatcccagctcagcctgttttcttgtgggtagattctttgatttgacaatgatattagccataaacccataacttctcggccccctattctacttatgctgccttttttcctgaccaaacttttgttggtcgcagggtacggcaaaatgcctggatacgagcacgtgttcaccgacttcctgctgagccttgccaagaaagagtacaagagacgacaaagctatagctcgctaagctcaggcgaatggtgataagcgaggagactactcggcggggcatgtatatgtctatcatccacgatgcgtgcgtacagatgtacttgtgcatgacgagagataatgggtcgtagaagcggagggctgttgtcaggctataactaactgttgctttacatgtgctaactgttgatgcttcagaataaattttgtttgggtggatgatggctctgctgaaatcgagctacttgtagaacttatgactggaacctcgaaataaacggagaatttggattacgtaccgtactacttgcaaacgtagggactgtatgattgcctggaccagctggcctgggcagcctagcctgcacaacagg

SEQ ID NO: 5155 - DNA, 2160 bp, Zea Mays
ctcacttcttttattagaagcgaaaaataaataaaatagtaaaaaagaaaagtcaaaagaaaggatcagataaaaatcctcaccgtttcctcttccttcttcccttctcctgcgagttgccgagttgtgactctggagctgtcgcctgcggcctgcctctccgtctccgtccacgtcgcgtcataaatccccctttccgagccccgacctagcacctacccccgccacccgcccattccattccccaatccgactggtgcacgagccccgaatccactgtcgcatttgttggcggcctctagctcccgctaccctttccgtcccagagaggcggtcgccttgcggtaggcggaagggggatttaggtgaacaagcatcttgattttttgaccaatctttgctctacccgccttgcggtcttcgcctttaaatctctggaggtgggaagactgacgaggcaaaggcgaaggcaagaacggtcgtttcaaggctcctgctggaaccatcaagtgttccggtggagggattgggagtggaggggaaaggatcgtagaggttgttgttttacctcgttttgctaacaatgttgaggcagagctctagtagaaatcagagatccaaaggtctgaagctgaagaaagctcttcagattagtctcttgcttctggtttctgtttggttgctctaccaagttaagcattcttatgagaagaaggcatacagcgaagatgaagtgagtggttcacataaagatgacaaggaccagggagagacagtcagactaggcaggaaggatctgcctccaaagatggaggccgactcttcaacattggatgaacgggttgaggatgaagagaatgatgaaatggagcaagaaatgaaacatgatgagaacgatgatgatcccatcgatgagcaagacttggagaaggatgaggatcttcctgagcctggtgagcattcttctgaaagggatggagatgtgggtgtgtttgatgatgaagagcggaaggagcggtcacaggaggatcaagagaagagcttccatggtgacaatgtttctagtgctgttactcatgaccccccatcatcggagcaagatgagctgttccatcgtggccaagagaaggtcttatttgtggatgatgcttcaactgcagtgcctaatgaaaatcacgaggctggaaacgaggatgaagtgcgcagggctagggaaaggagcttcagaggtgatgatgtgtcaagctctgtagatcatgacggcaaggtgacaaaacctctcccagaggaacaattgaacatcatggataggatatttgaaggcaccacaaacttatctaatggaatttcatttcgagctcctggaataaatggatcatataccaccgcaggcaatgtggctacaccaacgaattcatcttcccagaaaaacacagacattcctagcgatgacattgaaagcaagacccatccatctccaacaaatttgaccagcaaccctgagcaaactaattcaactttgaaaggtcatccggatcaacaagtgaattcaatggcagtgctcggcaaccaagtacagcctttgactaaccagacgtcgcttgagttggattctcctccaaatggcaccttggctctggtaacagatgccaaaaagtccacatctggagctggagatgatggcagcaacagcacctcaccctccactcatgtggacaagaagacggacggcggagatggtcccaaagaagacgtggatgtgtccactaaaataatgaataaggcaattagtgaagatgaagttgttccagagtgataaggagatccaagatctcgtgtcagcttctggtgtgacctgtaagtttgtaggacttggtttatctcctagacctggagatgcaatgcaagcaggctatcttgttgcaccctttttttgtataactagtaactggcacgtgccctacgcttgtagatttttttttgcaatataagtagaaaaaatcgcaatataagtgataacagtgctatattgcttgtaagatgcacattaagtaagctattcatatatattacaagagctagaacaaaggctagttccgactgagtcaacatctgaaatcaagttgttatatttatataaattatcttcaaaaggttgat

SEQ ID NO: 5156 - DNA, 1723 bp, Zea Mays
cttaactcgattttggcagttttgaatcacctggtgtcaaaaatggcgtttatgtgatttaggaaccatcaagtgttccggtggagggattgggagtggaggggaaaggatcgtagaggttgttgttttacctcgttttgctaacaatgttgaggcagagctctagtagaaatcagagatccaaaggtctgaagctgaagaaagctcttcagattagtctcttgcttctggtttctgtttggttgctctaccaagttaagcattcttatgagaagaaggcatacagcgaagatgaagtgagtggttcacataaagatgacaaggaccagggagagacagtcagactaggcaggaaggatctgcctccaaagatggaggccgactcttcaacattggatgaacgggttgaggatgaagagaatgatgaaatggagcaagaaatgaaacatgatgagaacgatgatgatcccatcgatgagcaagacttggagaaggatgaggatcttcctgagcctggtgagcattcttctgaaagggatggagatgtgggtgtgtttgatgatgaagagcggaaggagcggtcacaggaggatcaagagaagagcttccatggtgacaatgtttctagtgctgttactcatgaccccccatcatcggagcaagatgagctgttccatcgtggccaagagaaggtcttatttgtggatgatgcttcaactgcagtgcctaatgaaaatcacgaggctggaaacgaggatgaagtgcgcagggctagggaaaggagcttcagaggtgatgatgtgtcaagctctgtagatcatgacggcaaggtgacaaaacctctcccagaggaacaattgaacatcatggataggatatttgaaggcaccacaaacttatctaatggaatttcatttcgagctcctggaataaatggatcatataccaccgcaggcaatgtggctacaccaacgaattcatcttcccagaaaaacacagacattcctagcgatgacattgaaagcaagacccatccatctccaacaaatttgaccagcaaccctgagcaaactaattcaactttgaaaggtcatccggatcaacaagtgaattcaatggcagtgctcggcaaccaagtacagcctttgactaaccagacgtcgcttgagttggattctcctccaaatggcaccttggctctggtaacagatgccaaaaagtccacatctggagctggagatgatggcagcaacagcacctcaccctccactcatgtggacaagaagacggacggcggagatggtcccaaagaagacgtggatgtgtccactaaaataatgaataaggcaattagtgaagatgaagttgttccagagtgataaggagatccaagatctcgtgtcagcttctggtgtgacctgtaagtttgtaggacttggtttatctcctagacctggagatgcaatgcaagcaggctatcttgttgcaccctttttttgtataactagtaactggcacgtgccctacgcttgtagatttttttttgcaatataagtagaaaaaatcgcaatataagtgataacagtgctatattgcttgtaagatgcacattaagtaagctattcatatatattacaagagctagaacaaaggctagttccgactgagtcaacatctgaaatcaagttgttatatttatataaattatcttcaaaaggttgat

SEQ ID NO: 5157 - DNA, 1417 bp, Zea Mays
tacaaatcgtaggtcaagtgtccagagatgagagatcagttaccttcgcgatagctaaagaaagcagaatgaatttcttcctttcgcaatgtatccatggcaacaagtttgggctagatctgagacgagacatttggtttggcccgtagaaccgtttgcctctcgcctgcatcctagtccggcggccgcacccgggcagctccggcggttccccgccgccgtcctccgtctatccccgactgcgctagagctccgtctcatgggggcgtccgaatctctcctatctaggcagcagcttcagcagccgcggcctcagtgggcggatgagatcacgacggtgtccgagggccggcgcgacgacgccgacgccgatcccctcgtccgccgtatccggtctctcaccatagctcctccgctattgagctcccaatctgaagcggaagcagagagcagcctcacggatatcctcgtcgggaagccctctaactcctcagccacctctggaaatctgaacccaaatgtcctagctgagcttttcgccatgtaccgcgaatggcaagaagagaatgccaagaaaattagccgaaaacaggaggagatagaaaacaagatagaaacagctgatgcattggcagttaaacttctccagcggttcaattattgtcttacttacatgagatccacctcccacaatcttgctgaagtgcatccgctgcagatcgaagttggtgagtcaaagggcaggttaactgaagtcataagcaactgcgatgcattgtgtaagagaattgctgcagaaggaccagaaagcctacgatcatctgttcaacctttcatggctgctagagcggaggcagaagggagtggttcacttgacccaaaacaagagtcctgaattgtacaatctaactgctgacagcatgcgcaaagaaacttcagaggatgattagtttgtcctgaacaaatatattatataaacacgtttaggaattgttcggttattctcaatacatatggattggatgagattggaaaaaattaagaagaagtttgacttgtttgggattcaaacctatcaaatcccactcaattcacgtggattgagagctaatcgaacaagcccttataatgttggaaaacatgttttagtcttagaaaccgtctacattgacactagtatatctatcacgttaaccaacgtatcattcgaatggagaattgtatcattcgaatagagaattgtagatctttactactagacgcatagcgtagatgtagtggaagtagtcgaatgttcttgtgttcattcatcctcaagtttgttgttgattactgtcgcaataatagcagcttctccacggtgttcacacatgtggtgatgaaacgatgtaataccattgtgctagcataatatcac

SEQ ID NO: 5158 - DNA, 1492 bp, Zea Mays
agatcagttaccttcgcgatagctaaagaaagcagaatgaatttcttcctttcgcaatgtatccatggcaacaagtttgggctagatctgagacgagacatttggtttggcccggtaagttaacttttcggcctaactcaatcgacaccattgtccaagctaaaaggcccaacttaataggctgccacttgccagtagaaccgtttgcctctcgcctgcatcctagtccggcggccgcacccgggcagctccggcggttccccgccgccgtcctccgtctatccccgactgcgctagagctccgtctcatgggggcgtccgaatctctcctatctaggcagcagcttcagcagccgcggcctcagtgggcggatgagatcacgacggtgtccgagggccggcgcgacgacgccgacgccgatcccctcgtccgccgtatccggtctctcaccatagctcctccgctattgagctcccaatctgaagcggaagcagagagcagcctcacggatatcctcgtcgggaagccctctaactcctcagccacctctggaaatctgaacccaaatgtcctagctgagcttttcgccatgtaccgcgaatggcaagaagagaatgccaagaaaattagccgaaaacagatccaacatggaacgtcttggtgcaggaggagatagaaaacaagatagaaacagctgatgcattggcagttaaacttctccagcggttcaattattgtcttacttacatgagatccacctcccacaatcttgctgaagtgcatccgctgcagatcgaagttggtgagtcaaagggcaggttaactgaagtcataagcaactgcgatgcattgtgtaagagaattgctgcagaaggaccagaaagcctacgatcatctgttcaacctttcatggctgctagagcggaggcagaagggagtggttcacttgacccaaaacaagagtcctgaattgtacaatctaactgctgacagcatgcgcaaagaaacttcagaggatgattagtttgtcctgaacaaatatattatataaacacgtttaggaattgttcggttattctcaatacatatggattggatgagattggaaaaaattaagaagaagtttgacttgtttgggattcaaacctatcaaatcccactcaattcacgtggattgagagctaatcgaacaagcccttataatgttggaaaacatgttttagtcttagaaaccgtctacattgacactagtatatctatcacgttaaccaacgtatcattcgaatggagaattgtatcattcgaatagagaattgtagatctttactactagacgcatagcgtagatgtagtggaagtagtcgaatgttcttgtgttcattcatcctcaagtttgttgttgattactgtcgcaataatagcagcttctccacggtgttcacacatgtggtgatgaaacgatgtaataccattgtgctagcataatatcac

SEQ ID NO: 5159 - DNA, 1402 bp, Zea Mays
aacttttcggcctaactcaatcgacaccattgtccaagctaaaaggcccaacttaataggctgccacttgccagtagaaccgtttgcctctcgcctgcatcctagtccggcggccgcacccgggcagctccggcggttccccgccgccgtcctccgtctatccccgactgcgctagagctccgtctcatgggggcgtccgaatctctcctatctaggcagcagcttcagcagccgcggcctcagtgggcggatgagatcacgacggtgtccgagggccggcgcgacgacgccgacgccgatcccctcgtccgccgtatccggtctctcaccatagctcctccgctattgagctcccaatctgaagcggaagcagagagcagcctcacggatatcctcgtcgggaagccctctaactcctcagccacctctggtgagtggctgccagccaggacgctattttggaaatctgaacccaaatgtcctagctgagcttttcgccatgtaccgcgaatggcaagaagagaatgccaagaaaattagccgaaaacagatccaacatggaacgtcttggtgcaggaggagatagaaaacaagatagaaacagctgatgcattggcagttaaacttctccagcggttcaattattgtcttacttacatgagatccacctcccacaatcttgctgaagtgcatccgctgcagatcgaagttggtgagtcaaagggcaggttaactgaagtcataagcaactgcgatgcattgtgtaagagaattgctgcagaaggaccagaaagcctacgatcatctgttcaacctttcatggctgctagagcggaggcagaagggagtggttcacttgacccaaaacaagagtcctgaattgtacaatctaactgctgacagcatgcgcaaagaaacttcagaggatgattagtttgtcctgaacaaatatattatataaacacgtttaggaattgttcggttattctcaatacatatggattggatgagattggaaaaaattaagaagaagtttgacttgtttgggattcaaacctatcaaatcccactcaattcacgtggattgagagctaatcgaacaagcccttataatgttggaaaacatgttttagtcttagaaaccgtctacattgacactagtatatctatcacgttaaccaacgtatcattcgaatggagaattgtatcattcgaatagagaattgtagatctttactactagacgcatagcgtagatgtagtggaagtagtcgaatgttcttgtgttcattcatcctcaagtttgttgttgattactgtcgcaataatagcagcttctccacggtgttcacacatgtggtgatgaaacgatgtaataccattgtgctagcataatatcac

SEQ ID NO: 5160 - DNA, 2291 bp, Zea Mays
ttttgtttagactggacaaatcggttaggcggatttttaggggcaaacggtctgctgtcgatacaacagttttcgttgggtgcatttcgctttcgcatcgcccgcatgtgcatctcgtccgccacgggccacagccggcctcactccgcaagtccgcgaccatgcggtgcaccctctccgcccctctccggcgctgtctctcctccaccggcgccgccgatcctagcctagtctcttcagctgagcatgcgtaccggctcctccgccgccaccactccgacccgcagaggctctccgccgcgctgtccgcgtcgggtctcgacgcctcctcgccgcacctcctcgacgccgtcctccgccgctgtggcgctgcctcctccctcgcgctgcacttcttccactggtgctccccgtcgctgccctcgccgctcccgtcctccctagcgctcctcgccaagtccttctcccgcgcctcctccgcgccgtccccgtccctactcgcgccgctcccctctcaactccttggcccctccctcctctgccccgtcctgcgccgcctcccgcaaccgcgcctcctgccgttcgcgctctcactactctccgcccgccccgaccacgaccagcccgccctctttctttccctcctcgagtccctctccaaggccggccacgtcctcaccgccgagcagcttgtcgaggagctccagccccggctcccgctttcgctccgccactatacggccttgctctacggatggtgccgtcagggcaagctcgacgaggccaagcacgtgctcgctcgcatgaaggctgcggatgttgcccttgacgtcgtcgtatttaacaccctgctcgctggcttcgtcgcggaagggagattcgaggacgcgttcgagctggcggggcagatggagcagcgtggctgtccaccgaacgcggtgtcgtacaccaccctgattcaggggcttggcgcgagggggagagttgatgaggccatgcgcgtgtttgtggaaatgcgaaggaaggggtgcgcgcccgatgctgtcacgtacggcaccctggttaacacgttttgcaaggctggcaagatatcccaggggtacgagttcttggatgctatgtcgagggatggcctgcgggtggacgctgccgtgtaccatggtttctttgtagcacacgagaagaaggagcagcttgaggagtgcttggagctgatggagaggatgcgggagtgccggtgtccaccagatctcaagatatacaatgtggtgattcggttggcctgcaggcttggggagaccaagcaagccatgacattgtggaatgagatggaaagtgctgggctcagtcctgtggtcgatacatttgctatcgtggtgagtggccttgttgggcagggtttgctgattgaggcatgtagttattttaaagacatgttagctttaagatgtataagagacgtggggtgagggatcttgaagagaaactcaaggcaaagaggagaggacagaaaaagaggcatctgcggcagcctggtcatggtcagtctagtagggatgctggcaatttggatgcttctgatgaagtagaattttccggctaattgaaatagaattcattgggggcaatgcatctctgttcatttgaattgttttggggagtgatagacttactaaacaataaaggagtgctggtgatcatgccttgccatcataatattattcttatgctaaagatgtattgggtttcaggcaagagccaagtggtacatcgattacatgtgaagttgtgtgccaagagttactgaccatgaggaggtagaagaatatgacgggtgatttatttgatctgcacttaggccttgtttggctgtacctcaatccactccaatccacgtgtattggggtggattaaggggccgttcggttactgcagaatgaagtcctggaacaattcctatccgaattgtttctctcatttatataaattttgattagctggaataattcctggtgtattcctatgcaaacagggcctaagggtttgtctagctacactgcaatccatctcaatccacatgtggattggggtgaattgcaacgtaaccaaataagggccaaggtggaagcaatgtttcagattattatctttttttactcctgaaagcagtgggttttgaaacccgtttttttcttcgaaatgagggaaacagagataatcatgtatacgtaagtttggtgctggtgcaaccagttgggccaaaatttgtagctgatgaagcttcgttgtta

SEQ ID NO: 5161 - DNA, 2476 bp, Zea Mays
cgcatcgcccgcatgtgcatctcgtccgccacgggccacagccggcctcactccgcaagtccgcgaccatgcggtgcaccctctccgcccctctccggcgctgtctctcctccaccggcgccgccgatcctagcctagtctcttcagctgagcatgcgtaccggctcctccgccgccaccactccgacccgcagaggctctccgccgcgctgtccgcgtcgggtctcgacgcctcctcgccgcacctcctcgacgccgtcctccgccgctgtggcgctgcctcctccctcgcgctgcacttcttccactggtgctccccgtcgctgccctcgccgctcccgtcctccctagcgctcctcgccaagtccttctcccgcgcctcctccgcgccgtccccgtccctactcgcgccgctcccctctcaactccttggcccctccctcctctgccccgtcctgcgccgcctcccgcaaccgcgcctcctgccgttcgcgctctcactactctccgcccgccccgaccacgaccagcccgccctctttctttccctcctcgagtccctctccaaggccggccacgtcctcaccgccgagcagcttgtcgaggagctccagccccggctcccgctttcgctccgccactatacggccttgctctacggatggtgccgtcagggcaagctcgacgaggccaagcacgtgctcgctcgcatgaaggctgcggatgttgcccttgacgtcgtcgtatttaacaccctgctcgctggcttcgtcgcggaagggagattcgaggacgcgttcgagctggcggggcagatggagcagcgtggctgtccaccgaacgcggtgtcgtacaccaccctgattcaggggcttggcgcgagggggagagttgatgaggccatgcgcgtgtttgtggaaatgcgaaggaaggggtgcgcgcccgatgctgtcacgtacggcaccctggttaacacgttttgcaaggctggcaagatatcccaggggtacgagttcttggatgctatgtcgagggatggcctgcgggtggacgctgccgtgtaccatggtttctttgtagcacacgagaagaaggagcagcttgaggagtgcttggagctgatggagaggatgcgggagtgccggtgtccaccagatctcaagatatacaatgtggtgattcggttggcctgcaggcttggggagaccaagcaagccatgacattgtggaatgagatggaaagtgctgggctcagtcctgtggtcgatacatttgctatcgtggtgagtggccttgttgggcagggtttgctgattgaggcatgtagttattttaaagacatggttgggagggggctctttgtggtaccgcaatatggggtgctgaaggacctcctcaatgcgttggtcagagatgagaaacttgagcttgcaaaggatgtttggaaatgtattgtgagcaaaggctgtgagctcaatgtgagtgcatggactatctggattcatgcactgtttgcgaagaaacatgtcaaggaggcctgcctgtattgcttagacatgctagaggcaggactgatgccacagcctgacacatttgcaaagttgatgaaggggctgaagaagttgtacaaccgtcagattgctgctgagattactgagaaggttaggaagatggcggaggagagacatgttagctttaagatgtataagagacgtggggtgagggatcttgaagagaaactcaaggcaaagaggagaggacagaaaaagaggcatctgcggcagcctggtcatggtcagtctagtagggatgctggcaatttggatgcttctgatgaagtagaattttccggctaattgaaatagaattcattgggggcaatgcatctctgttcatttgaattgttttggggagtgatagacttactaaacaataaaggagtgctggtgatcatgccttgccatcataatattattcttatgctaaagatgtattgggtttcaggcaagagccaagtggtacatcgattacatgtgaagttgtgtgccaagagttactgaccatgaggaggggactttctgatggaacctccagtaattcatctcattagggagatttcgtcgaagactgtcactacacattaaacgtctagctctaacttttttctcaacgcacatgagagctatacatcattatattatgaagaaaagaagattcaaagtagactaatacattattttattttttatttttatacatacgtatttgtcatactctcaaatgtattgtatatattttagttttgttaaaccggttatttaaagtatttaaatggataaaagatcgtttagagaaactatatatagagaatctagtagcgttctctaaatttagaggatcatttagaggacgctgctaaatagtgtagagacgtgtttgatcccctacatttagggtataagagcttttaaagtat

SEQ ID NO: 5162 - DNA, 2331 bp, Zea Mays
atcgcccgcatgtgcatctcgtccgccacgggccacagccggcctcactccgcaagtccgcgaccatgcggtgcaccctctccgcccctctccggcgctgtctctcctccaccggcgccgccgatcctagcctagtctcttcagctgagcatgcgtaccggctcctccgccgccaccactccgacccgcagaggctctccgccgcgctgtccgcgtcgggtctcgacgcctcctcgccgcacctcctcgacgccgtcctccgccgctgtggcgctgcctcctccctcgcgctgcacttcttccactggtgctccccgtcgctgccctcgccgctcccgtcctccctagcgctcctcgccaagtccttctcccgcgcctcctccgcgccgtccccgtccctactcgcgccgctcccctctcaactccttggcccctccctcctctgccccgtcctgcgccgcctcccgcaaccgcgcctcctgccgttcgcgctctcactactctccgcccgccccgaccacgaccagcccgccctctttctttccctcctcgagtccctctccaaggccggccacgtcctcaccgccgagcagcttgtcgaggagctccagccccggctcccgctttcgctccgccactatacggccttgctctacggatggtgccgtcagggcaagctcgacgaggccaagcacgtgctcgctcgcatgaaggctgcggatgttgcccttgacgtcgtcgtatttaacaccctgctcgctggcttcgtcgcggaagggagattcgaggacgcgttcgagctggcggggcagatggagcagcgtggctgtccaccgaacgcggtgtcgtacaccaccctgattcaggggcttggcgcgagggggagagttgatgaggccatgcgcgtgtttgtggaaatgcgaaggaaggggtgcgcgcccgatgctgtcacgtacggcaccctggttaacacgttttgcaaggctggcaagatatcccaggggtacgagttcttggatgctatgtcgagggatggcctgcgggtggacgctgccgtgtaccatggtttctttgtagcacacgagaagaaggagcagcttgaggagtgcttggagctgatggagaggatgcgggagtgccggtgtccaccagatctcaagatatacaatgtggtgattcggttggcctgcaggcttggggagaccaagcaagccatgacattgtggaatgagatggaaagtgctgggctcagtcctgtggtcgatacatttgctatcgtggtgagtggccttgttgggcagggtttgctgattgaggcatgtagttattttaaagacatggttgggagggggctctttgtggtaccgcaatatggggtgctgaaggacctcctcaatgcgttggtcagagatgagaaacttgagcttgcaaaggatgtttggaaatgtattgtgagcaaaggctgtgagctcaatgtgagtgcatggactatctggattcatgcactgtttgcgaagaaacatgtcaaggaggcctgcctgtattgcttagacatgctagaggcaggactgatgccacagcctgacacatttgcaaagttgatgaaggggctgaagaagttgtacaaccgtcagattgctgctgagattactgagaaggttaggaagatggcggaggagagacatgttagctttaagatgtataagagacgtggggtgagggatcttgaagagaaactcaaggcaaagaggagaggacagaaaaagaggcatctgcggcagcctggtcatggcaagagccaagtggtacatcgattacatgtgaagttgtgtgccaagagttactgaccatgaggaggtagaagaatatgacgggtgatttatttgatctgcacttaggccttgtttggctgtacctcaatccactccaatccacgtgtattggggtggattaaggggccgttcggttactgcagaatgaagtcctggaacaattcctatccgaattgtttctctcatttatataaattttgattagctggaataattcctggtgtattcctatgcaaacagggcctaagggtttgtctagctacactgcaatccatctcaatccacatgtggattggggtgaattgcaacgtaaccaaataagggccaaggtggaagcaatgtttcagattattatctttttttactcctgaaagcagtgggttttgaaacccgtttttttcttcgaaatgagggaaacagagataatcatgtatacgtaagtttggtgctggtgcaaccagttgggccaaaatttgtagctgatgaagcttcgttgtta

SEQ ID NO: 5163 - DNA, 2831 bp, Zea Mays
atcgcccgcatgtgcatctcgtccgccacgggccacagccggcctcactccgcaagtccgcgaccatgcggtgcaccctctccgcccctctccggcgctgtctctcctccaccggcgccgccgatcctagcctagtctcttcagctgagcatgcgtaccggctcctccgccgccaccactccgacccgcagaggctctccgccgcgctgtccgcgtcgggtctcgacgcctcctcgccgcacctcctcgacgccgtcctccgccgctgtggcgctgcctcctccctcgcgctgcacttcttccactggtgctccccgtcgctgccctcgccgctcccgtcctccctagcgctcctcgccaagtccttctcccgcgcctcctccgcgccgtccccgtccctactcgcgccgctcccctctcaactccttggcccctccctcctctgccccgtcctgcgccgcctcccgcaaccgcgcctcctgccgttcgcgctctcactactctccgcccgccccgaccacgaccagcccgccctctttctttccctcctcgagtccctctccaaggccggccacgtcctcaccgccgagcagcttgtcgaggagctccagccccggctcccgctttcgctccgccactatacggccttgctctacggatggtgccgtcagggcaagctcgacgaggccaagcacgtgctcgctcgcatgaaggctgcggatgttgcccttgacgtcgtcgtatttaacaccctgctcgctggcttcgtcgcggaagggagattcgaggacgcgttcgagctggcggggcagatggagcagcgtggctgtccaccgaacgcggtgtcgtacaccaccctgattcaggggcttggcgcgagggggagagttgatgaggccatgcgcgtgtttgtggaaatgcgaaggaaggggtgcgcgcccgatgctgtcacgtacggcaccctggttaacacgttttgcaaggctggcaagatatcccaggggtacgagttcttggatgctatgtcgagggatggcctgcgggtggacgctgccgtgtaccatggtttctttgtagcacacgagaagaaggagcagcttgaggagtgcttggagctgatggagaggatgcgggagtgccggtgtccaccagatctcaagatatacaatgtggtgattcggttggcctgcaggcttggggagaccaagcaagccatgacattgtggaatgagatggaaagtgctgggctcagtcctgtggtcgatacatttgctatcgtggtgagtggccttgttgggcagggtttgctgattgaggcatgtagttattttaaagacatggttgggagggggctctttgtggtaccgcaatatggggtgctgaaggacctcctcaatgcgttggtcagagatgagaaacttgagcttgcaaaggatgtttggaaatgtattgtgagcaaaggctgtgagctcaatgtgagtgcatggactatctggattcatgcactgtttgcgaagaaacatgtcaaggaggcctgcctgtattgcttagacatgctagaggcaggactgatgccacagcctgacacatttgcaaagttgatgaaggggctgaagaagttgtacaaccgtcagattgctgctgagattactgagaaggttaggaagatggcggaggagagacatgttagctttaagatgtataagagacgtggggtgagggatcttgaagagaaactcaaggcaaagaggagaggacagaaaaagaggcatctgcggcagcctggtcatggtcagtctagtagggatgctggcaatttggatgcttctgatgaagtagaattttccggctaattgaaatagaattcattgggggcaatgcatctctgttcatttgaattgttttggggagtgatagacttactaaacaataaaggagtgctggtgatcatgccttgccatcataatattattcttatgctaaagatgtattgggtttcaggcaagagccaagtggtacatcgattacatgtgaagttgtgtgccaagagttactgaccatgaggaggaaaacaagcacagaactatgcacacttgttctagcatgaatggaggtcgccaagatggatttggcaaacttcatggtggatactagagacgtacaccaagaagaaactcacgtaggctcagcaaagtcattgtcgcaaggtgttgctagggacaacttctattcaatgtttcacattacccagagaggaggaaattctcaaaagaggaatacaaagcattcacgagagagatgaataaagctatgaagcagctgttgtcgtgaccggatttcaacaggtgggcgttggctaacgcggacatgatatctgtgtggctctgccaggaggaaactacagcagcagcaacagcaaccaacagcggcatcgtttcttgggactatttttgatctgcatgtgtgtagtgtgctttcttagcagcaataggagtgctccctactcagtcatttcatgtgagttgattagcaagggtagggtaacatctgagtgttccacattatgaagtggcagcaaatatgtagaatattgtagtttagtgagtcacatcttaggtccaaaaagtccaaacagcatctgaatcttgtaacattcagtgctaaggtgagtgaatctcaatttgttgagttgtatatcatgcttgatcatcatgaggatagaatgaacgtatttaagtgtttctaggcctgcatatgaagcaagctgtggcatatgaagcaagctgtgctgaagtgtcgtgtgtagtaattttagtaattagtgtttgtag

SEQ ID NO: 5164 - DNA, 1097 bp, Zea Mays
cgctggtggaaccagggcccaacctgcctggggacgtgcccgggcttggcttcgttggtggtcgtgtggatccctgcgttagctgcgcaggttgccccatgtccgcaccctccgacctaaatctcgctcatgtcgtccggtgccatgcgactcgctgttgtgcgctcaggtgcccaacgcggcgtgatgagaccggcaacgtggctggaccggcgacgcggctgcgtggcagatacatgtgagcatgggcactgtcgccacctactcgaccaggggctgctcctccccatctcacgtggaactcctcccttggttgcttctcaaccgcatcagcgaggaaaacaagcacagaactatgcacacttgttctagcatgaatggaggtcgccaagatggatttggcaaacttcatggtggatactagagacgtacaccaagaagaaactcacgctcagcaaagtcattgtcgcaaggtgttgctagggacaacttctattcaatgtttcacattacccagagaggaggaaattctcaaaagaggaatacaaagcattcacgagagagatgaataaagctatgaagcagctgttgtcgtgaccggatttcaacaggtgggcgttggctaacgcggacatgatatctgtgtggctctgccaggaggaaactacagcagcagcaacagcaaccaacagcggcatcgtttcttgggactatttttgatctgcatgtgtgtagtgtgctttcttagcagcaataggagtgctccctactcagtcatttcatgtgagttgattagcaagggtagggtaacatctgagtgttccacattatgaagtggcagcaaatatgtagaatattgtagtttagtgagtcacatcttaggtccaaaaagtccaaacagcatctgaatcttgtaacattcagtgctaaggtgagtgaatctcaatttgttgagttgtatatcatgcttgatcatcatgaggatagaatgaacgtatttaagtgtttctaggcctgcatatgaagcaagctgtggcatatgaagcaagctgtgctgaagtgtcgtgtgtagtaattttagtaattagtgtttgtag

SEQ ID NO: 5165 - DNA, 991 bp, Zea Mays
ccagggcccaacctgcctggggacgtgcccgggcttggcttcgttggtggtcgtgtggatccctgcgttagctgcgcaggttgccccatgtccgcaccctccgacctaaatctcgctcatgtcgtccggtgccatgcgactcgctgttgtgcgctcaggtgcccaacgcggcgtgatgagaccggcaacgtggctggaccggcgacgcggctgcgtggcagatacatgaaaacaagcacagaactatgcacacttgttctagcatgaatggaggtcgccaagatggatttggcaaacttcatggtggatactagagacgtacaccaagaagaaactcacgtaggctcagcaaagtcattgtcgcaaggtgttgctagggacaacttctattcaatgtttcacattacccagagaggaggaaattctcaaaagaggaatacaaagcattcacgagagagatgaataaagctatgaagcagctgttgtcgtgaccggatttcaacaggtgggcgttggctaacgcggacatgatatctgtgtggctctgccaggaggaaactacagcagcagcaacagcaaccaacagcggcatcgtttcttgggactatttttgatctgcatgtgtgtagtgtgctttcttagcagcaataggagtgctccctactcagtcatttcatgtgagttgattagcaagggtagggtaacatctgagtgttccacattatgaagtggcagcaaatatgtagaatattgtagtttagtgagtcacatcttaggtccaaaaagtccaaacagcatctgaatcttgtaacattcagtgctaaggtgagtgaatctcaatttgttgagttgtatatcatgcttgatcatcatgaggatagaatgaacgtatttaagtgtttctaggcctgcatatgaagcaagctgtggcatatgaagcaagctgtgctgaagtgtcgtgtgtagtaattttagtaattagtgtttgtag

SEQ ID NO: 5166 - DNA, 833 bp, Zea Mays
ctcagagtttcttctggtggactatgggacgacatggccattgggctccttgtctcttccatcactttgcagggaaaacaagcacagaactatgcacacttgttctagcatgaatggaggtcgccaagatggatttggcaaacttcatggtggatactagagacgtacaccaagaagaaactcacgctcagcaaagtcattgtcgcaaggtgttgctagggacaacttctattcaatgtttcacattacccagagaggaggaaattctcaaaagaggaatacaaagcattcacgagagagatgaataaagctatgaagcagctgttgtcgtgaccggatttcaacaggtgggcgttggctaacgcggacatgatatctgtgtggctctgccaggaggaaactacagcagcagcaacagcaaccaacagcggcatcgtttcttgggactatttttgatctgcatgtgtgtagtgtgctttcttagcagcaataggagtgctccctactcagtcatttcatgtgagttgattagcaagggtagggtaacatctgagtgttccacattatgaagtggcagcaaatatgtagaatattgtagtttagtgagtcacatcttaggtccaaaaagtccaaacagcatctgaatcttgtaacattcagtgctaaggtgagtgaatctcaatttgttgagttgtatatcatgcttgatcatcatgaggatagaatgaacgtatttaagtgtttctaggcctgcatatgaagcaagctgtggcatatgaagcaagctgtgctgaagtgtcgtgtgtagtaattttagtaattagtgtttgtag

SEQ ID NO: 5167 - DNA, 831 bp, Zea Mays
gtttcttctggtggactatgggacgacatggccattgggctccttgtctcttccatcactttgcagggaaaacaagcacagaactatgcacacttgttctagcatgaatggaggtcgccaagatggatttggcaaacttcatggtggatactagagacgtacaccaagaagaaactcacgtaggctcagcaaagtcattgtcgcaaggtgttgctagggacaacttctattcaatgtttcacattacccagagaggaggaaattctcaaaagaggaatacaaagcattcacgagagagatgaataaagctatgaagcagctgttgtcgtgaccggatttcaacaggtgggcgttggctaacgcggacatgatatctgtgtggctctgccaggaggaaactacagcagcagcaacagcaaccaacagcggcatcgtttcttgggactatttttgatctgcatgtgtgtagtgtgctttcttagcagcaataggagtgctccctactcagtcatttcatgtgagttgattagcaagggtagggtaacatctgagtgttccacattatgaagtggcagcaaatatgtagaatattgtagtttagtgagtcacatcttaggtccaaaaagtccaaacagcatctgaatcttgtaacattcagtgctaaggtgagtgaatctcaatttgttgagttgtatatcatgcttgatcatcatgaggatagaatgaacgtatttaagtgtttctaggcctgcatatgaagcaagctgtggcatatgaagcaagctgtgctgaagtgtcgtgtgtagtaattttagtaattagtgtttgtag

SEQ ID NO: 5168 - DNA, 818 bp, Zea Mays
acaaatctgcaaccaccttactatatcactcaattagtatactgcattatacaggaaaacaagcacagaactatgcacacttgttctagcatgaatggaggtcgccaagatggatttggcaaacttcatggtggatactagagacgtacaccaagaagaaactcacgtaggctcagcaaagtcattgtcgcaaggtgttgctagggacaacttctattcaatgtttcacattacccagagaggaggaaattctcaaaagaggaatacaaagcattcacgagagagatgaataaagctatgaagcagctgttgtcgtgaccggatttcaacaggtgggcgttggctaacgcggacatgatatctgtgtggctctgccaggaggaaactacagcagcagcaacagcaaccaacagcggcatcgtttcttgggactatttttgatctgcatgtgtgtagtgtgctttcttagcagcaataggagtgctccctactcagtcatttcatgtgagttgattagcaagggtagggtaacatctgagtgttccacattatgaagtggcagcaaatatgtagaatattgtagtttagtgagtcacatcttaggtccaaaaagtccaaacagcatctgaatcttgtaacattcagtgctaaggtgagtgaatctcaatttgttgagttgtatatcatgcttgatcatcatgaggatagaatgaacgtatttaagtgtttctaggcctgcatatgaagcaagctgtggcatatgaagcaagctgtgctgaagtgtcgtgtgtagtaattttagtaattagtgtttgtag

SEQ ID NO: 5169 - DNA, 1139 bp, Zea Mays
cgctaagctgatacctgatagtgccctatatgatggagaaaagctattgcataggtgtttagctgctgctgcattaagtccagattttaaggatcctaatctctaatcattccgacagaaggaatcgcaagtcctcaaacatcttactatgccgcttagttagtatactgtaatatatatgtgtcggtaggaattaggatataatcttgtgagatttctgataatatgttgagttgccgatatgcaatttgatagctttattgacaataagtggtatatgttatgctatgtttctttcatgatgggtgattccaattgataggaatacacattctattaaagtattccttctttatttatatgtttttttgttaggaaaacaagcacagaactatgcacacttgttctagcatgaatggaggtcgccaagatggatttggcaaacttcatggtggatactagagacgtacaccaagaagaaactcacgtaggctcagcaaagtcattgtcgcaaggtgttgctagggacaacttctattcaatgtttcacattacccagagaggaggaaattctcaaaagaggaatacaaagcattcacgagagagatgaataaagctatgaagcagctgttgtcgtgaccggatttcaacaggtgggcgttggctaacgcggacatgatatctgtgtggctctgccaggaggaaactacagcagcagcaacagcaaccaacagcggcatcgtttcttgggactatttttgatctgcatgtgtgtagtgtgctttcttagcagcaataggagtgctccctactcagtcatttcatgtgagttgattagcaagggtagggtaacatctgagtgttccacattatgaagtggcagcaaatatgtagaatattgtagtttagtgagtcacatcttaggtccaaaaagtccaaacagcatctgaatcttgtaacattcagtgctaaggtgagtgaatctcaatttgttgagttgtatatcatgcttgatcatcatgaggatagaatgaacgtatttaagtgtttctaggcctgcatatgaagcaagctgtggcatatgaagcaagctgtgctgaagtgtcgtgtgtagtaattttagtaattagtgtttgtag

SEQ ID NO: 5170 - DNA, 2688 bp, Zea Mays
cttgctgctgcaaagcttacttctttttttcccgttgcttgttgattggattttggtgattgaaaagcttgctatccacttcttctccagtattattgcttttcggttcgattcgattcaccctgctttctctctttgctcttggtctcgtagctacagatttatttatttttacttggttatgtctactgactgactactgcttatccttaagctgatctgtgccctcttccgtttcttctcctcttcttctttcttctagcttcagttatttagtgcatctactctagattcatggggttttcatgaccagtgttgactcttttaacctgccaatgatctttgtatggggttttcctctctcttttcgtcttctggagatttagattagtgacgactgtaaaagttcttccacctctggaaaaaagaaatggttttaaatagtattttaaaaaaagctttattgaatcatccgtgatatgtatcgacataagtttgcacttctttttgctgacatccgccaacgcttttcttgtcctcaacggcgccgcgatcgtgtggattcctttttgtcacgccgcctgctgataatacgactactagttcttattagaggaagaatgaaaaagaatggcgtgatctacctcggacctataccttcacccctttctcactcagaaacctaaaaaccaagaaacagctaaaagagcatgaatgcacgcaagaaagtctcaagaatacaatggagcctcgcgattcaagttcactgtcgggacccaacagtgtggtccttggtcggcttgctatggacatcacctataaatctgtgctgcttatcaggattgagctcggtgagcttgagcaccagcatgcagggggcaatggccagggtgagggccccattcacgccgtcccagtggatcgagctcgaacaccaggccctgatctacaagtacctggccgcgaacagccccatacctcacagcctcctcatccccatcaggaggagcctcgcagcgtctccctacccgccttcatacttcggcacgagcacattggggtggggctctttccagctgggctactccggcaatgcggatctggagcctgggcggtgccgccggacggacggcaagaaatggcggtgctccagggacgcggtcgccgaccagaagtactgcgagcgacacatgaaccggggacgccatcgttcaagaaagcatgtggaaggccagcctggccatgccgcgaaagccatgtccgcggtggcggcggcggctgctgctgctgcccagcctgctgctctggccggcgccggagctcctgctgctggcctcactgtcaatcagcaccagctgccggcgaagagctacgccacgggtgcgactgacccttgctctctgcaatataacagggaactggtgaacaaacagaatgagagcgaaaacatgcaggactccgacaacctctcgatgctgacttccatgaacacaggaaacacaggcagcgtgttcccattctcgaaacaaaacaccaatccttttgaagtgaccagctcaaggctagagttcggcctcgtttcatcggattcactgatgagttcccctcacagttccttggagaacgtcaacctgctcggctcacagagtatgaacgaacaccagaacccagcctccctgcaacacttcgtggactggcccaggacgcctgcccagggaggcctttcatggcccgaagctgaagacatgcaggctcagaggtcacagctctccatatctgctcccatggcatcctccgagctatcgtcggcctccacatcccccatccacgagaagctgatgctgtcgcctctgaagctgagccgcgagtacagcccgactggtctcggcattgcggcgaacagagacgaggctagccagctagaagcaacctgggcgacgatgttccgtgactcttcgatgggcggtccgttgggggaggttctggccaagaacggcaacgtggaagcgagaaattacctgtcggcgcctctgaaccttctcaccgactactgggattcaagccacgggatggagtcctcccctgtgggcgttctgcagaagacgaccgccttcggatcggtctccagcagtacagggagcagccctagggttgagaaccacggcgcctacgacggtttcggcaacctgcgggatgatctcggctcaattgtagtgcgccatccaagcatccgccttgtgtgagctttctgagttctgaccatggaaaactgcaacaagacggcggcccgcagccatagaagtgggcatatgggctactatgctaatcctcaaagcgtgaggggggggcatttacctcgtagtttgtcatttgagactgatctcctgttttttgtcacttcagttcttcttttgcttccctttttaacttggctttgtaactttcaccttccttggatcgtgaaaagcgctgtggtgtgtggtgtggatggatttggtgcgccgctgatgcatatcatcatgtgatagaagaagccagtatccgtcgaggattactgcgagtatcgcctgtttgttgttcatacgtcatactgctgcactgcacttcactgtttgtgtgcccgttgttgcattgtatggttcggttatattaatttacaaacaggtcgtgaggctgcacatttagatt

SEQ ID NO: 5171 - DNA, 3065 bp, Zea Mays
caaagcttacttctttttttcccgttgcttgttgattggattttggtgattgaaaagcttgctatccacttcttctccagtattattgcttttcggttcgattcgattcaccctgctttctctctttgctcttggtctcgtagctacagatttatttatttttacttggttatgtctactgactgactactgcttatccttaagctgatctgtgccctcttccgtttcttctcctcttcttctttcttctagcttcagttatttagtgcatctactctagattcatggggttttcatgaccagtgttgactcttttaacctgccaatgatctttgtatggggttttcctctctcttttcgtcttctggagatttagattagtgacgactgtaaaagttcttccacctctggaaaaaagaaatggttttaaatagtattttaaaaaaagctttattgaatcatccgtgatatgtatcgacataagtttgcacttctttttgctgacatccgccaacgcttttcttgtcctcaacggcgccgcgatcgtgtggattcctttttgtcacgccgcctgctgataatacgactactagttcttattagaggaagaatgaaaaagaatggcgtgatctacctcggacctataccttcacccctttctcactcagaaacctaaaaaccaagaaacagctaaaagagcatgaatgcacgcaagaaagtctcaagaatacaatggagcctcgcgattcaagttcactgtcgggacccaacagtgtggtccttggtcggcttgctatggacatcacctataaatctgtgctgcttatcaggattgagctcggtgagcttgagcaccagcatgcagggggcaatggccagggtgagggccccattcacgccgtcccagtggatcgagctcgaacaccaggccctgatctacaagtacctggccgcgaacagccccatacctcacagcctcctcatccccatcaggaggagcctcgcagcgtctccctacccgccttcatacttcggcacgagcacattggggtggggctctttccagctgggctactccggcaatgcggatctggagcctgggcggtgccgccggacggacggcaagaaatggcggtgctccagggacgcggtcgccgaccagaagtactgcgagcgacacatgaaccggggacgccatcgttcaagaaagcatgtggaaggccagcctggccatgccgcgaaagccatgtccgcggtggcggcggcggctgctgctgctgcccagcctgctgctctggccggcgccggagctcctgctgctggcctcactgtcaatcagcaccagctgccggcgaagagctacgccacgggtgcgactgacccttgctctctgcaatataacaggtattttcttctgctctgcttgtgctcgaaatgctgtaacacgtaaggaatatgtcgtctagtcttggtcttgctagccaaactatctgctttcgtcaaactggcgctagattgaatgtttatttgctttctcctacattcttccagctgccctagtgtgacactggacttctctgatgtgatattgtgatacttgtccaggtgctggtagtgtagtgtagggctgtaggtgttgtgtttacagtatcgagttccatcccaaagtcttcaatctatatacaagtgtttccatgaatttgcaaacatgaacatgttcatgggccctcaaatttcagtcgctctttgatgtacatgctaactaatcccactgctgaatgatccatgcagggaactggtgaacaaacagaatgagagcgaaaacatgcaggactccgacaacctctcgatgctgacttccatgaacacaggaaacacaggcagcgtgttcccattctcgaaacaaaacaccaatccttttgaagtgaccagctcaaggctagagttcggcctcgtttcatcggattcactgatgagttcccctcacagttccttggagaacgtcaacctgctcggctcacagagtatgaacgaacaccagaacccagcctccctgcaacacttcgtggactggcccaggacgcctgcccagggaggcctttcatggcccgaagctgaagacatgcaggctcagaggtcacagctctccatatctgctcccatggcatcctccgagctatcgtcggcctccacatcccccatccacgagaagctgatgctgtcgcctctgaagctgagccgcgagtacagcccgactggtctcggcattgcggcgaacagagacgaggctagccagctagaagcaacctgggcgacgatgttccgtgactcttcgatgggcggtccgttgggggaggttctggccaagaacggcaacgtggaagcgagaaattacctgtcggcgcctctgaaccttctcaccgactactgggattcaagccacgggatggagtcctcccctgtgggcgttctgcagaagacgaccgccttcggatcggtctccagcagtacagggagcagccctagggttgagaaccacggcgcctacgacggtttcggcaacctgcgggatgatctcggctcaattgtagtgcgccatccaagcatccgccttgtgtgagctttctgagttctgaccatggaaaactgcaacaagacggcggcccgcagccatagaagtgggcatatgggctactatgctaatcctcaaagcgtgaggggggggcatttacctcgtagtttgtcatttgagactgatctcctgttttttgtcacttcagttcttcttttgcttccctttttaacttggctttgtaactttcaccttccttggatcgtgaaaagcgctgtggtgtgtggtgtggatggatttggtgcgccgctgatgcatatcatcatgtgatagaagaagccagtatccgtcgaggattactgcgagtatcgcctgtttgttgttcatacgtcatactgctgcactgcacttcactgtttgtgtgcccgttgttgcattgtatggttcggttatattaatttacaaacaggtcgtgaggctgcacatttagatt

SEQ ID NO: 5172 - DNA, 2027 bp, Zea Mays
caacgaacggaggcgcgcggagcaaatcggagattcggagcccgggaccgggcgcgctccaccaccacacgtgacctcgctctcggcctcccgggcctcggcttgggcgcttggcaggctccccgctcctgcgggagaacgcaaggtttccacctaggcagagataaataagatctgcggaatcaagaagctctgtccaaggaggaagccagcggcacggcagtgccctcggcggtgatgaagtacgtctccgggccgtacttcgaaccggacttcgacccgctactcgaccgcttcggcaccccaggggtcgtcgtcgacaatgagacacgcgaggactgcacgctcgtcaaggttgacagcgtgaaccgggacggcgtgctgctggagatggtgcagctgctcaccgatctcgacctcgtcatctccaagtcgtacatctcctccgacggcggctggctcatggatgtgttccatgtgacggaccagatcgggcgcaagctgacggacccgtcgctgcccgagttcatccagcgcgcgctcgtgccgacccaccggccgggcaacggcccgtctccgaggttcaccacgtgcctgggcaacgtggtcgggccgggcggccccgacgtttcgggctgcgccgcgctcgagttcacggtgcacgaccgcccggggctcctgtcctccatcacgtccgtgctggccgacaacgggtgccacgtcgcgtccgggcaggcgtggacgcacaacggccgcgcggctggggtgctgtacgtgacggacaccgcgggcggcgccgcgctgctcccgggccggtgcgcgcgcatcgagcggctggtgaacgccgtggtggacgcgcgcgagaacgtgaccggggagcgccactgggtgcgcgtgtcggagcccgcgcagggccgcgtgcacacggagcgccgcctgcaccaactcatgcacgacgacagggactacgagtccggcccggccccgacccccgtcgacgaggacctcttcagcgtgggcgaaaaggcggcgaccgcgcggacggcccgccgcgccgtgacgcgggtgtccatcgacagctgggaggagcggggctacgccgtcgtcaagatgacgagcagggaccgccccaggctgctcttcgacacggtgtgcgcgctcaccgacatgcagtacgtcgtcttccacgctaccgtcggatcccaggggcctcttgccattcaggagtattacatccggcacaaggacgggcgcacggtcgacaacagcgccgagaggcagaaggtctcccggtgcctcgtggccgcggtggagcggagggccactcatggcgtcagggtggaggtgcgcgccgccgaccggtcgggcttgctatcggatttcaccagggtgctgcgggagcacggcctgtcgctgctgagagttgagctcaagaggcacaaggacgaggccttcggcatattttacctcgtcacggacaccggaggcgaggtgcgcgctgagtcgttgcgcgccgtgcaggcgagggtcgccgagatggatatctcgctcgacgttgtgaaggaggcccctggctggccgccggtgaggaagactagcgtaccagccccgcccgccgccgggtctcagcctcaggagaggcccagaccttccctggggagcctcctatggtcacaccttgggaagctctcgaataacttcaacaacatcaggtcttgatacctgttcgcagaatgcacctgttgttctgcatagacgcttccattggtgcgtcggttccaataacttcctggacctcgagtaccaagaatttatgtcaggaagcagtacaaaactgtacataaagtgtatcagataaaagtaagcagagtgacgttcaatttatcaagaacttaggtgtgtttggttcgagaaataactttatctaaaatgagatgatgcattataagtatatttctcaaatttggtataatgaatttatttcacatgttaatactaactataataaatgagtttctcatgttaat

SEQ ID NO: 5173 - DNA, 2250 bp, Zea Mays
caacgaacggaggcgcgcggagcaaatcggagattcggagcccgggaccgggcgcgctccaccaccacacgtgacctcgctctcggcctcccgggcctcggcttgggcgcttggcaggctccccgctcctgcgggagaacgcaaggcaatcgatctcccgcccgcctccgatccctcctccattctcgctcgtccacggtctgccctatataacccctcgctccgttggtttcgtcgcctccgttcccccaagggagaagggtacgttggtgatatcccgcgtccccagcgaggatgctgtcattgcgctgccacgccgccgcgccggcgacccgcggcgtcgcatgtgaacacggggcgcgttcatcgtttccacctaggcagagataaataagatctgcggaatcaagaagctctgtccaaggaggaagccagcggcacggcagtgccctcggcggtgatgaagtacgtctccgggccgtacttcgaaccggacttcgacccgctactcgaccgcttcggcaccccaggggtcgtcgtcgacaatgagacacgcgaggactgcacgctcgtcaaggttgacagcgtgaaccgggacggcgtgctgctggagatggtgcagctgctcaccgatctcgacctcgtcatctccaagtcgtacatctcctccgacggcggctggctcatggatgtgttccatgtgacggaccagatcgggcgcaagctgacggacccgtcgctgcccgagttcatccagcgcgcgctcgtgccgacccaccggccgggcaacggcccgtctccgaggttcaccacgtgcctgggcaacgtggtcgggccgggcggccccgacgtttcgggctgcgccgcgctcgagttcacggtgcacgaccgcccggggctcctgtcctccatcacgtccgtgctggccgacaacgggtgccacgtcgcgtccgggcaggcgtggacgcacaacggccgcgcggctggggtgctgtacgtgacggacaccgcgggcggcgccgcgctgctcccgggccggtgcgcgcgcatcgagcggctggtgaacgccgtggtggacgcgcgcgagaacgtgaccggggagcgccactgggtgcgcgtgtcggagcccgcgcagggccgcgtgcacacggagcgccgcctgcaccaactcatgcacgacgacagggactacgagtccggcccggccccgacccccgtcgacgaggacctcttcagcgtgggcgaaaaggcggcgaccgcgcggacggcccgccgcgccgtgacgcgggtgtccatcgacagctgggaggagcggggctacgccgtcgtcaagatgacgagcagggaccgccccaggctgctcttcgacacggtgtgcgcgctcaccgacatgcagtacgtcgtcttccacgctaccgtcggatcccaggggcctcttgccattcaggagtattacatccggcacaaggacgggcgcacggtcgacaacagcgccgagaggcagaaggtctcccggtgcctcgtggccgcggtggagcggagggccactcatggcgtcagggtggaggtgcgcgccgccgaccggtcgggcttgctatcggatttcaccagggtgctgcgggagcacggcctgtcgctgctgagagttgagctcaagaggcacaaggacgaggccttcggcatattttacctcgtcacggacaccggaggcgaggtgcgcgctgagtcgttgcgcgccgtgcaggcgagggtcgccgagatggatatctcgctcgacgttgtgaaggaggcccctggctggccgccggtgaggaagactagcgtaccagccccgcccgccgccgggtctcagcctcaggagaggcccagaccttccctggggagcctcctatggtcacaccttgggaagctctcgaataacttcaacaacatcaggtcttgatacctgttcgcagaatgcacctgttgttctgcatagacgcttccattggtgcgtcggttccaataacttcctggacctcgagtaccaagaatttatgtcaggaagcagtacaaaactgtacataaagtgtatcagataaaagtaagcagagtgacgttcaatttatcaagaacttaggtgtgtttggttcgagaaataactttatctaaaatgagatgatgcattataagtatatttctcaaatttggtataatgaatttatttcacatgttaatactaactataataaatgagtttctcatgttaat

SEQ ID NO: 5174 - DNA, 2274 bp, Zea Mays
aacgaacggaggcgcgcggagcaaatcggagattcggagcccgggaccgggcgcgctccaccaccacacgtgacctcgctctcggcctcccgggcctcggcttgggcgcttggcaggctccccgctcctgcgggagaacgcaaggcaatcgatctcccgcccgcctccgatccctcctccattctcgctcgtccacggtctgccctatataacccctcgctccgttggtttcgtcgcctccgttcccccaagggagaagggtacgttggtgatatcccgcgtccccagcgaggatgctgtcattgcgctgccacgccgccgcgccggcgacccgcggcgtcgcatgtgaacacggggcgcgttcatcgtgttgtcttctttctttgccccccgtttccacctaggcagagataaataagatctgcggaatcaagaagctctgtccaaggaggaagccagcggcacggcagtgccctcggcggtgatgaagtacgtctccgggccgtacttcgaaccggacttcgacccgctactcgaccgcttcggcaccccaggggtcgtcgtcgacaatgagacacgcgaggactgcacgctcgtcaaggttgacagcgtgaaccgggacggcgtgctgctggagatggtgcagctgctcaccgatctcgacctcgtcatctccaagtcgtacatctcctccgacggcggctggctcatggatgtgttccatgtgacggaccagatcgggcgcaagctgacggacccgtcgctgcccgagttcatccagcgcgcgctcgtgccgacccaccggccgggcaacggcccgtctccgaggttcaccacgtgcctgggcaacgtggtcgggccgggcggccccgacgtttcgggctgcgccgcgctcgagttcacggtgcacgaccgcccggggctcctgtcctccatcacgtccgtgctggccgacaacgggtgccacgtcgcgtccgggcaggcgtggacgcacaacggccgcgcggctggggtgctgtacgtgacggacaccgcgggcggcgccgcgctgctcccgggccggtgcgcgcgcatcgagcggctggtgaacgccgtggtggacgcgcgcgagaacgtgaccggggagcgccactgggtgcgcgtgtcggagcccgcgcagggccgcgtgcacacggagcgccgcctgcaccaactcatgcacgacgacagggactacgagtccggcccggccccgacccccgtcgacgaggacctcttcagcgtgggcgaaaaggcggcgaccgcgcggacggcccgccgcgccgtgacgcgggtgtccatcgacagctgggaggagcggggctacgccgtcgtcaagatgacgagcagggaccgccccaggctgctcttcgacacggtgtgcgcgctcaccgacatgcagtacgtcgtcttccacgctaccgtcggatcccaggggcctcttgccattcaggagtattacatccggcacaaggacgggcgcacggtcgacaacagcgccgagaggcagaaggtctcccggtgcctcgtggccgcggtggagcggagggccactcatggcgtcagggtggaggtgcgcgccgccgaccggtcgggcttgctatcggatttcaccagggtgctgcgggagcacggcctgtcgctgctgagagttgagctcaagaggcacaaggacgaggccttcggcatattttacctcgtcacggacaccggaggcgaggtgcgcgctgagtcgttgcgcgccgtgcaggcgagggtcgccgagatggatatctcgctcgacgttgtgaaggaggcccctggctggccgccggtgaggaagactagcgtaccagccccgcccgccgccgggtctcagcctcaggagaggcccagaccttccctggggagcctcctatggtcacaccttgggaagctctcgaataacttcaacaacatcaggtcttgatacctgttcgcagaatgcacctgttgttctgcatagacgcttccattggtgcgtcggttccaataacttcctggacctcgagtaccaagaatttatgtcaggaagcagtacaaaactgtacataaagtgtatcagataaaagtaagcagagtgacgttcaatttatcaagaacttaggtgtgtttggttcgagaaataactttatctaaaatgagatgatgcattataagtatatttctcaaatttggtataatgaatttatttcacatgttaatactaactataataaatgagtttctcatgttaat

SEQ ID NO: 5175 - DNA, 1799 bp, Zea Mays
aaaccaggctcatcggtccatccgattgcatctccacccgtgacgatagtacgctacacgtccccctgggccctgagtccctgacccccactccaaccccaccaacaccagcaccgccgtccgctacccttctcgcagactcgcaccatctaacaaccgccgccccgccaaacccgaaccagatctggtacgtgccgcccctcgatttggcgcgctcgatccggcctcgtggtgctggtgatatgccagtccctaactcaaatctgggaggttccactgaagcgagattgtagtcgcgaatcgcgggcgccgagatgcaggcgcgtgtggcgtccatggaggacgtgaaggaggcgcggcaggcggccatggcggcggggcaggggagggtgcttccctcggggatgctcaaggtgttcctggggttcctgctgctggccgtggggctgtccgccgtcggcatgtacatggcgcggcacgcggtggcggcggccgcgcccgcgctattccgcccgtgcctgagcggctcctccgcggaggaggaacccgaggggctggagcggtggacgcggcccccagcgcgcgtagagcacgcgatgacggatcaggagctgctctggcgcgcgtcgttcgcgccgcgggtgcgcggatacccgttccgccgcgtgcccaaggtggccttcatgtttctcacgcgaggcccgttgccgctcgcgccgctctgggagcgattctttcgtgggcacgaggggcgctactccatctacgtgcacgcgttgccatcctaccatgccaacttcacctctgaatccgtcttctatcggcgccaaattcccagttgcagaatggggtcagatgaccatgtgtgatgctgagagacgcctacttgccaacgctttgctggacatatccaacgagtggtttgtgcttgtgtctgagtcgtgcattcctatatttgatttcaacacaacatacaggtacttccggaactcaaaccaaagctttctcatggcgtttgatgaccctggaccttatggacggggaagatacaactggaatatgacccctgaggtcgaactcgaccaatggcgcaaaggctcacagtggttcgaagtacacagagagcttgccattgaaattgtgaaggacacggtctattatccaaaattcaaggagttctgcaggccccattgctatgttgatgagcactatttccccacaatgctgacgattgaagctccaaaccgcctggctaacagaagtgtcacttgggtggattggtcaagaggtggtgcacatccagccacgttcggcaggggcgatatcacgttggagttcctgaggagagtccgcgagggacggacatgtctacacaataaccagaactcaacgatgtgcttcttgtttgcgcgtaagttcgctccaagtacattggagccgttgttagagctagcgcctactgtgctcggttttggttgatggctgtgtcagtctgaagaggtgccgtctgtaattttgatattagatcattgtaggattacacgctcgcttggagacatgggctcagattgatggatggaaacgtatagtgtcccccctccgcttgttcattatacataaatctgttttgtttttgtacagtaatggcgtgtttagaggcatatgtacttacctcagttcacatggattggagtgatttggtgttgaatttagtttagaatctgcactaaactacttcaatctacatggattgaagctgatgcatgcacatgcaaacgaaccctaaagtgagccttgat

SEQ ID NO: 5176 - DNA, 1369 bp, Zea Mays
aaaaatgacattcagtgccatgtttgtaacttgagttgcactgacgattttttaatgtgatatgagtttctgacaagttggttactgagaactatgaacctacggttcctgtactttaatgagtttcacaggtaacagtcataacgagagtcttattatatgggcctactactgcaagtaggaagctgtcaatgatgcaccgagggatcccatggagaggattcagcttaatcttttttgtgtttaccatggtcggggataatacaaaattacaaatgttgtgtgttggatgattgaacaaatttgaacagatgcgttgctatccaaaagatattacagacaccaaccttgcctttgttgaatctgtttctgattttgcacgagattggtttttgtgctatgtctatgttgcagaatggggtcagatgaccatgtgtgatgctgagagacgcctacttgccaacgctttgctggacatatccaacgagtggtttgtgcttgtgtctgagtcgtgcattcctatatttgatttcaacacaacatacaggtacttccggaactcaaaccaaagctttctcatggcgtttgatgaccctggaccttatggacggggaagatacaactggaatatgacccctgaggtcgaactcgaccaatggcgcaaaggctcacagtggttcgaagtacacagagagcttgccattgaaattgtgaaggacacggtctattatccaaaattcaaggagttctgcaggccccattgctatgttgatgagcactatttccccacaatgctgacgattgaagctccaaaccgcctggctaacagaagtgtcacttgggtggattggtcaagaggtggtgcacatccagccacgttcggcaggggcgatatcacgttggagttcctgaggagagtccgcgagggacggacatgtctacacaataaccagaactcaacgatgtgcttcttgtttgcgcgtaagttcgctccaagtacattggagccgttgttagagctagcgcctactgtgctcggttttggttgatggctgtgtcagtctgaagaggtgccgtctgtaattttgatattagatcattgtaggattacacgctcgcttggagacatgggctcagattgatggatggaaacgtatagtgtcccccctccgcttgttcattatacataaatctgttttgtttttgtacagtaatggcgtgtttagaggcatatgtacttacctcagttcacatggattggagtgatttggtgttgaatttagtttagaatctgcactaaactacttcaatctacatggattgaagctgatgcatgcacatgcaaacgaaccctaaagtgagccttgat

SEQ ID NO: 5177 - DNA, 1661 bp, Zea Mays
tatctcttcttgactgctgcagtgctgctctctacttcacccgctcccacgcacgccccgccccaccccacgggacgcagcagaacacgacgaagccggtgccggtccatgcacacggttcccttcatgctttcatagaccgggtccatgtaaccggaccatctccattgatggacaaaagccggcaagcagcggggccacccacgatgcggtgcgcgtgcctcgtgccgtcgtgcgctccctgaggtcccgatccggcattccggcgtcgcgccgatggtatgccaaccttgctctcgaattttggcgaccccacattcccacggcgcttgaagaaatcctagccccgtgctgccgcgctgcagacggcacgcacggcatccatggagaacgacgcgaaggaggcgaggcaggggcagcacagggtgttcccgtgggggatgctcaaggtgttcctgctgctcggcttagggctgtccgcggccggcgtgctcatggcgcgtcacgggcacgaggtggcggcggccacgctgttccggccgtggctgggcgtctcccccaccgccgccgccgcggaggggctggagcactcgatgacggacgaggagctgctctggcgcgcgtcgttcgccccgggggtgcggcggtacccgttccggcgcgtgcccaaggtggccttcatgttcctcacgcgcggcccgctgccgctggcgccgctctgggagcgcttcttccgggggaacgaggggcgctactccatctacgtccacgcgctgccgtcgtaccgggccaactttacctccgaatccgtcttctatcgacgccaaatccccagttgctgaatggggtcagatgaccatgtgcgatgctgagagacgtctacttgccaacgctttgctggatatatccaacgaatggtttgtgcttgtgtccgagtcatgcattcctatatttgatttcaacacgacgtaccaatactttctcaactcgagccagagctttgtcatggctattgatgaccctggaccatatggacggggacggtatgactggaacatgacccctgaggttgatgtcacacaatggcgcaaaggatcgcagtggtttgaagtaaacagggaagttggcatcgaaattgtgaaggacacggtctattaccccaagttcaaggagttctgcaggcctagttgctactctgatgagcactatatccaaacaatgctctcaattgaaactccgcagagcctagctaacaggagtgtcacctgggtagactggtctagaattgctgcgcatccagcaaggtttggcagggttgacatcacggaggaattcttgagggaagttcgagagggacagacctgtctgtacaatgagaagaattcaacgttgtgcttcttgtttgctcggaagtttgctccaagcgcactggagccattgttagagttagcacccactgtccttggttttggataacgcatgtttttttagagatttgctggttgaatgtgacttgaatttaatcttacaatacataaagggggcttaggcttattaaggggatgtttggtttgaagaaccaatctattctaatgaattggtgtatcataagctcgttccacaaatttggtggaataaatccattcgtcatgttattagcc

SEQ ID NO: 5178 - DNA, 1587 bp, Zea Mays
tatctcttcttgactgctgcagtgctgctctctacttcacccgctcccacgcacgccccgccccaccccacgggacgcagcagaacacgacgaagccggtgccggtccatgcacacggttcccttcatgctttcatagaccgggtccatgtaaccggaccatctccattgatggacaaaagccggcaagcagcggggccacccacgatgcggtgcgcgtgcctcgtgccgtcgtgcgctccctgaggtcccgatccggcattccggcgtcgcgccgatggtatgccaaccttgctctcgaattttggcgaccccacattcccacggcgcttgaagaaatcctagccccgtgctgccgcgctgcagacggcacgcacggcatccatggagaacgacgcgaaggaggcgaggcaggggcagcacagggtgttcccgtgggggatgctcaaggtgttcctgctgctcggcttagggctgtccgcggccggcgtgctcatggcgcgtcacgggcacgaggtggcggcggccacgctgttccggccgtggctgggcgtctcccccaccgccgccgccgcggaggggctggagcactcgatgacggacgaggagctgctctggcgcgcgtcgttcgccccgggggtgcggcggtacccgttccggcgcgtgcccaaggtggccttcatgttcctcacgcgcggcccgctgccgctggcgccgctctgggagcgcttcttccgggggaacgaggggcgctactccatctacgtccacgcgctgccgtcgtaccgggccaactttacctccgaatccgtcttctatcgacgccaaatccccagtaaggttgctgaatggggtcagatgaccatgtgcgatgctgagagacgtctacttgccaacgctttgctggatatatccaacgaatgagctttgtcatggctattgatgaccctggaccatatggacggggacggtatgactggaacatgacccctgaggttgatgtcacacaatggcgcaaaggatcgcagtggtttgaagtaaacagggaagttggcatcgaaattgtgaaggacacggtctattaccccaagttcaaggagttctgcaggcctagttgctactctgatgagcactatatccaaacaatgctctcaattgaaactccgcagagcctagctaacaggagtgtcacctgggtagactggtctagaattgctgcgcatccagcaaggtttggcagggttgacatcacggaggaattcttgagggaagttcgagagggacagacctgtctgtacaatgagaagaattcaacgttgtgcttcttgtttgctcggaagtttgctccaagcgcactggagccattgttagagttagcacccactgtccttggttttggataacgcatgtttttttagagatttgctggttgaatgtgacttgaatttaatcttacaatacataaagggggcttaggcttattaaggggatgtttggtttgaagaaccaatctattctaatgaattggtgtatcataagctcgttccacaaatttggtggaataaatccattcgtcatgttattagcc

SEQ ID NO: 5179 - DNA, 1660 bp, Zea Mays
tatctcttcttgactgctgcagtgctgctctctacttcacccgctcccacgcacgccccgccccaccccacgggacgcagcagaacacgacgaagccggtgccggtccatgcacacggttcccttcatgctttcatagaccgggtccatgtaaccggaccatctccattgatggacaaaagccggcaagcagcggggccacccacgatgcggtgcgcgtgcctcgtgccgtcgtgcgctccctgaggtcccgatccggcattccggcgtcgcgccgatggtatgccaaccttgctctcgaattttggcgaccccacattcccacggcgcttgaagaaatcctagccccgtgctgccgcgctgcagacggcacgcacggcatccatggagaacgacgcgaaggaggcgaggcaggggcagcacagggtgttcccgtgggggatgctcaaggtgttcctgctgctcggcttagggctgtccgcggccggcgtgctcatggcgcgtcacgggcacgaggtggcggcggccacgctgttccggccgtggctgggcgtctcccccaccgccgccgccgcggaggggctggagcactcgatgacggacgaggagctgctctggcgcgcgtcgttcgccccgggggtgcggcggtacccgttccggcgcgtgcccaaggtggccttcatgttcctcacgcgcggcccgctgccgctggcgccgctctgggagcgcttcttccgggggaacgaggggcgctactccatctacgtccacgcgctgccgtcgtaccgggccaactttacctccgaatccgtcttctatcgacgccaaatccccatgccaggattgcacatcgagctaaactgcactcttcgatagattccaaagcaacattagtgccaggagaagtatcaatgttgctgaatggggtcagatgaccatgtgcgatgctgagagacgtctacttgccaacgctttgctggatatatccaacgaatgagctttgtcatggctattgatgaccctggaccatatggacggggacggtatgactggaacatgacccctgaggttgatgtcacacaatggcgcaaaggatcgcagtggtttgaagtaaacagggaagttggcatcgaaattgtgaaggacacggtctattaccccaagttcaaggagttctgcaggcctagttgctactctgatgagcactatatccaaacaatgctctcaattgaaactccgcagagcctagctaacaggagtgtcacctgggtagactggtctagaattgctgcgcatccagcaaggtttggcagggttgacatcacggaggaattcttgagggaagttcgagagggacagacctgtctgtacaatgagaagaattcaacgttgtgcttcttgtttgctcggaagtttgctccaagcgcactggagccattgttagagttagcacccactgtccttggttttggataacgcatgtttttttagagatttgctggttgaatgtgacttgaatttaatcttacaatacataaagggggcttaggcttattaaggggatgtttggtttgaagaaccaatctattctaatgaattggtgtatcataagctcgttccacaaatttggtggaataaatccattcgtcatgttattagcc

SEQ ID NO: 5180 - DNA, 1489 bp, Zea Mays
ggcaacaaatatttgtctgtctctcggagctatttttggatgcttggggcgcgaccaaatttagattgtgttggttctagtctgcactcgcggagctggtgcggattctggtgaaagcaaaggatcgtttctgcaagactctgaagctggagaaaaggatgtctaccttagccactcctgcatccacgacgagatactacatcaacggcgacgagctgggaggaaggagtactctgtcatgccacaagtgtaccatgagtctcgggaggatgcggagcgtgtaagaggacgacacttgttgggcatgtcatcttggcgtgctccgcacgagaatgccaggaagccaatacgaatatacctcaattatgatgccgtcgggcattcgcccgaccgtgattgtaaaaatgttggcgacatcgtgaagcttggcgaacctcctgtatcatcagcaccaggaacacctatatgcgatcctcatggtgatccaccactggtgggagactgctggtacaattgcacccttgaggacatagctgggaaagacaagaggcaacgtctccgtaaggcactggggcaaacagtagagtggtttagaaaagctctagctgttgaacctgtcaaggggaacctacggctcagtgggtactcagcttgtggtcaggatggaggtgtacaactacctcatgcgtatgttgaagatggtgttgctaatgctgatttagtcctcttagtaacaactagaccaacaacaggtaacacccttgcatgggctgtggcctgtgaacgtgaccagtggggtcgggccattgcaggacatgttaatgtggcccctcgtcatttgacagctgaagctgaaacattactttcagctactctaatacacgaggttatgcatgttctagggtttgatcctcatgccttcacacattttcgtgatgaaaggaaaaggagacgtggtcaggttactgctcaaagtttggataaaaagcttggaagaatggttactcgtgttgtcctaccacgagttgtcatgcacgcgagacatcattatggagcattttcccaaaacttcactgggttagaattggaagacgggggaggccggggcacctcaggttcacattgggagaagaggctcttaatgaatgagatcatgactgggtcagtggatacgagatctgtggtttcaagaatgactttagcattactggaggacagtggatggtatcaagctaattacagcatggctgaacatttagattggggtcagaatcagggaacagagtttgttatatctccttgcaactcatggaaaggggcataccattgcaatacaactcaattatcaggatgcacatataatagggaggcagaaggttactgccctatagtaaactatagtggggacttgcccaagtgggctcaatattttccccaagccaataaaggtatgcccaaatgtagcataaattattatgtttatgacatt

SEQ ID NO: 5181 - DNA, 1299 bp, Zea Mays
tataacttgcgttcaagtaccattattgtgttggttctagtctgcactcgcggagctggtgcggattctggtgaaagcaaaggatcgtttctgcaagactctgaagctggagaaaaggatgtctaccttagccactcctgcatccacgacgagatactacatcaacggcgacgagctgggaggaaggagtactctgtcatgccacaagtgtaccatgagtctcgggaggatgcggagcgtgtaagaggacgacacttgttgggcatgtcatcttggcgtgctccgcacgagaatgccaggaagccaatacgaatatacctcaattatgatgccgtcgggcattcgcccgaccgtgattgtaaaaatgttggcgacatcgtgaagcttggcgaacctcctgtatcatcagcaccaggaacacctatatgcgatcctcatggtgatccaccactggtgggagactgctggtacaattgcacccttgaggacatagctgggaaagacaagaggcaacgtctccgtaaggcactggggcaaacagtagagtggtttagaaaagctctagctgttgaacctgtcaaggggaacctacggctcagtgggtactcagcttgtggtcaggatggaggtgtacaactacctcatgcgtatgttgaagatggtgttgctaatgctgatttagtcctcttagtaacaactagaccaacaacagggtttgatcctcatgccttcacacattttcgtgatgaaaggaaaaggagacgtggtcaggttactgctcaaagtttggataaaaagcttggaagaatggttactcgtgttgtcctaccacgagttgtcatgcacgcgagacatcattatggagcattttcccaaaacttcactgggttagaattggaagacgggggaggccggggcacctcaggttcacattgggagaagaggctcttaatgaatgagatcatgactgggtcagtggatacgagatctgtggtttcaagaatgactttagcattactggaggacagtggatggtatcaagctaattacagcatggctgaacatttagattggggtcagaatcagggaacagagtttgttatatctccttgcaactcatggaaaggggcataccattgcaatacaactcaattatcaggatgcacatataatagggaggcagaaggttactgccctatagtaaactatagtggggacttgcccaagtgggctcaatattttccccaagccaataaaggtatgcccaaatgtagcataaattattatgtttatgacatt

SEQ ID NO: 5182 - DNA, 1683 bp, Zea Mays
aagatttggatatacgcacaactacatccactagttgtggggtaataattaagaatttgttaatgagcaggtgcatggcctcaacactagtgcgaactgggtttgtacggggatctatgacccaaggaaatggctgttatcagcaccgctgcacgaacaactcactagaggttgctgttgatgggatctggaagtcatgtccacaatctggtgggcctgttcagtttccaggattcaacggggaattaatttgcccgatgtatcatgagttgtgtactactgtaccagttccaatgattggccaatgtccaaagtcatgcagttttaacggtgactgcattgatggaacctgtcactgctttcctggttttcatggccatgactgcagcagaagatcttgcccagacaagtgcagtaaccatggtacatgcaaagctaatgggatctgtgaatgtcaaagtggatggacagggattgactgctctacagcggtttgcgatgaacaatgtagtttacatggaggggtttgtgataatggtaaatgtgaattccgttgttcagattatgcaggctacacatgtcagaagggttctgcaatactgccaagtctgtcaatgtgtcatgatgtacttgttagagattcagatgggcagcattgtgcgccaagtgaactcagtatactacagcagcttgaaactgtagttctcgtgccaaattacaatagattgatgccaagtgggcggaccttccttaacttcttcaacaatgccaactgtgcagcagctgcaaagcggctagcctgctggatctcaattcaacggtgtgacgaggatggggacaacaggctcagggtatgctactctgcatgcgaattgtacaatacagcttgtggagcgggtctggattgttcagaccagaccctttttagcaaaagggaagaagaagagaagggtgttccgtgcacaggatatggcgagaagaagtctttctggctataacatctctgaagcttcttccgttatggctctggatacgggaagtaagcgtccgtttcacctaggcacccgaagatgggctgccctggtgtacaagctatgttggagtgggctctttgttagaaggttagtctgacatgaaaaggggagtggaccggtgagagttggatggtagatttttcgttttcaccgcttcagaattagtgattggaatgaatgtaaagattgatgtgtcttgtacacactctttacagaatcatttcaatgggagcccgtgttgtgttctttgctccacgcggccatgccccttgccccatttcttaagctgtcgttggcttttatgatatttgattgacgcatccttggccaacacagtggcagtggcttcgcttatgttcaactggaattcgttataacatagatgatgacgcttgtgggtgattacttcgcttagcggctgccgtggaactagatcctgtattgctgatccctgatggcttgatacgagtgttggagccgtcacatgacatttagcacaagtatgtcacaatataaacagcagtaacgaagtgtcaaggacagtagttatatgagcagctttcgttgttggaaaaagtatatattactgtgatggaatagtcattttggccgctcaactattgcctaaggcgcaaattagtccctgact

SEQ ID NO: 5183 - DNA, 1597 bp, Zea Mays
cgcacaactacatccactagttgtggggtaataattaagaatttgttaatgagcaggtgcatggcctcaacactagtgcgaactgggtttgtacggggatctatgacccaaggaaatggctgttatcagcaccgctgcacgaacaactcactagaggttgctgttgatgggatctggaagtcatgtccacaatctggtgggcctgttcagtttccaggattcaacggggaattaatttgcccgatgtatcatgagttgtgtactactgtaccagttccaatgattggccaatgtccaaagtcatgcagttttaacggtgactgcattgatggaacctgtcactgctttcctggttttcatggccatgactgcagcagaagatcttgcccagacaagtgcagtaaccatggtacatgcaaagctaatgggatctgtgaatgtcaaagtggatggacagggattgactgctctacagattatgcaggctacacatgtcagaagggttctgcaatactgccaagtctgtcaatgtgtcatgatgtacttgttagagattcagatgggcagcattgtgcgccaagtgaactcagtatactacagcagcttgaaactgtagttctcgtgccaaattacaatagattgatgccaagtgggcggaccttccttaacttcttcaacaatgccaactgtgcagcagctgcaaagcggctagcctgctggatctcaattcaacggtgtgacgaggatggggacaacaggctcagggtatgctactctgcatgcgaattgtacaatacagcttgtggagcgggtctggattgttcagaccagaccctttttagcaaaagggaagaagaagagaagggtgttccgtgcacaggatatggcgagaagaagtctttctggctataacatctctgaagcttcttccgttatggctctggatacgggaagtaagcgtccgtttcacctaggcacccgaagatgggctgccctggtgtacaagctatgttggagtgggctctttgttagaaggttagtctgacatgaaaaggggagtggaccggtgagagttggatggtagatttttcgttttcaccgcttcagaattagtgattggaatgaatgtaaagattgatgtgtcttgtacacactctttacagaatcatttcaatgggagcccgtgttgtgttctttgctccacgcggccatgccccttgccccatttcttaagctgtcgttggcttttatgatatttgattgacgcatccttggccaacacagtggcagtggcttcgcttatgttcaactggaattcgttataacatagatgatgacgcttgtgggtgattacttcgcttagcggctgccgtggaactagatcctgtattgctgatccctgatggcttgatacgagtgttggagccgtcacatgacatttagcacaagtatgtcacaatataaacagcagtaacgaagtgtcaaggacagtagttatatgagcagctttcgttgttggaaaaagtatatattactgtgatggaatagtcattttggccgctcaactattgcctaaggcgcaaattagtccctgact

SEQ ID NO: 5184 - DNA, 1680 bp, Zea Mays
gcacaactacatccactagttgtggggtaataattaagaatttgttaatgagcaggtgcatggcctcaacactagtgcgaactgggtttgtacggggatctatgacccaaggaaatggctgttatcagcaccgctgcacgaacaactcactagaggttgctgttgatgggatctggaagtcatgtccacaatctggtgggcctgttcagtttccaggattcaacggggaattaatttgcccgatgtatcatgagttgtgtactactgtaccagttccaatgattggccaatgtccaaagtcatgcagttttaacggtgactgcattgatggaacctgtcactgctttcctggttttcatggccatgactgcagcagaagatcttgcccagacaagtgcagtaaccatggtacatgcaaagctaatgggatctgtgaatgtcaaagtggatggacagggattgactgctctacagttgtcatgttggggcaatggatttgaaattgtgtggtgaaagaatcgtgttatcttcaatgtttgcgaactatatctttttcatattatgcaggctacacatgtcagaagggttctgcaatactgccaagtctgtcaatgtgtcatgatgtacttgttagagattcagatgggcagcattgtgcgccaagtgaactcagtatactacagcagcttgaaactgtagttctcgtgccaaattacaatagattgatgccaagtgggcggaccttccttaacttcttcaacaatgccaactgtgcagcagctgcaaagcggctagcctgctggatctcaattcaacggtgtgacgaggatggggacaacaggctcagggtatgctactctgcatgcgaattgtacaatacagcttgtggagcgggtctggattgttcagaccagaccctttttagcaaaagggaagaagaagagaagggtgttccgtgcacaggatatggcgagaagaagtctttctggctataacatctctgaagcttcttccgttatggctctggatacgggaagtaagcgtccgtttcacctaggcacccgaagatgggctgccctggtgtacaagctatgttggagtgggctctttgttagaaggttagtctgacatgaaaaggggagtggaccggtgagagttggatggtagatttttcgttttcaccgcttcagaattagtgattggaatgaatgtaaagattgatgtgtcttgtacacactctttacagaatcatttcaatgggagcccgtgttgtgttctttgctccacgcggccatgccccttgccccatttcttaagctgtcgttggcttttatgatatttgattgacgcatccttggccaacacagtggcagtggcttcgcttatgttcaactggaattcgttataacatagatgatgacgcttgtgggtgattacttcgcttagcggctgccgtggaactagatcctgtattgctgatccctgatggcttgatacgagtgttggagccgtcacatgacatttagcacaagtatgtcacaatataaacagcagtaacgaagtgtcaaggacagtagttatatgagcagctttcgttgttggaaaaagtatatattactgtgatggaatagtcattttggccgctcaactattgcctaaggcgcaaattagtccctgact

SEQ ID NO: 5185 - DNA, 1593 bp, Zea Mays
taataattaagaatttgttaatgagcaggtgcatggcctcaacactagtgcgaactgggtttgtacggggatctatgacccaaggaaatggctgttatcagcaccgctgcacgaacaactcactagaggttgctgttgatgggatctggaagtcatgtccacaatctggtgggcctgttcagtttccaggattcaacgttccaatgattggccaatgtccaaagtcatgcagttttaacggtgactgcattgatggaacctgtcactgctttcctggttttcatggccatgactgcagcagaagatcttgcccagacaagtgcagtaaccatggtacatgcaaagctaatgggatctgtgaatgtcaaagtggatggacagggattgactgctctacagcggtttgcgatgaacaatgtagtttacatggaggggtttgtgataatggtaaatgtgaattccgttgttcagattatgcaggctacacatgtcagaagggttctgcaatactgccaagtctgtcaatgtgtcatgatgtacttgttagagattcagatgggcagcattgtgcgccaagtgaactcagtatactacagcagcttgaaactgtagttctcgtgccaaattacaatagattgatgccaagtgggcggaccttccttaacttcttcaacaatgccaactgtgcagcagctgcaaagcggctagcctgctggatctcaattcaacggtgtgacgaggatggggacaacaggctcagggtatgctactctgcatgcgaattgtacaatacagcttgtggagcgggtctggattgttcagaccagaccctttttagcaaaagggaagaagaagagaagggtgttccgtgcacaggatatggcgagaagaagtctttctggctataacatctctgaagcttcttccgttatggctctggatacgggaagtaagcgtccgtttcacctaggcacccgaagatgggctgccctggtgtacaagctatgttggagtgggctctttgttagaaggttagtctgacatgaaaaggggagtggaccggtgagagttggatggtagatttttcgttttcaccgcttcagaattagtgattggaatgaatgtaaagattgatgtgtcttgtacacactctttacagaatcatttcaatgggagcccgtgttgtgttctttgctccacgcggccatgccccttgccccatttcttaagctgtcgttggcttttatgatatttgattgacgcatccttggccaacacagtggcagtggcttcgcttatgttcaactggaattcgttataacatagatgatgacgcttgtgggtgattacttcgcttagcggctgccgtggaactagatcctgtattgctgatccctgatggcttgatacgagtgttggagccgtcacatgacatttagcacaagtatgtcacaatataaacagcagtaacgaagtgtcaaggacagtagttatatgagcagctttcgttgttggaaaaagtatatattactgtgatggaatagtcattttggccgctcaactattgcctaaggcgcaaattagtccctgact

SEQ ID NO: 5186 - DNA, 1542 bp, Zea Mays
taatgagcaggtgcatggcctcaacactagtgcgaactgggtttgtacggggatctatgacccaaggaaatggctgttatcagcaccgctgcacgaacaactcactagaggttgctgttgatgggatctggaagtcatgtccacaatctggtgggcctgttcagtttccaggattcaacggggaattaatttgcccgatgtatcatgagttgtgtactactgtaccagttccaatgattggccaatgtccaaagtcatgcagttttaacggtgactgcattgatggaacctgtcactgctttcctggttttcatggccatgactgcagcagaagatcttgcccagacaagtgcagtaaccatggtacatgcaaagctaatgggatctgtgaatgtcaaagtggatggacagggattgactgctctacaggctacacatgtcagaagggttctgcaatactgccaagtctgtcaatgtgtcatgatgtacttgttagagattcagatgggcagcattgtgcgccaagtgaactcagtatactacagcagcttgaaactgtagttctcgtgccaaattacaatagattgatgccaagtgggcggaccttccttaacttcttcaacaatgccaactgtgcagcagctgcaaagcggctagcctgctggatctcaattcaacggtgtgacgaggatggggacaacaggctcagggtatgctactctgcatgcgaattgtacaatacagcttgtggagcgggtctggattgttcagaccagaccctttttagcaaaagggaagaagaagagaagggtgttccgtgcacaggatatggcgagaagaagtctttctggctataacatctctgaagcttcttccgttatggctctggatacgggaagtaagcgtccgtttcacctaggcacccgaagatgggctgccctggtgtacaagctatgttggagtgggctctttgttagaaggttagtctgacatgaaaaggggagtggaccggtgagagttggatggtagatttttcgttttcaccgcttcagaattagtgattggaatgaatgtaaagattgatgtgtcttgtacacactctttacagaatcatttcaatgggagcccgtgttgtgttctttgctccacgcggccatgccccttgccccatttcttaagctgtcgttggcttttatgatatttgattgacgcatccttggccaacacagtggcagtggcttcgcttatgttcaactggaattcgttataacatagatgatgacgcttgtgggtgattacttcgcttagcggctgccgtggaactagatcctgtattgctgatccctgatggcttgatacgagtgttggagccgtcacatgacatttagcacaagtatgtcacaatataaacagcagtaacgaagtgtcaaggacagtagttatatgagcagctttcgttgttggaaaaagtatatattactgtgatggaatagtcattttggccgctcaactattgcctaaggcgcaaattagtccctgact

SEQ ID NO: 5187 - DNA, 1778 bp, Zea Mays
atgtttgattggaaatatagctcctcttgcagcttctcctacgatgtagcgtcgatgaggagaaaaacatgggagagaagccggtagaagctccattttctggctcctggctcctgctggttttttggagttcctcgctcttttctaggaagagcccatcaaagagcctcccctttggttgctgttgatgggatctggaagtcatgtccacaatctggtgggcctgttcagtttccaggattcaacggggaattaatttgcccgatgtatcatgagttgtgtactactgtaccagttccaatgattggccaatgtccaaagtcatgcagttttaacggtgactgcattgatggaacctgtcactgctttcctggttttcatggccatgactgcagcagaagatcttgcccagacaagtgcagtaaccatggtacatgcaaagctaatgggatctgtgaatgtcaaagtggatggacagggattgactgctctacagcggtttgcgatgaacaatgtagtttacatggaggggtttgtgataatggtaaatgtgaattccgttgttcagattatgcaggctacacatgtcagaagggttctgcaatactgccaagtctgtcaatgtgtcatgatgtacttgttagagattcagatgggcagcattgtgcgccaagtgaactcagtatactacagcagcttgaaactgtagttctcgtgccaaattacaatagattgatgccaagtgggcggaccttccttaacttcttcaacaatgccaactgtgcagcagctgcaaagcggctagcctgctggatctcaattcaacggtgtgacgaggatggggacaacaggctcagggtatgctactctgcatgcgaattgtacaatacagcttgtggagcgggtctggattgttcagaccagaccctttttagcaaaagggaagaagaagagaagggtgttccgtgcacaggatatggcgagaagaagtctttctggctataacatctctgaagcttcttccgttatggctctggtagaagctcagcgtttgtgtaaagtattttccaccccaaattattttctcttttttccccatttcatccactacttcccaattgtaggatacgggaagtaagcgtccgtttcacctaggcacccgaagatgggctgccctggtgtacaagctatgttggagtgggctctttgttagaaggttagtctgacatgaaaaggggagtggaccggtgagagttggatggtagatttttcgttttcaccgcttcagaattagtgattggaatgaatgtaaagattgatgtgtcttgtacacactctttacagaatcatttcaatgggagcccgtgttgtgttctttgctccacgcggccatgccccttgccccatttcttaagctgtcgttggcttttatgatatttgattgacgcatccttggccaacacagtggcagtggcttcgcttatgttcaactggaattcgttataacatagatgatgacgcttgtgggtgattacttcgcttagcggctgccgtggaactagatcctgtattgctgatccctgatggcttgatacgagtgttggagccgtcacatgacatttagcacaagtatgtcacaatataaacagcagtaacgaagtgtcaaggacagtagttatatgagcagctttcgttgttggaaaaagtatatattactgtgatggaatagtcattttggccgctcaactattgcctaaggcgcaaattagtccctgact

SEQ ID NO: 5188 - DNA, 1549 bp, Zea Mays
aacttttcgcagcacttgtggttgccgattcggccgccacaaacttgagacccgccacacttctctagggcgccagcgccggccctagcacctccactgcaactcccttgatacttggaccaccggatctgatgctggctgtcgactgccattagaaggacttgttgcaagctgagggcaccaggagacccttgtttgctactgctcaagttcacaggatgcgttgaggattggaccaaggaaatgaggatgcaacacctcaaaagaagtcataaaaagatgcatagaattccaagactcaagaacaaaagaagcccaaagaaatcagcgaagaaacctgagaagagggctgtcagccagcgcctggtgacgcaccggacagtgcacagtacctgtgtggtgtgcaccggacagacggcaacggtcggatccaacggtcgactgctacagctgccaacgatcggctgacgtggcgtgcaccggacactccacagtagttgtcgggtggtgcaccggactgtccggtgcacccgacgacagaaagttgctgctttctgtccaacggctagtttggggtgtggaggctataaataccaccccaaccgaccattctctagtgtgggagcccaagcaacataccaagacacatagtgcatatttccaagagctcaaacacccaagtgcttaatagaatcactcggtgattagtgtaggtgctttgcgaagtgcttaggctagttagaccgctctagcgcttgctctaggtgaaccctagattgttgagtgagtttagacaaacctcacaacccctcggctcttgcgtgagccgtagtaattgtaccgagtggggcgagagtcttgcgagaccgtgacaaccgcgtttgtgtcacagccgccaccgtgtatcggagggaacgaggcccgcggcgtttcggccggaagctcgatagtggagacggcggggagcgtccgagaggagccggaagcggagcaccacttgcgcgtggagaaggcccgtggctctctacggagttactcgaccgaggtgcttggccctcgcgtgggcttccctttgcgtaggggcaccaacgaggattagttgggaccttgcgcggttccggatacctcggtaaaaataccggcgtcatccacgagagtttgcttctctactttgctctttaagtttccgcatttatattaagcatttaagtttcaatcttgtatacatacttatttagtgtagattgaaacttagccattgcggtagagatagcaacacttagacaaaacctagtttgcacattctagtttgattatttgcataggttttgctctagggatttaattgtggcctagtttagtaaaagttttagaagtcctaattcacccccctcttaggcgtcacccgtttcctacagagtgtacattttaattaccttgcattttttagatgggttcaaagaagatgtatcttgagtattgcaataactataatcaatacctacgaaggagaagggtgcttgttttcattaccatccgcattgtttca

SEQ ID NO: 5189 - DNA, 1222 bp, Zea Mays
tagaggacagaatcttttagagtgttctgtaaaggacaaagaatattcctttaggggacgaaatttaggggacgctgctggagacagtcttacacggtagcagctgtcacacaccggtgtaagcgccgccggcggcaggaacaccccgatctcgacgatagatcgagaaagcgatggcgctgaccaacttcatcgtgacggtggccgttgtcggcgcgggtgtgctcctcttcaccaccgacatgcgcaggtccggcgccctcttccgccgcaatgcgcgccagctccagcagtggctccaggaggacacggcctccgccgcgtccaagtccacgaaagaagcagctccgaagaaacttgactcaactgtctccaaggagaggccaaaggaaggcagtcactgattcgagttgtttatatgattgctcttgcaccacccactggtttctctgcgccctgttgaatcggaagcggtcaattataaagcagaccttgaatgaagcgaagcgtgcctttgaatgcaacctgtcgcgaagtgctgctctacaaccccatagcgagtgaaagcttggagcttgttagtagaaccgaaccgttgagcgatttgcattgctgtttacagaaatatcatggaggaagctgcatgcctgtttggacatttggtggccagagcgtgtacggggggcagtactacccagagtggcaaggtcccgtgtggcactgaacgcctgcccgactggttgttttgagcaggagacgaaatcgtcggcattctggtagagggggcgccacctgcgacaggtgccgggtggatcggctggactggtccgcggattgctggagaggtgagcagcgactgtactgtactgtactgtacccgagggctgggctttcggtggttgcaacttgcgagccggcggtgttgatggctgctgctcctccaatccaatggtgtgcgagagggacatggaatcgcctggggtttgcattggcaactttcaacgtggcgactgcgcgcctgacaagttggttgttggttcggttaggtttgcaatcatcgtgcgatcgcggccctcgcaaaatcatcacgcgtccgggggcgaggacgaacgagcggagatggatatggatggttagcacagcaaatctgaggagatcatgtcttgtcgttcggagccgggcaagcacttggctgattgatctgcatcgcggaaatggaaag

SEQ ID NO: 5190 - DNA, 271 bp, Zea Mays
cttacacggtagcagctgtcacacaccggtgtaagcgccgccggcggcaggaacaccccgatctcgacgatagatcgagaaagcgatggcgctgaccaacttcatcgtgacggtggccgttgtcggcgcgggtgtgctcctcttcaccaccgacatgcgcaggtccggcgccctcttccgccgcaatgcgcgccagctccagcagtggctccaggaggacacggcctccgccgcgtccaagtaatcatgcgaaagtggtggatcattggag

SEQ ID NO: 5191 - DNA, 404 bp, Zea Mays
gcggatcatcagactattcttgcgcaccgctcgtcgtgctcggcgaggtcggaggaagcatggcagccgactgctcgacgctccggtgcatccagggcggctacatcacctgcgacaactacccggggaagcagctggacgggtgcgactgcgtctgcgcgcccgacaacggccggaactgcgttctccacctccagtccggctccacctacaactgcagccgcagcaacaagggatagctagctagtcgatctcgaccagtcttcgacaataataatgcttcaagctgtacgctgtcgaatagtaacagttgtgctgaaacgaccgggtgatgcgcaaataatttgcaataaaactatttctctgttgtgttttaaagacactttagccttaactactcttct

SEQ ID NO: 5192 - DNA, 2988 bp, Zea Mays
tcaaaaccctaacaagctgtgagccgactctctcgagcgccttgcactaacactctgcgccgcctgcggcctgcccccaggccctaactcacgcaccatcgcgaagtcctcgacctcaagctcactaccttctagaatacgaggatcaccagcgccgccgcatcgggccgctggcccatggacaagctccgcgtccaccgctgtaccggcgacgcggtcgagtggtccccctcccctatcgtcgcgctcgccgcctctccttgcgcctctcagactatacaggggaacgacgagtcgagggtcacatcactggtgtgggggcggagaggaggtgaagcgaccggccggctgctctcgtccagcgttgatgggtcggtttgtgaatgggatctattctacctgcagcaaaagattgttctagatactgttggaattccaatctggcaaatggcaattgagccttcagttgatgctaaaaatactgaaaataatagctcagagtttgctgtcaatggccatccaaaccaaaatgactccagcgattctgacttaagtaacattgatgatggtgataactctgaggatgaagatggttctaccaacacaatatcttcatatcatgtgaatgatttccagcgactggctcttgcgtgtgatgatggttctgtacgattgtataatgtgcctgaatcaggtgcattgacttactataggtctcttccaagagtgagcgggcggactctaagtgtggcgtggagtagtaacgccaaatttgtattttctggcagcagcgatggtttaatcagatgctgggattcaacatctttccatgaaatgtatcgtatcactgttggattgggaggggctagtaactcacctgaactttgtgtctggtcactattgtttctgaggtgtggaactattgttagtggagatagtaccgggagtgtacagttttgggatagccgccatggaacacttctgcaagctcactcttatcataaaggcgatgtgaatgcactaacaactgtgcctagtgggaacagggtattttccgcagggtctgatgggcaggtaattttgtacaaaatatcaaaagatgaattcggtgctagtaaaaatgtgatcaaagagcaagttcagaaatgggtctatgtgggatatctcagagctcacactcatgatataagggcattaaccatggctgtgcctatctgtagagaagatgcattacctgaggaaaaggtggtgaagattcgccggcgtgaaaaacatgaattcagctaccacagatgggctcatcttggggttccgatgcttatatctggtggtgatgacgccaagctgtttgcatattcagcaagagagtttactcagttctcacctcataacttctgccctgcacctcaacaccctttgataaagctggctaggaatagcacagtcaatggagattatgtaatgcttgtccagtcttcgaacttcttggatgttttacttgtgacagttcagaacaagctgacgactccaagtacatcatcatctagaggagatgctacagtccgacaacttgttcgtttgaaaagcaaggggtccagaaaaataatttctagtgctgcctgtgccaatggaacacttttggcctattcagatggtgtgagaccctgcctctttgcactaagacataagggtggaaagaagtacacccttgacaaattagagctgccaaaaggattgccctgttctcagagtatgctgtttactgtggactcgtccaatttgatacttgctgggcgtaatggaaaaatatacatcattgacattgcaacaagagaaatttcaaatgtatttcaccctacaagaagggcagatggagcaaaaatctcaagagaaccacctgtaacgaagatgttcctaagtgcagacgggcaatggctagctgcggttaactgctatggggatatttatgtatttaaccttgaggtgcaaagacaacactggttcatatcccgaatgaatggtggttctgttacatctggtggtttttgccctaagaacaacacacttatcataactacatctaaaaacgaggtgtatgtatttgatgtggaaacaaaacaactaggtgaatggtccaagcgatatacgcaccagttgcccagaagtttccaggaatttcctggagaggtcattggcctatcattttctccgcaaagctcgtcatcggttattgtatacagtaccagggctatgtgctacattgattttggattgccagtagttgaggatgttgacttgccaaatggatcagctggagctgcagagaagtcggacacaaaaaaaattaaaaaagcaaggcagaaacgtaaggcccatgatgaagagtctaaacaagagaaaaggaataacttaagtttttttgcgtttaaagaaccagtgctctttgttgggcacctactggacagttcaattttaatagtagagaagcgatggatggatgtagttgaaggttttggcgcaccggttcacagacatatatatggcacatgattctttctaacatcaaactttggcgcccgtgacaagcagaccattatttttgtttttgcattcggcctcgagtatgttaccggttgaaagggctccaagttttgcagtacaaagtggcagctgcatctaatctttagaattggggactctggcaattgtgtagtgttattttgttctcgagtaatgcagtttttcataccttgtcactgcgcaaaattgtcagatgtaaaaactgtataactatgttattgttagtttatatctgctgttcgtctcaagtagcatgttgtctgtataaaggccccattgacggccgaactgttgtgtcgcactatgtgataaattagttatttatagcgtgtttggtttgagaaatgagataatccatcttctcactttcttgtttggtttgtggaatggaatgaatttatgatgcat

SEQ ID NO: 5193 - DNA, 3065 bp, Zea Mays
tcaaaaccctaacaagctgtgagccgactctctcgagcgccttgcactaacactctgcgccgcctgcggcctgcccccaggccctaactcacgcaccatcgcgaagtcctcgacctcaagctcactaccttctagaatacgaggatcaccagcgccgccgcatcgggccgctggcccatggacaagctccgcgtccaccgctgtaccggcgacgcggtcgagtggtccccctcccctatcgtcgcgctcgccgcctctccttgcgcctctcaggtcgccgccgcgcgtgaagacggctcactcgagctctggctcgtctccccgggctccgtcggctggcacaaccagctcactatacaggggaacgacgagtcgagggtcacatcactggtgtgggggcggagaggaggtgaagcgaccggccggctgctctcgtccagcgttgatgggtcggtttgtgaatgggatctattctacctgcagcaaaagattgttctagatactgttggaattccaatctggcaaatggcaattgagccttcagttgatgctaaaaatactgaaaataatagctcagagtttgctgtcaatggccatccaaaccaaaatgactccagcgattctgacttaagtaacattgatgatggtgataactctgaggatgaagatggttctaccaacacaatatcttcatatcatgtgaatgatttccagcgactggctcttgcgtgtgatgatggttctgtacgattgtataatgtgcctgaatcaggtgcattgacttactataggtctcttccaagagtgagcgggcggactctaagtgtggcgtggagtagtaacgccaaatttgtattttctggcagcagcgatggttaatcagatgctgggattcaacatctttccatgaaatgtatcgtatcactgttggattgggaggggctagtaactcacctgaactttgtgtctggtcactattgtttctgaggtgtggaactattgttagtggagatagtaccgggagtgtacagttttgggatagccgccatggaacacttctgcaagctcactcttatcataaaggcgatgtgaatgcactaacaactgtgcctagtgggaacagggtattttccgcagggtctgatgggcaggtaattttgtacaaaatatcaaaagatgaattcggtgctagtaaaaatgtgatcaaagagcaagttcagaaatgggtctatgtgggatatctcagagctcacactcatgatataagggcattaaccatggctgtgcctatctgtagagaagatgcattacctgaggaaaaggtggtgaagattcgccggcgtgaaaaacatgaattcagctaccacagatgggctcatcttggggttccgatgcttatatctggtggtgatgacgccaagctgtttgcatattcagcaagagagtttactcagttctcacctcataacttctgccctgcacctcaacaccctttgataaagctggctaggaatagcacagtcaatggagattatgtaatgcttgtccagtcttcgaacttcttggatgttttacttgtgacagttcagaacaagctgacgactccaagtacatcatcatctagaggagatgctacagtccgacaacttgttcgtttgaaaagcaaggggtccagaaaaataatttctagtgctgcctgtgccaatggaacacttttggcctattcagatggtgtgagaccctgcctctttgcactaagacataagggtggaaagaagtacacccttgacaaattagagctgccaaaaggattgccctgttctcagagtatgctgtttactgtggactcgtccaatttgatacttgctgggcgtaatggaaaaatatacatcattgacattgcaacaagagaaatttcaaatgtatttcaccctacaagaagggcagatggagcaaaaatctcaagagaaccacctgtaacgaagatgttcctaagtgcagacgggcaatggctagctgcggttaactgctatggggatatttatgtatttaaccttgaggtgcaaagacaacactggttcatatcccgaatgaatggtggttctgttacatctggtggtttttgccctaagaacaacacacttatcataactacatctaaaaacgaggtgtatgtatttgatgtggaaacaaaacaactaggtgaatggtccaagcgatatacgcaccagttgcccagaagtttccaggaatttcctggagaggtcattggcctatcattttctccgcaaagctcgtcatcggttattgtatacagtaccagggctatgtgctacattgattttggattgccagtagttgaggatgttgacttgccaaatggatcagctggagctgcagagaagtcggacacaaaaaaaattaaaaaagcaaggcagaaacgtaaggcccatgatgaagagtctaaacaagagaaaaggaataacttaagtttttttgcgtttaaagaaccagtgctctttgttgggcacctactggacagttcaattttaatagtagagaagcgatggatggatgtagttgaaggttttggcgcaccggttcacagacatatatatggcacatgattctttctaacatcaaactttggcgcccgtgacaagcagaccattatttttgtttttgcattcggcctcgagtatgttaccggttgaaagggctccaagttttgcagtacaaagtggcagctgcatctaatctttagaattggggactctggcaattgtgtagtgttattttgttctcgagtaatgcagtttttcataccttgtcactgcgcaaaattgtcagatgtaaaaactgtataactatgttattgttagtttatatctgctgttcgtctcaagtagcatgttgtctgtataaaggccccattgacggccgaactgttgtgtcgcactatgtgataaattagttatttatagcgtgtttggtttgagaaatgagataatccatcttctcactttcttgtttggtttgtggaatggaatgaatttatgatgcat

SEQ ID NO: 5194 - DNA, 2652 bp, Zea Mays
cgattttctcgtggaatcgtcaattccgaactgtcagatgctgggatatgcataaaactgattgttctagatactgttggaattccaatctggcaaatggcaattgagccttcagttgatgctaaaaatactgaaaataatagctcagagtttgctgtcaatggccatccaaaccaaaatgactccagcgattctgacttaagtaacattgatgatggtgataactctgaggatgaagatggttctaccaacacaatatcttcatatcatgtgaatgatttccagcgactggctcttgcgtgtgatgatggttctgtacgattgtataatgtgcctgaatcaggtgcattgacttactataggtctcttccaagagtgagcggtatgtgttatataaattcttttttctgttattttgacaataaattcaacacagacagttacgtttgtgtgttctcacagggcggactctaagtgtggcgtggagtagtaacgccaaatttgtattttctggcagcagcgatggtttaatcagatgctgggattcaacatctttccatgaaatgtatcgtatcactgttggattgggaggggctagtaactcacctgaactttgtgtctggtcactattgtttctgaggtgtggaactattgttagtggagatagtaccgggagtgtacagttttgggatagccgccatggaacacttctgcaagctcactcttatcataaaggcgatgtgaatgcactaacaactgtgcctagtgggaacagggtattttccgcagggtctgatgggcaggtaattttgtacaaaatatcaaaagatgaattcggtgctagtaaaaatgtgatcaaagagcaagttcagaaatgggtctatgtgggatatctcagagctcacactcatgatataagggcattaaccatggctgtgcctatctgtagagaagatgcattacctgaggaaaaggtggtgaagattcgccggcgtgaaaaacatgaattcagctaccacagatgggctcatcttggggttccgatgcttatatctggtggtgatgacgccaagctgtttgcatattcagcaagagagtttactcagttctcacctcataacttctgccctgcacctcaacaccctttgataaagctggctaggaatagcacagtcaatggagattatgtaatgcttgtccagtcttcgaacttcttggatgttttacttgtgacagttcagaacaagctgacgactccaagtacatcatcatctagaggagatgctacagtccgacaacttgttcgtttgaaaagcaaggggtccagaaaaataatttctagtgctgcctgtgccaatggaacacttttggcctattcagatggtgtgagaccctgcctctttgcactaagacataagggtggaaagaagtacacccttgacaaattagagctgccaaaaggattgccctgttctcagagtatgctgtttactgtggactcgtccaatttgatacttgctgggcgtaatggaaaaatatacatcattgacattgcaacaagagaaatttcaaatgtatttcaccctacaagaagggcagatggagcaaaaatctcaagagaaccacctgtaacgaagatgttcctaagtgcagacgggcaatggctagctgcggttaactgctatggggatatttatgtatttaaccttgaggtgcaaagacaacactggttcatatcccgaatgaatggtggttctgttacatctggtggtttttgccctaagaacaacacacttatcataactacatctaaaaacgaggtgtatgtatttgatgtggaaacaaaacaactaggtgaatggtccaagcgatatacgcaccagttgcccagaagtttccaggaatttcctggagaggtcattggcctatcattttctccgcaaagctcgtcatcggttattgtatacagtaccagctggagctgcagagaagtcggacacaaaaaaaattaaaaaagcaaggcagaaacgtaaggcccatgatgaagagtctaaacaagagaaaaggaataacttaagtttttttgcgtttaaagaaccagtgctctttgttgggcacctactggacagttcaattttaatagtagagaagcgatggatggatgtagttgaaggttttggcgcaccggttcacagacatatatatggcacatgattctttctaacatcaaactttggcgcccgtgacaagcagaccattatttttgtttttgcattcggcctcgagtatgttaccggttgaaagggctccaagttttgcagtacaaagtggcagctgcatctaatctttagaattggggactctggcaattgtgtagtgttattttgttctcgagtaatgcagtttttcataccttgtcactgcgcaaaattgtcagatgtaaaaactgtataactatgttattgttagtttatatctgctgttcgtctcaagtagcatgttgtctgtataaaggccccattgacggccgaactgttgtgtcgcactatgtgataaattagttatttatagcgtgtttggtttgagaaatgagataatccatcttctcactttcttgtttggtttgtggaatggaatgaatttatgatgcat

SEQ ID NO: 5195 - DNA, 1498 bp, Zea Mays
gagaatcagaacatgccatttttgcaatttacgtcctgattcagatctcatcacacaattcacataaatttgtctcacaacagaattcacataaatttgtctcacaccagaattcacaccattaatcacagatttagcacttacaatttgagtttatcacaagaaaaagcaagacaataaacatcatagaagcataaaaagctataaacatgttcttcaactcgaccatgctggcattcatcttcttcaactcgaccatattatcattcaccttcttcattttggcagcaaatttgttccagttcgtagtcacatcttccgcttgttcatcccatattttagacagcatcatctctctcaaaccaccaccaactctgccccttcaatcatcttgacataatcatccatccacatgaaaaaattgcatattttaagaaccttatcttgttgcggcttgctttcacacttcatgaactctcgaccaaaattgtcgttctcccaccttttcgatctgagtcaaacaagcgactccggcctttcacatttggggcagcggatgagcgacaccggaccatacctaggccatccttgtcctccatcggaggagccgctcgcccgcgacatgcgtgaatccatgctactaaacacaaacacagttaattattgggttttctctctatcataactactagacaagcaggatgggtatcgacggcggctactacctcgacgtggagagtgtaactcacctgcaagcagtcttgggcgaaggaggatgttgagtgcatggtgtgaaatcgacaacggctgcccccaaatctagggtcgcatcgaccgacgtggggaagctgcaacaacaacgagctacgatcagacgatggggagaatgagcttagtgtcggcagcctgcaagatacctcctcctgctcgtctggctcgacgacaatggtgagtgcgagcttggcggcaggagggagcgtcgagcagatctgtggcacaacgactactgtggaggcaagcctgctctccgatctgcgcaggctactctccgatctgcggtgggggcgcactgaggcggtgaggaggagttgacgacgaggagcgtgccctggcggcgacgcgacgcggtagagcggcctgccagtgaggaactgatggcggggccgaggcttcctagtgccgaggagatggtgtcgagatggcctagagacagggcggccgaccgacgagtagttggcggcgggaggcttggacctggcggcggctgagcggattggagctggcggcggcgagggctgagggatggggctcgattgggaaagatggggctcagggatggggctcgattgggacccacgttcaggtgttgaaagacgtgggaccgtgctgttagggacgtcaacaaaagtggaaacgatgtgcgggcgtgtttctgagcggaggaaaggattcgtgggcaaaaccgaggaggaataaaaactaaggttagtaatgagtg

SEQ ID NO: 5196 - DNA, 1499 bp, Zea Mays
cgcttggctttcgaggcacgcggatgccagatttccccggatggggcgtgtgcggctgccggggccgcatcgtgtgcacgccaaattctcccgtcctcgacaccagctagcgaggctacgcagcagctgatgataccttatcccccgctggcactctggcagctagctattacccccctgctgcgccgcgcagccttctggtctacccccgttggctgcttcttctacctaccctcgccgtcgcctcaacttcccggccgccgtcccctccgatcaccagctgctgcttgtgctgctgagccaagctagcgatgaacatcttgaacctgcagcccatcaacccaggcgggcacccggcgttcccggcggccaaggagagcgggcacctcacgccggcgtcggtgcgcttcgacggcgtgccggtgccggcgcagtcccacgcgcactgtccgaggtggcaggctcagacgctgcgccgggacagcagctacgtcggcgtggagcacgaagggaccaggaccaccgcgtccgtcccggtcccggtcccggtcccagccgttgccccggtgcctgccccgttcaagccgctcacgctcgacttcctgcggtcgctcatggacaggagctgcagcatgagccccgccgtcgcggagtacggcgaggacagcgccccgccgccgccgcagatggtggcgctccgcgtggtggtggcctccgccgtggagctggacgcgcgccagaccgagctcatcgcgcgcaagatgcgccgcctcaccgggttcgtcaacctcaaggtcgacaacgtcgtggacgcgtccctcctcgccggcttcgtcgtccgctacggcaccgacgactcgcacgtcatcgacctcagcgtcaagggccagctcgccgcgctccagaaccgcgtcgactccatcgaccaccagaccgcccacgtccacggacacccgcaccactgatcatccgatccaacacctctggactctggtgcacatgcaccggaaccggactacaccggagcgaagcgcgccattgccaaaccgtgctacagcttgcagtatacaagagcctatctccatgactgtgattacgagactatatacagaaccgaattgaacgccatggcaacaacagttttcctgtctaatgttgttgtaaatcgcgactgctacctatccttcctgctgagcctatatatgtttctattgctaaaaaaacgaacgttattgtataatatgatcgatgtggagacatcatcctctatggcgtaaagtgcaatatactatctcaagggccaaggccgaggtttgtatatggaggaggattcaggggttgcagcactgcaatggactctatgaccatgagaaagatggctaaatgagactgtatcactctgcaccgatcagattagagacgcaaacacatcaggattattaattcgatgtttctctaattatcgaagaacatcagagcaagataaagcatcatcatga

SEQ ID NO: 5197 - DNA, 4101 bp, Zea Mays
ttctagagattcgtatgtatttagtgttttgactggacattccagctaactaactttcgtctcacaggttaacatgtgtatatgcttcttgcaaagtggaagaaaaccatgtttctgctgaggaacttggtaaaggaattcagcaggaccaccagatcattctaaataatgagatgattcttcttaaagatttctgcagggcaggtaatggtccattccagcgtttgaaggagttgcgccaggctgctatatcccatgttgacaaaatgatgttgactgatgcacctcttctctatacccctgggcagttggcactggcggctcttcacaagtctaatgatcttctcagggtcgtcgattttgaaagatacttggaaattatcttctcaaggcaacattctgattgtccaatcgaacagtttgttcagtcgatcaacgaaatcaattacttagtcgaccagcttaatatacctactgtcaaagacatgagacacgtggaccgcaagctgaaacattgctgggatccaagctcacatgacgagcataacaagaagaaagaaaagaagtcaaagcacaaatcgaaaagaacatctaccgatgcccaactataggaagcatatggtccagcagtggctttgtgtaagagtacaacggcatctaagcacagcagctctaagacagctttctacaccagctgaggcatacctgaggtcaagcaattttgtgacgatgtgggctatggaacttcattgctccaatgggagagttgcagcaaagatacaaactaagagatgtaacattggatgcctatctccaaagtacggagaacttcaaattttatatggccgactttgtgtcagccacaattacttgagttccttttgttacggatgtagcattgtttattaagtttaaacgccgaatccaagatgatccacctgctgttgtgaatcgttttttaactgatcagtgattttgaatctggattgtgtatatgtgtagagcttatcatggcaccagattgttgaataatttctgttatttctattggttctgttttccagtgaccggaagtccaactctaattcagacatcggtgacgcgctaacttgtgtgttggcccttctcagttcagtcagacaaatttccctgtgttcagtcagggtaaaaacgctagaccttttggtagaagtcgacatatagaatggtaaaaagttaacagcacgaatgcccgaaagctcaaaaatgcgcacttgttcagcggagaaaacatggtgcgtgcaagcgccacagctcaactgttcagttgtcttcatttcctcgtcagcgatagcaaggtagaaacgatccctgacggccttgccagcagaatagtagtgtaaaggccggagagagcgtatgtacaaacttcctccacttgttggcaccatgtttacagatctcaatgtgagatcaggagttcaggactgcagtgctggttattttgccacaaacttcagtttggcgttcgactgcttcagcttcactgtgaggtacctatgccgagcaaatatcaccgccactgccgttcgccggatcagcctgctgctgttcagacatcagcaccgcagcttcttggagagctgcgtgtaactcgttgtgcatatttgacttctccaaggtaaaactagcgccgttcatacatggactagatcgtttccttgtcttctcttcaagtatttctttaactgcctgcacccagtcgaaaacttgaactaagaaaaaagatcattgattccataggaacaaaacattaaaagcacaccagataacaagccaacgatgttgaggtatacccctaacaaaatgaaattctatatgcaagtacaatgctcaactgtcgagcagcaaaggatatgaaactatttattctgacaaaaaatcaagatttttacccctggaaactggatcaaaaatgaaaaactgttaacctcggaaactggtaacagattctaaggctactacattggccgccctaaaatgatcttgaggggggtcctgaatgtggcaaaaaaaattgtgagtatgccaattaataactgtatcagcggttctcagaaaaaagagggatggcaatatcgtggatgttagaatatgttcttcgaaccaacctagtcacaaagcaaccatctacatagattgaatgagaagtgataggtcaagatattatgctgatgctagccacaaaacatattttgcaggcacacaccgtaagtagaaggatcatactagagtggaaacttcaccagagacacatatactcattgttctcatttttagcctttagggtttattaactggttgatttctaactaataccccatagttccacccaaggctctttttttttttgcccaccagcctgcccttttatggctgctaaatttccttcagtctcaaagacaccctaataaatggttgccagatggttgagcccttgataatatcgtcggaagtcaacattttgaaaagatcacatctattcagggcctgtttggatacaagagctaatcattggctagctaaaaattaacttaaattagctctagtgcattcaaacaagagggctaataggtgggctaattgtttagacacattttcaactagttgttggccaaattaagatgacatatcatgtgcgatcacatattgggtgcgaacgtgcaatcaaatcatccagaatctagatcaatgatgtatattgttttttatatccaccctcctatatttagcaaatatatagggcatgaagaaaatagataaagggtgatgtgggggtatagaaatacaaaaaacgacaaacatagttggatctagatcgaacgctctggatggtttcattgtacgtttacaccaaatgagtgatgtttacaccaaatgagtgtgattgcataggagtatagtacatgttctcaccactagctagctaaccttggctaatttgagataatttttagtccaactagtacaaatatgtcctcaaattcccaacagcagaatactactccagcataggtcaatcatttggaaattgcctgcaacatcttgggatggaaggtgggcacgccgacctgcgatacagcagcggcgccaaagaagttccccagcagcgcggcgtccgtcgccgacaacccccacagcaatccggctgcaaagcccgcgagaaaactgtctccggcgccagtagggtccacctgtacggcggggaacggcgcaacgtgcgcctccccaccgtcccagtacagccggcagccgtccctcccctccgtgacgatcacacagcactgccgcctcgtcgtttccaccccaacgtatggcgcctcctccgacgacgccttaacgaacgccactcggggcagaagccgcgcgtacggggtatcgccaagcgccacgtgaccgacggcgccgtcaccgtcgaacgcccggatcagcgcctgcgcgtccacgagcaccgtgcggcagagcctgatcatctgctcgagcgtctccggtagcacctccccggcgacgccgacagcgaggccgtaggcgaagcggcggtcgggaaggtcggcggggtagatcgggtcgcaggcgcgcacgcgccggagctcccggtcgggggcgtgcgccgaggcggcggtctccgagaactgggcgtggaaggaggtggttggggacgagcagagcagaggcggatgccgcgcggacgccggcgcgcgggcgtagatgaagtcgtgacccaccttggccacaacgacaaagggggatgtctcgttgagcgcggcgccctggggcgaagcggcgtcgagcacgttggacacgaaggccgcagccccgccgagcgtctcccccactatgcgcccgccccggattagcacatcgtggcagtagctccccaccaccagtccctcaagcccgggccctcccttcgtcgtaattagcagctgctgattctccctttcctcatgagcgtcgtcgggctctgccgcgagtggcatcgctgcggcggcggggggaggcgccacagttcgggggcggagagggaagcgtgggggtctcggggcggcgagagagaagagg

SEQ ID NO: 5198 - DNA, 1606 bp, Zea Mays
acgacccagaaacccgtcgaaaccccagccccaggccgccggttgctttcgcttcgccggagaagagctgagcgcgatggcagcggcgcaggaggaagcggcggcggcgccgccgagcacggagagcgatgctaccgagacggaggaggcaccaccaggcggcgcggagagcgatgctacggcgatggaagcggcggcggagtactcgtggctccagctccgcttcgaccgcccccctcgccggctctaccacttcgcccgccagttccgctccgccacttcctctggcagcaatagtagcggcgagaacttcctcaagggcgtaaagtggtcgcccgacgggtcctccttcctcaccagctccgacgataactccctccgcttgttttacttaccggaggaagcgtacattgcggcggagcccgttgccgaggccgctgtcgaaagtgaagattcttatggagctttcattcaggcgaacgagggtgagccagtgtacgatttctgctggtacccgtgtatgtccttgtctgacccagccacttgtgtatttgcaagcaccagtcgtgatcatccgatacacctttgggatgccaccagtggggaactccggtgcacataccgagcatatgatgccatggatgaaataactgctgcactttcgatttctttcaattcttcaggatctaagctatttgctggatacaacaaagctataagagtgtttgatgttcatcggcctggcagagactttgatcagtattctttactcaaggggggtgaaggaccaactggtataatatcttcaatttccttctctccacaaaatgggatgcttgctgttggttcatacagccagacaactgctgtgtatgcagagaataatatggagcctttgtatgtcttacatggccagcttggtggtgttacacaggttgtgaaagtactgtatatttgaatcttacggacggtatgaatagcagataacattgatgaaagtttcaggtgcttttttcgaaagatgggaactatctgtatactggagggcgcaaggttgtacagatcagctgatactactaatcaaagaatacattttgatattgagccctgcggtagacatctagccactggtgggcaggatggcatggtccatgtatatgaccttcaaggtggtcaatgggtaaccggctaccaagcagcagctgatactgtaaacgggttctcgttccatccataccttccatttgctgtaacatcatccgggcacagaagatttggcatgcaagatgagtttgaagacgagttaaacttggcaggtgatgagaacagctgctctgtctggatgttttcttcctcacaagaagcttgaagcatttagtgaaaatattggatcaggctgaagctaagcgaagcattggatgcacattcaaatctattgtcactttgatgttcgtgtgcagagagcatcgcggcattgaccacttcctgttgtgttggctgtaattggtgtctgcaaaatgcaaatgtattcactgagatctatagaattaatgacttatttttttgacgaaaaacaaatctagcaatagaacatttaaaaaacaaa

SEQ ID NO: 5199 - DNA, 1821 bp, Zea Mays
acgacccagaaacccgtcgaaaccccagccccaggccgccggttgctttcgcttcgccggagaagagctgagcgcgatggcagcggcgcaggaggaagcggcggcggcgccgccgagcacggagagcgatgctaccgagacggaggaggcaccaccaggcggcgcggagagcgatgctacggcgatggaagcggcggcggagtactcgtggctccagctccgcttcgaccgcccccctcgccggctctaccacttcgcccgccagttccgctccgccacttcctctggcagcaatagtagcggcgagaacttcctcaagggcgtaaagtggtcgcccgacgggtcctccttcctcaccagctccgacgataactccctccgcttgttttacttaccggaggaagcgtacattgcggcggagcccgttgccgaggccgctgtcgaaagtgaagattcttatggagctttcattcaggcgaacgagggtgagccagtgtacgatttctgctggtacccgtgtatgtccttgtctgacccagccacttgtgtatttgcaagcaccagtcgtgatcatccgatacacctttgggatgccaccagtggggaactccggtgcacataccgagcatatgatgccatggatgaaataactgctgcactttcgatttctttcaattcttcaggatctaagctatttgctggatacaacaaagctataagagtgtttgatgttcatcggcctggcagagactttgatcagtattctttactcaaggggggtgaaggaccaactggtataatatcttcaatttccttctctccacaaaatgggatgcttgctgttggttcatacagccagacaactgctgtgtatgcagagaataatatggagcctttgtatgtcttacatggccagcttggtggtgttacacaggtgcttttttcgaaagatgggaactatctgtatactggagggcgcaaggatccgtacatattatgttgggatattcgcaatactgtggacattgtttacaagttgtacagatcagctgatactactaatcaaagaatacattttgatattgagccctgcggtagacatctagccactggtgggcaggatggcatggtccatgtatatgaccttcaaggtggtcaatgggtaaccggctaccaagcagcagctggtatgtctcttctgaacatgtgtttccagaggaggtttaacagtgtgtttggttgtgaacctggcaaaaggtgctgttccaggtggctccccaggccatcgatttccagctcctggtggctggatcgacctgcctgggcgagcgccccaggccagtctcccagccaagcatgccttagtctgtctctatttctatattatatccattttaatcttatatcaacttgatcttagatactgtaaacgggttctcgttccatccataccttccatttgctgtaacatcatccgggcacagaagatttggcatgcaagatgagtttgaagacgagttaaacttggcaggtgatgagaacagctgctctgtctggatgttttcttcctcacaagaagcttgaagcatttagtgaaaatattggatcaggctgaagctaagcgaagcattggatgcacattcaaatctattgtcactttgatgttcgtgtgcagagagcatcgcggcattgaccacttcctgttgtgttggctgtaattggtgtctgcaaaatgcaaatgtattcactgagatctatagaattaatgacttatttttttgacgaaaaacaaatctagcaatagaacatttaaaaaacaaa

SEQ ID NO: 5200 - DNA, 1500 bp, Zea Mays
acgacccagaaacccgtcgaaaccccagccccaggccgccggttgctttcgcttcgccggagaagagctgagcgcgatggcagcggcgcaggaggaagcggcggcggcgccgccgagcacggagagcgatgctaccgagacggaggaggcaccaccaggcggcgcggagagcgatgctacggcgatggaagcggcggcggagtactcgtggctccagctccgcttcgaccgcccccctcgccggctctaccacttcgcccgccagttccgctccgccacttcctctggcagcaatagtagcggcgagaacttcctcaagggcgtaaagtggtcgcccgacgggtcctccttcctcaccagctccgacgataactccctccgcttgttttacttaccggaggaagcgtacattgcggcggagcccgttgccgaggccgctgtcgaaagtgaagattcttatggagctttcattcaggcgaacgagggtgagccagtgtacgatttctgctggtacccgtgtatgtccttgtctgacccagccacttgtgtatttgcaagcaccagtcgtgatcatccgatacacctttgggatgccaccagtggggaactccggtgcacataccgagcatatgatgccatggatgaaataactgctgcactttcgatttctttcaattcttcaggatctaagctatttgctggatacaacaaagctataagagtgtttgatgttcatcggcctggcagagactttgatcagtattctttactcaaggggggtgaaggaccaactggtataatatcttcaatttccttctctccacaaaatgggatgcttgctgttggttcatacagccagacaactgctgtgtatgcagagaataatatggagcctttgtatgtcttacatggccagcttggtggtgttacacaggtgcttttttcgaaagatgggaactatctgtatactggagggcgcaaggatccgtacatattatgttgggatattcgcaatactgtggacattgtttacaaatcagctgatactactaatcaaagaatacattttgatattgagccctgcggtagacatctagccactggtgggcaggatggcatggtccatgtatatgaccttcaaggtggtcaatgggtaaccggctaccaagcagcagctgatactgtaaacgggttctcgttccatccataccttccatttgctgtaacatcatccgggcacagaagatttggcatgcaagatgagtttgaagacgagttaaacttggcaggctgaagctaagcgaagcattggatgcacattcaaatctattgtcactttgatgttcgtgtgcagagagcatcgcggcattgaccacttcctgttgtgttggctgtaattggtgtctgcaaaatgcaaatgtattcactgagatctatagaattaatgacttatttttttgacgaaaaacaaatctagcaatagaacatttaaaaaacaaa

SEQ ID NO: 5201 - DNA, 1565 bp, Zea Mays
acgacccagaaacccgtcgaaaccccagccccaggccgccggttgctttcgcttcgccggagaagagctgagcgcgatggcagcggcgcaggaggaagcggcggcggcgccgccgagcacggagagcgatgctaccgagacggaggaggcaccaccaggcggcgcggagagcgatgctacggcgatggaagcggcggcggagtactcgtggctccagctccgcttcgaccgcccccctcgccggctctaccacttcgcccgccagttccgctccgccacttcctctggcagcaatagtagcggcgagaacttcctcaagggcgtaaagtggtcgcccgacgggtcctccttcctcaccagctccgacgataactccctccgcttgttttacttaccggaggaagcgtacattgcggcggagcccgttgccgaggccgctgtcgaaagtgaaggcgaacgagggtgagccagtgtacgatttctgctggtacccgtgtatgtccttgtctgacccagccacttgtgtatttgcaagcaccagtcgtgatcatccgatacacctttgggatgccaccagtggggaactccggtgcacataccgagcatatgatgccatggatgaaataactgctgcactttcgatttctttcaattcttcaggatctaagctatttgctggatacaacaaagctataagagtgtttgatgttcatcggcctggcagagactttgatcagtattctttactcaaggggggtgaaggaccaactggtataatatcttcaatttccttctctccacaaaatgggatgcttgctgttggttcatacagccagacaactgctgtgtatgcagagaataatatggagcctttgtatgtcttacatggccagcttggtggtgttacacaggtgcttttttcgaaagatgggaactatctgtatactggagggcgcaaggatccgtacatattatgttgggatattcgcaatactgtggacattgtttacaagttgtacagatcagctgatactactaatcaaagaatacattttgatattgagccctgcggtagacatctagccactggtgggcaggatggcatggtccatgtatatgaccttcaaggtggtcaatgggtaaccggctaccaagcagcagctgatactgtaaacgggttctcgttccatccataccttccatttgctgtaacatcatccgggcacagaagatttggcatgcaagatgagtttgaagacgagttaaacttggcaggtgatgagaacagctgctctgtctggatgttttcttcctcacaagaagcttgaagcatttagtgaaaatattggatcaggctgaagctaagcgaagcattggatgcacattcaaatctattgtcactttgatgttcgtgtgcagagagcatcgcggcattgaccacttcctgttgtgttggctgtaattggtgtctgcaaaatgcaaatgtattcactgagatctatagaattaatgacttatttttttgacgaaaaacaaatctagcaatagaacatttaaaaaacaaa

SEQ ID NO: 5202 - DNA, 11783 bp, Zea Mays
gaaccgtcggttcaccgggcgttcaacgagagaagacagcggagacgccgaccccgagcgagactgctcttctgattctccgtgccgggcgggctaggcagcgcggcggccgatgagattgacggcgtggcggtcgcgacaatgcaaacccctcgtccctcctacgcgcaccaccagctccagcagcacctctcctccctcctttccgccgccgccgccgatcccccgcacccctccgacgatgcctcccgcaccgccgccctctccaacctccgtctctccttcctccacccacctaaccgccccctgttacctgccctcgctcccttcctcgccccgcccctttcggtcctcctcgccgacgatgcgtcctatgccgtgcggcgggcggcggtatcggcgtacgcggcgctctgcgcggtgctgtgctcgcacgaagcgcccgggggcctgccggacgggttcgtcgcctgggcactgccgctcctgggtgacccctcctcagctgctctcgtcgccgaggggctccgggagctcctgtccactggggacgtgtccccagtcgagaggttcgtgccgcctctccttgcagcctgccgtgacgtgctagaggatgagcggatgtcgcccgctgtgctccggtgtctgctcagcctgcttatgttggttgccgccaagtttccccactgcttccgtccacagtttgttgatatcatggacctgcttcttgggtgggcgtttgtgcaggacctagctgatgcagatcgcagcatgatcattgatagttttccgcagtttcagtggcattggcttgggaatctgcagttttcacttggattactgcccaagttcttggccgatatggaggggcttgtgcatgatctcaacctgggaggcagccataatcctgggaggcttcgttcgctgtttgcttgtttctctacggtactgcagattatgtcttctggtgtggctgagcgaaataacctaagagaacttgtagctgggcctctggaaggtttagctcctcaacttttaaggtgtgcatcagtgatagcctctaaccttggctggtctgagaggatggaagacgcatccaaatgcttggtcttgcttgcagagattctgcaggaaaggtttgctgatttttatgtccattttgtggatgtgttggtccagagcttggaagttgcctcctcggcacagttggcggcagcacttaagactaacctgcaagttctatcactgcaaaatttggggctccatgcagcttctgttggagctttgcttgacttcagttcaattttatctaagtcacgtcttcatccaaaccacagcgtggttgcaaactcagcagctacctacattttttgcttacagcatggattggaagatgtagttgatcaagcaattgcatcagtgatgaatgagttggagctgataaaatctctgctagcggaagggcaagcaagttgccctgatatccatagtccccccttagaattgaacagtgaaaggaaaaacgagtcgaactcaggtgtgcattgttggccacaatattcagaggatcagttgctttgcctaatgaaatttgatctcaagattcttctggcgactattgcactggatacaaaaaagagaaatgagagaacaactaacttgatacaattcatcttaaagaagcttgacccatttggtgcccctttccataatttccttgagatgcagtttcagattttctctacactacacaaactgagcaacatggaactctcaagcaatatgccagcatctgaaccatttgaaagagactctggaggttataaaacacagccggttgtgttagaaaagaagatttcttgtgaatgtaaaaagaagtttgtgcataaatatggcaaatacatagttcagggccttaatgcatcatcatctttgacactgaaattagaggctctagattggataggttcatttgaaaaattgatccatggattggagaggggtgtggataatttcagtttctcttatgagatgaacataattatcgtaattcctcagatattgttaacatgtccaaccattgcatgaactggaggcatgtgcttgctgtgaagcaacagcctaggaaactccactggcagcagcttgtttctgttttgagttacctttctctcagattgaagttacctctttcgtcttgggtgcaacggctggtctttagttaccgtgggaagaaagatacgcgttatggtcaaattgatatgtttggagatgctgatgggaatgaactccccaaaggccctggtgtggacagaaatactattgatataatatactcagtaaataatcatgctgctgtttggtggggaatccatgaagctgcccggcactgcattaaccttcggcttcgaactcatctaggtggtcccactcagacatttgcagctctagaacgcatgcttttggatgtaacaaatgtattaatggtggaagctaaggaagctgaaggaaggtatatagggccagctgacatttgcttattgccaatgcgtcttctattggattttgttgaggcattgaaaaaatatgcttacaatgcatatgaaggttcctttgttctatcacccccaccaaaagcaagttccgtgtttttccatgcaaacaaacgagtttgtgaagagtggttttcacgaatttgtgatccaatgttgaatgcaggattagctatgcattgcagtgatgcagtcattcactattgttcactgcggctggtagatctcagaaacctggctgcatcatctctcagaggcaatagtcacatgggtggggctactgaaagtcatgcctttagagagaggttagaagcagatgttatgaaagtcctccggcatgcttccctggcactctgcagatgtcatgaaacagatgccttagttggacttcagaagtgggctgcatcaacattctattcttactttgagcaagataatcaactagttcggggcgtatctgatcgcgacaatcgcttctcctggatatcaggattgatctatcaatcccaggggcagtatgaaaaggctgctgcacattattcacatctactgcagtcggaggaagcccttatctccatgaaatctgatggcattcagtacatcatagagcgtgttattgagtgctacacatccctttcagattggaaatgcttagagagttggcttgctgagttacaagtgctccgtgctgtacacgccggcaaacctttttcaggagctctaacaagtgctggcaacgaacttaatgctatccatgcaatggcgtgctttgatgagggggactttcattcagcttggggttatcttgacctgactccaaaaagcagcaatgagctcacccttgatcccaaggttgcacttgagagaagtgaacttatgcttttgcgtggaatgctgcgatgtaatagcaagttagagggcataacagaggagcttcataaggctaaattgatgttggatgaagcactcactgttgtcccactcaatggattgcctcaagctgctgcttgcgctggccagcttcattgcatatttgcattggaagaagccttggggttgacctcccaaaatggacttaatcaatcacaatcaataatggattctttactgaaagcactgcatgatcctgtcgataaaatgcatcaagattgcaacatgtggctaaaggtcttcaaagtgtaccgtaatacacggccatcttctttatccactcttcttctctgtcagaagcttgcaagtctttctagaaagcagagcaattttatgttggctactcgtttaaatcaatacctcatagatcatcctttgaagtcatctgatgagatggacaaggaaatacttgaattgaacattaagtatgaaggtgccttgctgaagcatgcaaatggaaataatgaagaggctctatctgatctgtggtcactggtccgagctagtgttctgtctagagttagttgttcatctggcattggcacttcacattcactggttgctagggcttgtttgaaactctcaacctggatggagcaagcgaactcaagtcctttaaattcgatcattccaatggtagtaaaagatttcagcgattctgatggatttcaagatggggcagagaaacttctatctggtgatagtgtatctgtttcgactttggattatcatgcacttgctcaagaaatcataggcactgctcgaaagatatcctggcaactttgccccactatgggtaaggcttggcttgcttatgcatcctggtgctttgctcatggcagttattctctgtctggaactgattcaaatttgcagaattcactgtcccctgttcttcagtctgaactctccccgagtagatgtcatttaacagatgacgagaaatctgaggtgggtgaaataatcagaagtatctgtgctgatgaacatgcaaatcatgtgggttgtgaatacccaatgacaccagggtgttacaattctgcaccagagcaccccatatctttacttgttgaacaggcaattagtttgatagaaactgcagctggagcaccaggctttgagtcccgcgaaggtgatgatccctctgcagttctagcatcagagctggtggttctttgtaaatgtgattctggaaaggacactgcacctttgattggcaagcttactgaaatatggtggtctttaaggaaaaggagggtatcactcttcggacatgcggcacatgcttattttcagtatctttcccattcatcaactgagcttcaatcttcatatcaccatgatgctttgaaagggaaaacaagaagctacactatgcgtgcgatgctgtatctacttcacataatgttgaactatggggtggaactgaaggaaacacttgaaagtgggctttcaacagttcctttattgccatggcaggagattatacctcaactttttgcacgcttgagttcccacccagagaagatagtgagggaacttttggagagtatattgctgaagctaggaaagttatctccttgctctattgtatatcctacattggttgatatcagtgcttgcgaaggagaaccctctgaggagcttcagcgcatatcggactttatggttaagctataccccaatttaattaaagatgttaagcttgcaattgaggagctaggtatgattactgttctctgggaggaacaatggctcagcacattacaagatctccattcagatgttttgaggagaatcaatatacttaaagatgaagctgtaagggttgctgcaaattctacactgagttcggcagaaaagaacaagattaatgctgcaaaatattctgctgttatgactccaatagttgtagccttggaacgtcgtctggtgtctacatctcgtgaaccaaaaacaccccatgaaatgtggttccataaagaatacaatgctaagctgaaatctgcagtcacaacccttaagatgccccctggatctccagcagcattaggagagatttggcaaccttttgattcaattgctgcttctttagccacacatcaaagaaggtcacacataatgttaagtgaaattgctccacagctagctgttttgtcaacctctgacattccaatgcctggttttgagaagatacttggttcctcagaatccttttctggaaaccatggcattgtaaccatatcttccttctgtaaagaggtaacaatactttcaacaaagacaaggcctaagaagctcatcttgcaaggatcggatggtcagaggtacacttaccttctcaagggccgggaagatttacgccttgattcacggataatgcaactgttggaggcaataaatagcctgttgtattcgtcttccgacactcgaagtcgaaatatcacactacggttctattccgttacaccggttagtggacgagctggactgatccagtgggtggaaaatgtaagcagcatatacaatgtgtacaaatcatggcaaaagcgttcacagttggcacatgcacatgcagaggcacaagtatcttcagttagcactggtaacattcacaaccctgttgcacctgttccccgtccaagtgacatgttctatggaaagattataccagcactgaaagaaaaagggataaaaagggtagtctcacgaagagattggccattagacgttaaaagaaaagttctattggagcttatgaatgagactccgaaacagattctgtggcaagaaatgtggtgtgcaagcgaagggttcagaaactttaactccaaagtaaatagattctccaggagcgtagcagccatgagcatagttggccatatactgggtcttggagatagacatttggacaacattcttatggatttcagcaatggggatgtggttcatattgattacaacatatgctttgataaagggaagaggttgaagattccagaaattgttccattccgtctcactcaaacaattgaatcagctttaggattgactggcgtggaaggtgtttttagagttacttgtgaggaagttatgggtgtcctcttgaagaacaaagatattatcttgatgttgttggaagtatttatttgggatccattgattgagtggacacgtggaaatatccaagatgaagcaggaattgccggtgaagagaagaaaggaatggaattagcagttagtttgagcttgttctcttctagaattcaagaaattcgtgttcctttgcaggagcacaaggatcttttcttaactaatttgccagctacagtatcgtctctaaagaaattcttggatattttagatcagtatgaggttgcatcggctatattttatcatgctgagaaagagagatcaagtgttttgcagcatgaaatgtcggctaagttggtcctagctgatgctacatcgggtgctgagaaatctcgcacttcatttgaaattcatgctcacgagttagcagaagcaaaagcggcggcagttgatgaagctaacaagcttgcaatatgggtcgaaaaacatgcactggttcttgaggctatacgggagaactctgttgcgtgcattgagtcatgcatgcaattgaattgtaaggacaagacattgagccttatttcagccgtcctagaatcaggggtcccacttacagttgtaccagaaccaacaagagcgcaatgctcggaattggatagggagatttctcaattattatctgagttacagggtggactttcctctgctttagactcacttggtgaatattctttagtcttgaagcaagttcttccggttaactacatcacaaccagtccggttactagttgggcgcaagtcttgcagcgatctgtaaggagtacatcgcaagatatgctttccctggctaaaatacaggctgcagaagtcattgctaaggttcaaggtgaaggcattaatctggtgcaacaaagatatcaggatctcgtaaatcaaatggaaagttatgtttcatgtgtggagaaacttgcgagggagtgttctgaactgatgaattctattgggttgaataacgaagtgcaatcaaaagagcggatactttctgtattcatgaactctgttcagttgccttcacaaaagaaggatggtgatagtactcatttatcgcattcaggaagtcctcagcagggtgagatcaaaactccagccaagggcgatgtacaggagacaacaggtaaggtcctctctattcttgggattgctgtgagtcagctatatggtgatattagagccaaagtgtctgaactctcaattaaagctattggaaaagctaaatttaggacagatgattctggtcttcaagctgatgctggaatgagcttgcaagtatttgaacaacatatagaaaaatgtgcattaatttctggagttgttgatgaagtgcatgaagttattgggagaaccttagcagaaacaagtgctgcttatgcaaagcccagtcctaggcactgggcctctacttttcaggcagctttgcactcaagcatcaacttgattgaacaaatgactgaagcttttcttccagaatttatcagatcagttgttccacataattcagaggtaaaggaaaccgtcaggtcaatttctgaggtacgtggttctgttgataatgctctagagaagctgattgaggttgaacttgagagaacatctcttgctgaattggaacagaactactctgtgaaagttggcagaattactgagcagcaaatagctcttgaagaagctgctgcaagaggtagagaacatctatcatgggaagaagcagaggagctagcttcacaggaggaaatctgtagggctcaattggaacaattacatgaaacatggagacagaaagatatgcgtattttgtcacttatgaaagtagaagacaatatcatgaattcgctgctttcttctaaacagtatgtttcatctttggtggaccatgatcaggaaagtgagtttcattatggacaaattaaggccctcctttcaatcttcgcaaagccctttgctgacctggaatcgctggaccatatgctatcatcatctggcatgtttcctcacatagacaatcccatttccaatattaaagatgctttgtctttgggctcttcattgtctgacgtggtgtggcctttagctggcatattgaaggatcatgctttttttgtttgggaactcaatcttcttgattcggttcttgttttatgcatgcgtgagatttcatcttctcttgagcatggcattaatgccaatcaactttacatgactcttaaaaagaagcttgcgatctatgtggaaaaacaagttttccggtatgttacagaaaggattgctcctgcgctcaccctaaagttagatgaagaaattagcgctttgctgcagctgagtcaaggaataagagcatcagatcagcctaaaagagattctgctgccgttggaagggttgcattaatgcttgaggagtattgtaatgcttatgaaacagctagagctgccgggactgcagtttcgctaatgaaaaggcaattaaatgagctcactgaggctctgcgcaaaattattttggaaatagttcaggttgaatggctacatgatatttcatcgtctcatgcacagaaggtgaaggttttgtcacaaaatattcttagtgatgataagttcatctctttgatgttaaatctgagcagaagcaatttgttagataagatccaatcttctgtctcattaataacaaggtcaattgaagtcctgcaagcttgtgaaagcatttctgtttcggccgaaggacaacttgagagagcaatgggatgggcctgtgctgggccaaatacttccagtgcaggtggttcaacggcaaagggttcaggaatcccccctgaatttcatggtcatctattaaaaagaaggaaattgcttcgggtggttcaaaaagaggcatctgatcttgttaaagtttgcacctctgttttggagtttgaagcatccagagatggactttacttcgttcctgaggataaagcttccgaacaatcttcggacaaaggcagggcctggcatcaaactttcttgaatctcctggcacgtctagatgcggcatttcattcttttacatgtgcagaacaagaatggaaacttggccagctcagtctggaagctgctggaaaaggcctgttttcagctaataaccaggtttcagtagtctctgtgaaagcaaactctgctttagttaatctccaggatgttcttggtgccatgtatggtcatgcttgtgaagcaagtgcattgctatctggattcaaacatgtatcacaagactgcactgctttgacttctgaatgtggttcgttgctcgaggaggttttagctatagcagatgggttgcatgatgtatacactctggggaaggaagctgctgctgctcacagttcccttatgaccaatctttccaaggcaaatacaattttgtttccacttgaggtttgtctatgtgctgatgtaactgttatgtctgaagcgatttcaaacgaaagagagaagaacaatgctagtatgcctcttattcatggaaaggcattataccaatcttataatattaaagttagggaagcttgcaaaactttggaacctctggtgggtccactttctgacaatgcgaaggaactgcattccatggtaatgaagcttggacacctttcaagtcttcatgctgggaatcttcacaaggctctagaagttccaggagaaagggaatctatgagatcccaggatttgctctcaacacatcctgatcttttgcaaagtgattcatcaactgagaaggatagagcctctcttggcatggattctggctctccagatttggaattgaatactgacatttgtttgcaagatagatgttggatttcacctccagagcactcatatactagcagttctggatgtaccacagggttgacccagattaatccctatgacaacttagagaaaatagatgctcttatggatgatggggctgaaatagatggttctggttctactgacctggaaacaaaagacagtaatcaggaagttgaaaccgatttggtggtgggaagaattgaaagtgtggataacaacagtgcagcagccttcagacaagttagaggacaagaatgtgacaacagcgatcctaaatcctatggagactctactactcgagtgaccagaggtaaaaatccttttgccctgtccatcctgaagcaagtggagcataagttacatggacagaatatagatggcaccaggtccttgaatatttctgagcaagttgactatcttcttaaacaagcaacaagcattgacaacttatgcaatatgtacgagggatggacaccttggatatgattcaaagatgtgactttccttcattgtgcatggacaaatagtccagctgcacaaaaaaacgaaggaaccgtagcacgaccaacacatgatatggctgctatggatgctagtgaaacaggagggtttgaattcgatccagcccctcaaatgctggcaaagaagaggctccatggtacgcatgaatgttgaatggctatggattggtccaagtgaattagccaaataacaatcgagcatacacgtgcagcccatggcctggtcatatacaatatcttttctgccgaaccccatatattccgaatatcaacaatgtggaacgctaagctagtgtactgtttttgtaatcgggcttgcacatggtatgcgtcaaatgtgcaattgaacgacccagcatttgcaatttgatggggacacggtacacggcccctctggattaagagttgaagaccttgtagcgacggttgacctggccaaagaggcagagaacattgaagaaaagatgagaaggcaagttactttaggctgacccttgattgttggtctattttggacccctcttcttaagataatgatgtgcagaaaaaaaaactatcctcttttctccataggaaccttatcaactgatgtagactttatctggttcaaatataatgtacatgctgtacctatggttttggtagttcccttttgtaacatataaaggtagacccactgccagtcttccacctttgtggggtgtagtggagtaaactgaggcaggagaggctattttgaacccatgacttggttgactgagacggcgttcatcgtacatagatgttggaaatacaattt

SEQ ID NO: 5203 - DNA, 11622 bp, Zea Mays
gaaccgtcggttcaccgggcgttcaacgagagaagacagcggagacgccgaccccgagcgagactgctcttctgattctccgtgccgggcgggctaggcagcgcggcggccgatgagattgacggcgtggcggtcgcgacaatgcaaacccctcgtccctcctacgcgcaccaccagctccagcagcacctctcctccctcctttccgccgccgccgccgatcccccgcacccctccgacgatgcctcccgcaccgccgccctctccaacctccgtctctccttcctccacccacctaaccgccccctgttacctgccctcgctcccttcctcgccccgcccctttcggtcctcctcgccgacgatgcgtcctatgccgtgcggcgggcggcggtatcggcgtacgcggcgctctgcgcggtgctgtgctcgcacgaagcgcccgggggcctgccggacgggttcgtcgcctgggcactgccgctcctgggtgacccctcctcagctgctctcgtcgccgaggggctccgggagctcctgtccactggggacgtgtccccagtcgagaggacctagctgatgcagatcgcagcatgatcattgatagttttccgcagtttcagtggcattggcttgggaatctgcagttttcacttggattactgcccaagttcttggccgatatggaggggcttgtgcatgatctcaacctgggaggcagccataatcctgggaggcttcgttcgctgtttgcttgtttctctacggtactgcagattatgtcttctggtgtggctgagcgaaataacctaagagaacttgtagctgggcctctggaaggtttagctcctcaacttttaaggtgtgcatcagtgatagcctctaaccttggctggtctgagaggatggaagacgcatccaaatgcttggtcttgcttgcagagattctgcaggaaaggtttgctgatttttatgtccattttgtggatgtgttggtccagagcttggaagttgcctcctcggcacagttggcggcagcacttaagactaacctgcaagttctatcactgcaaaatttggggctccatgcagcttctgttggagctttgcttgacttcagttcaattttatctaagtcacgtcttcatccaaaccacagcgtggttgcaaactcagcagctacctacattttttgcttacagcatggattggaagatgtagttgatcaagcaattgcatcagtgatgaatgagttggagctgataaaatctctgctagcggaagggcaagcaagttgccctgatatccatagtccccccttagaattgaacagtgaaaggaaaaacgagtcgaactcaggtgtgcattgttggccacaatattcagaggatcagttgctttgcctaatgaaatttgatctcaagattcttctggcgactattgcactggatacaaaaaagagaaatgagagaacaactaacttgatacaattcatcttaaagaagcttgacccatttggtgcccctttccataatttccttgagatgcagtttcagattttctctacactacacaaactgagcaacatggaactctcaagcaatatgccagcatctgaaccatttgaaagagactctggaggttataaaacacagccggttgtgttagaaaagaagatttcttgtgaatgtaaaaagaagtttgtgcataaatatggcaaatacatagttcagggccttaatgcatcatcatctttgacactgaaattagaggctctagattggataggttcatttgaaaaattgatccatggattggagaggggtgtggataatttcagtttctcttatgaggtaatttgggatgctaccctttcgagtgatatcctttttgctgtcttggattgtgcatatgatagggagtctaaagtaaggtaccatgttgcaataaccttggagttactatttctgggaaggctcatcaaccccatgaatttctatgttgttgctcaggttctgctagacaagcttagtgatccagatagtaatgtaaaggatgcattcttaaggttattttcaatcaccttgcctatcacaacatatgcgtttggcttgtttgcagatgaacataattatcgtaattcctcagatattgttaacatgtccaaccattgcatgaactggaggcatgtgcttgctgtgaagcaacagcctaggaaactccactggcagcagcttgtttctgttttgagttacctttctctcagattgaagttacctctttcgtcttgggtgcaacggctggtctttagttaccgtgggaagaaagatacgcgttatggtcaaattgatatgtttggagatgctgatgggaatgaactccccaaaggccctggtgtggacagaaatactattgatataatatactcagtaaataatcatgctgctgtttggtggggaatccatgaagctgcccggcactgcattaaccttcggcttcgaactcatctaggtggtcccactcagacatttgcagctctagaacgcatgcttttggatgtaacaaatgtattaatggtggaagctaaggaagctgaaggaaggtatatagggccagctgacatttgcttattgccaatgcgtcttctattggattttgttgaggcattgaaaaaatatgcttacaatgcatatgaaggttcctttgttctatcacccccaccaaaagcaagttccgtgtttttccatgcaaacaaacgagtttgtgaagagtggttttcacgaatttgtgatccaatgttgaatgcaggattagctatgcattgcagtgatgcagtcattcactattgttcactgcggctggtagatctcagaaacctggctgcatcatctctcagaggcaatagtcacatgggtggggctactgaaagtcatgcctttagagagaggttagaagcagatgttatgaaagtcctccggcatgcttccctggcactctgcagatgtcatgaaacagatgccttagttggacttcagaagtgggctgcatcaacattctattcttactttgagcaagataatcaactagttcggggcgtatctgatcgcgacaatcgcttctcctggatatcaggattgatctatcaatcccaggggcagtatgaaaaggctgctgcacattattcacatctactgcagtcggaggaagcccttatctccatgaaatctgatggcattcagtacatcatagagcgtgttattgagtgctacacatccctttcagattggaaatgcttagagagttggcttgctgagttacaagtgctccgtgctgtacacgccggcaaacctttttcaggagctctaacaagtgctggcaacgaacttaatgctatccatgcaatggcgtgctttgatgagggggactttcattcagcttggggttatcttgacctgactccaaaaagcagcaatgagctcacccttgatcccaaggttgcacttgagagaagtgaacttatgcttttgcgtggaatgctgcgatgtaatagcaagttagagggcataacagaggagcttcataaggctaaattgatgttggatgaagcactcactgttgtcccactcaatggattgcctcaagctgctgcttgcgctggccagcttcattgcatatttgcattggaagaagccttggggttgacctcccaaaatggacttaatcaatcacaatcaataatggattctttactgaaagcactgcatgatcctgtcgataaaatgcatcaagattgcaacatgtggctaaaggtcttcaaagtgtaccgtaatacacggccatcttctttatccactcttcttctctgtcagaagcttgcaagtctttctagaaagcagagcaattttatgttggctactcgtttaaatcaatacctcatagatcatcctttgaagtcatctgatgagatggacaaggaaatacttgaattgaacattaagtatgaaggtgccttgctgaagcatgcaaatggaaataatgaagaggctctatctgatctgtggtcactggtccgagctagtgttctgtctagagttagttgttcatctggcattggcacttcacattcactggttgctagggcttgtttgaaactctcaacctggatggagcaagcgaactcaagtcctttaaattcgatcattccaatggtagtaaaagatttcagcgattctgatggatttcaagatggggcagagaaacttctatctggtgatagtgtatctgtttcgactttggattatcatgcacttgctcaagaaatcataggcactgctcgaaagatatcctggcaactttgccccactatgggtaaggcttggcttgcttatgcatcctggtgctttgctcatggcagttattctctgtctggaactgattcaaatttgcagaattcactgtcccctgttcttcagtctgaactctccccgagtagatgtcatttaacagatgacgagaaatctgaggtgggtgaaataatcagaagtatctgtgctgatgaacatgcaaatcatgtgggttgtgaatacccaatgacaccagggtgttacaattctgcaccagagcaccccatatctttacttgttgaacaggcaattagtttgatagaaactgcagctggagcaccaggctttgagtcccgcgaaggtgatgatccctctgcagttctagcatcagagctggtggttctttgtaaatgtgattctggaaaggacactgcacctttgattggcaagcttactgaaatatggtggtctttaaggaaaaggagggtatcactcttcggacatgcggcacatgcttattttcagtatctttcccattcatcaactgagcttcaatcttcatatcaccatgatgctttgaaagggaaaacaagaagctacactatgcgtgcgatgctgtatctacttcacataatgttgaactatggggtggaactgaaggaaacacttgaaagtgggctttcaacagttcctttattgccatggcaggagattatacctcaactttttgcacgcttgagttcccacccagagaagatagtgagggaacttttggagagtatattgctgaagctaggaaagttatctccttgctctattgtatatcctacattggttgatatcagtgcttgcgaaggagaaccctctgaggagcttcagcgcatatcggactttatggttaagctataccccaatttaattaaagatgttaagcttgcaattgaggagctaggtatgattactgttctctgggaggaacaatggctcagcacattacaagatctccattcagatgttttgaggagaatcaatatacttaaagatgaagctgtaagggttgctgcaaattctacactgagttcggcagaaaagaacaagattaatgctgcaaaatattctgctgttatgactccaatagttgtagccttggaacgtcgtctggtgtctacatctcgtgaaccaaaaacaccccatgaaatgtggttccataaagaatacaatgctaagctgaaatctgcagtcacaacccttaagatgccccctggatctccagcagcattaggagagatttggcaaccttttgattcaattgctgcttctttagccacacatcaaagaaggtcacacataatgttaagtgaaattgctccacagctagctgttttgtcaacctctgacattccaatgcctggttttgagaagatacttggttcctcagaatccttttctggaaaccatggcattgtaaccatatcttccttctgtaaagaggtaacaatactttcaacaaagacaaggcctaagaagctcatcttgcaaggatcggatggtcagaggtacacttaccttctcaagggccgggaagatttacgccttgattcacggataatgcaactgttggaggcaataaatagcctgttgtattcgtcttccgacactcgaagtcgaaatatcacactacggttctattccgttacaccggttagtggacgagctggactgatccagtgggtggaaaatgtaagcagcatatacaatgtgtacaaatcatggcaaaagcgttcacagttggcacatgcacatgcagaggcacaagtatcttcagttagcactggtaacattcacaaccctgttgcacctgttccccgtccaagtgacatgttctatggaaagattataccagcactgaaagaaaaagggataaaaagggtagtctcacgaagagattggccattagacgttaaaagaaaagttctattggagcttatgaatgagactccgaaacagattctgtggcaagaaatgtggtgtgcaagcgaagggttcagaaactttaactccaaagtaaatagattctccaggagcgtagcagccatgagcatagttggccatatactgggtcttggagatagacatttggacaacattcttatggatttcagcaatggggatgtggttcatattgattacaacatatgctttgataaagggaagaggttgaagattccagaaattgttccattccgtctcactcaaacaattgaatcagctttaggattgactggcgtggaaggtgtttttagagttacttgtgaggaagttatgggtgtcctcttgaagaacaaagatattatcttgatgttgttggaagtatttatttgggatccattgattgagtggacacgtggaaatatccaagatgaagcaggaattgccggtgaagagaagaaaggaatggaattagcagttagtttgagcttgttctcttctagaattcaagaaattcgtgttcctttgcaggagcacaaggatcttttcttaactaatttgccagctacagtatcgtctctaaagaaattcttggatattttagatcagtatgaggttgcatcggctatattttatcatgctgagaaagagagatcaagtgttttgcagcatgaaatgtcggctaagttggtcctagctgatgctacatcgggtgctgagaaatctcgcacttcatttgaaattcatgctcacgagttagcagaagcaaaagcggcggcagttgatgaagctaacaagcttgcaatatgggtcgaaaaacatgcactggttcttgaggctatacgggagaactctgttgcgtgcattgagtcatgcatgcaattgaattgtaaggacaagacattgagccttatttcagccgtcctagaatcaggggtcccacttacagttgtaccagaaccaacaagagcgcaatgctcggaattggatagggagatttctcaattattatctgagttacagggtggactttcctctgctttagactcacttggtgaatattctttagtcttgaagcaagttcttccggttaactacatcacaaccagtccggttactagttgggcgcaagtcttgcagcgatctgtaaggagtacatcgcaagatatgctttccctggctaaaatacaggctgcagaagtcattgctaaggttcaaggtgaaggcattaatctggtgcaacaaagatatcaggatctcgtaaatcaaatggaaagttatgtttcatgtgtggagaaacttgcgagggagtgttctgaactgatgaattctattgggttgaataacgaagtgcaatcaaaagagcggatactttctgtattcatgaactctgttcagttgccttcacaaaagaaggatggtgatagtactcatttatcgcattcaggaagtcctcagcagggtgagatcaaaactccagccaagggcgatgtacaggagacaacaggtaaggtcctctctattcttgggattgctgtgagtcagctatatggtgatattagagccaaagtgtctgaactctcaattaaagctattggaaaagctaaatttaggacagatgattctggtcttcaagctgatgctggaatgagcttgcaagtatttgaacaacatatagaaaaatgtgcattaatttctggagttgttgatgaagtgcatgaagttattgggagaaccttagcagaaacaagtgctgcttatgcaaagcccagtcctaggcactgggcctctacttttcaggcagctttgcactcaagcatcaacttgattgaacaaatgactgaagcttttcttccagaatttatcagatcagttgttccacataattcagaggtaaaggaaaccgtcaggtcaatttctgaggtacgtggttctgttgataatgctctagagaagctgattgaggttgaacttgagagaacatctcttgctgaattggaacagaactactctgtgaaagttggcagaattactgagcagcaaatagctcttgaagaagctgctgcaagaggtagagaacatctatcatgggaagaagcagaggagctagcttcacaggaggaaatctgtagggctcaattggaacaattacatgaaacatggagacagaaagatatgcgtattttgtcacttatgaaagtagaagacaatatcatgaattcgctgctttcttctaaacagtatgtttcatctttggtggaccatgatcaggaaagtgagtttcattatggacaaattaaggccctcctttcaatcttcgcaaagccctttgctgacctggaatcgctggaccatatgctatcatcatctggcatgtttcctcacatagacaatcccatttccaatattaaagatgctttgtctttgggctcttcattgtctgacgtggtgtggcctttagctggcatattgaaggatcatgctttttttgtttgggaactcaatcttcttgattcggttcttgttttatgcatgcgtgagatttcatcttctcttgagcatggcattaatgccaatcaactttacatgactcttaaaaagaagcttgcgatctatgtggaaaaacaagttttccggtatgttacagaaaggattgctcctgcgctcaccctaaagttagatgaagaaattagcgctttgctgcagctgagtcaaggaataagagcatcagatcagcctaaaagagattctgctgccgttggaagggttgcattaatgcttgaggagtattgtaatgcttatgaaacagctagagctgccgggactgcagtttcgctaatgaaaaggcaattaaatgagctcactgaggctctgcgcaaaattattttggaaatagttcaggttgaatggctacatgatatttcatcgtctcatgcacagaaggtgaaggttttgtcacaaaatattcttagtgatgataagttcatctctttgatgttaaatctgagcagaagcaatttgttagataagatccaatcttctgtctcattaataacaaggtcaattgaagtcctgcaagcttgtgaaagcatttctgtttcggccgaaggacaacttgagagagcaatgggatgggcctgtgctgggccaaatacttccagtgcaggtggttcaacggcaaagggttcaggaatcccccctgaatttcatggtcatctattaaaaagaaggaaattgcttcgggtggttcaaaaagaggcatctgatcttgttaaagtttgcacctctgttttggagtttgaagcatccagagatggactttacttcgttcctgaggataaagcttccgaacaatcttcggacaaaggcagggcctggcatcaaactttcttgaatctcctggcacgtctagatgcggcatttcattcttttacatgtgcagaacaagaatggaaacttggccagctcagtctggaagctgctggaaaaggcctgttttcagctaataaccaggtttcagtagtctctgtgaaagcaaactctgctttagttaatctccaggatgttcttggtgccatgtatggtcatgcttgtgaagcaagtgcattgctatctggattcaaacatgtatcacaagactgcactgctttgacttctgaatgtggttcgttgctcgaggaggttttagctatagcagatgggttgcatgatgtatacactctggggaaggaagctgctgctgctcacagttcccttatgaccaatctttccaaggcaaatacaattttgtttccacttgaggtttgtctatgtgctgatgtaactgttatgtctgaagcgatttcaaacgaaagagagaagaacaatgctagtatgcctcttattcatggaaaggcattataccaatcttataatattaaagttagggaagcttgcaaaactttggaacctctggtgggtccactttctgacaatgcgaaggaactgcattccatggtaatgaagcttggacacctttcaagtcttcatgctgggaatcttcacaaggctctagaagttccaggagaaagggaatctatgagatcccaggatttgctctcaacacatcctgatcttttgcaaagtgattcatcaactgagaaggatagagcctctcttggcatggattctggctctccagatttggaattgaatactgacatttgtttgcaagatagatgttggatttcacctccagagcactcatatactagcagttctggatgtaccacagggttgacccagattaatccctatgacaacttagagaaaatagatgctcttatggatgatggggctgaaatagatggttctggttctactgacctggaaacaaaagacagtaatcaggaagttgaaaccgatttggtggtgggaagaattgaaagtgtggataacaacagtgcagcagccttcagacaagttagaggacaagaatgtgacaacagcgatcctaaatcctatggagactctactactcgagtgaccagaggtaaaaatccttttgccctgtccatcctgaagcaagtggagcataagttacatggacagaatatagatggcaccaggtccttgaatatttctgagcaagttgactatcttcttaaacaagcaacaagcattgacaacttatgcaatatgtacgagggatggacaccttggatatgattcaaagatgtgactttccttcattgtgcatggacaaatagtccagctgcacaaaaaaacgaaggaaccgtagcacgaccaacacatgatatggctgctatggatgctagtgaaacaggagggtttgaattcgatccagcccctcaaatgctggcaaagaagaggctccatggtacgcatgaatgttgaatggctatggattggtccaagtgaattagccaaataacaatcgagcatacacgtgcagcccatggcctggtcatatacaatatcttttctgccgaaccccatatattccgaatatcaacaatgtggaacgctaagctagtgtactgtttttgtaatcgggcttgcacatggtatgcgtcaaatgtgcaattgaacgacccagcatttgcaatttgatggggacacggtacacggcccctctggattaagagttgaagaccttgtagcgacggttgacctggccaaagaggcagagaacattgaagaaaagatgagaagatagggatcgtgtggcttggatgcagcaacaccctggcgcatgcctctccatagactttccgataaaatctacttt

SEQ ID NO: 5204 - DNA, 11243 bp, Zea Mays
gcgcggcggccgatgagattgacggcgtggcggtcgcgacaatgcaaacccctcgtccctcctacgcgcaccaccagctccagcagcacctctcctccctcctttccgccgccgccgccgatcccccgcacccctccgacgatgcctcccgcaccgccgccctctccaacctccgtctctccttcctccacccacctaaccgccccctgttacctgccctcgctcccttcctcgccccgcccctttcggtcctcctcgccgacgatgcgtcctatgccgtgcggcgggcggcggtatcggcgtacgcggcgctctgcgcggtgctgtgctcgcacgaagcgcccgggggcctgccggacgggttcgtcgcctgggcactgccgctcctgggtgacccctcctcagctgctctcgtcgccgaggggctccgggagctcctgtccactggggacgtgtccccagtcgagaggttcgtgccgcctctccttgcagcctgccgtgacgtgctagaggatgagcggatgtcgcccgctgtgctccggtgtctgctcagcctgcttatgttggttgccgccaagtttccccactgcttccgtccacagtttgttgatatcatggacctgcttcttgggtgggcgtttgtgcaggacctagctgatgcagatcgcagcatgatcattgatagttttccgcagtttcagtggcattggcttgggaatctgcagttttcacttggattactgcccaagttcttggccgatatggaggggcttgtgcatgatctcaacctgggaggcagccataatcctgggaggcttcgttcgctgtttgcttgtttctctacggtactgcagattatgtcttctggtgtggctgagcgaaataacctaagagaacttgtagctgggcctctggaaggtttagctcctcaacttttaaggtgtgcatcagtgatagcctctaaccttggctggtctgagaggatggaagacgcatccaaatgcttggtcttgcttgcagagattctgcaggaaaggtttgctgatttttatgtccattttgtggatgtgttggtccagagcttggaagttgcctcctcggcacagttggcggcagcacttaagactaacctgcaagttctatcactgcaaaatttggggctccatgcagcttctgttggagctttgcttgacttcagttcaattttatctaagtcacgtcttcatccaaaccacagcgtggttgcaaactcagcagctacctacattttttgcttacagcatggattggaagatgtagttgatcaagcaattgcatcagtgatgaatgagttggagctgataaaatctctgctagcggaagggcaagcaagttgccctgatatccatagtccccccttagaattgaacagtgaaaggaaaaacgagtcgaactcaggtgtgcattgttggccacaatattcagaggatcagttgctttgcctaatgaaatttgatctcaagattcttctggcgactattgcactggatacaaaaaagagaaatgagagaacaactaacttgatacaattcatcttaaagaagcttgacccatttggtgcccctttccataatttccttgagatgcagtttcagattttctctacactacacaaactgagcaacatggaactctcaagcaatatgccagcatctgaaccatttgaaagagactctggaggttataaaacacagccggttgtgttagaaaagaagatttcttgtgaatgtaaaaagaagtttgtgcataaatatggcaaatacatagttcagggccttaatgcatcatcatctttgacactgaaattagaggctctagattggataggttcatttgaaaaattgatccatggattggagaggggtgtggataatttcagtttctcttatgaggtaatttgggatgctaccctttcgagtgatatcctttttgctgtcttggattgtgcatatgatagggagtctaaagtaaggtaccatgttgcaataaccttggagttactatttctgggaaggctcatcaaccccatgaatttctatgttgttgctcaggttctgctagacaagcttagtgatccagatagtaatgtaaaggatgcattcttaaggttattttcaatcaccttgcctatcacaacatatgcgtttggcttgtttgcagatgaacataattatcgtaattcctcagatattgttaacatgtccaaccattgcatgaactggaggcatgtgcttgctgtgaagcaacagcctaggaaactccactggcagcagcttgtttctgttttgagttacctttctctcagattgaagttacctctttcgtcttgggtgcaacggctggtctttagttaccgtgggaagaaagatacgcgttatggtcaaattgatatgtttggagatgctgatgggaatgaactccccaaaggccctggtgtggacagaaatactattgatataatatactcagtaaataatcatgctgctgtttggtggggaatccatgaagctgcccggcactgcattaaccttcggcttcgaactcatctaggtggtcccactcagacatttgcagctctagaacgcatgcttttggatgtaacaaatgtattaatggtggaagctaaggaagctgaaggaaggtatatagggccagctgacatttgcttattgccaatgcgtcttctattggattttgttgaggcattgaaaaaatatgcttacaatgcatatgaaggttcctttgttctatcacccccaccaaaagcaagttccgtgtttttccatgcaaacaaacgagtttgtgaagagtggttttcacgaatttgtgatccaatgttgaatgcaggattagctatgcattgcagtgatgcagtcattcactattgttcactgcggctggtagatctcagaaacctggctgcatcatctctcagaggcaatagtcacatgggtggggctactgaaagtcatgcctttagagagaggttagaagcagatgttatgaaagtcctccggcatgcttccctggcactctgcagatgtcatgaaacagatgccttagttggacttcagaagtgggctgcatcaacattctattcttactttgagcaagataatcaactagttcggggcgtatctgatcgcgacaatcgcttctcctggatatcaggattgatctatcaatcccaggggcagtatgaaaaggctgctgcacattattcacatctactgcagtcggaggaagcccttatctccatgaaatctgatggcattcagtacatcatagagcgtgttattgagtgctacacatccctttcagattggaaatgcttagagagttggcttgctgagttacaagtgctccgtgctgtacacgccggcaaacctttttcaggagctctaacaagtgctggcaacgaacttaatgctatccatgcaatggcgtgctttgatgagggggactttcattcagcttggggttatcttgacctgactccaaaaagcagcaatgagctcacccttgatcccaaggttgcacttgagagaagtgaacttatgcttttgcgtggaatgctgcgatgtaatagcaagttagagggcataacagaggagcttcataaggctaaattgatgttggatgaagcactcactgttgtcccactcaatggattgcctcaagctgctgcttgcgctggccagcttcattgcatatttgcattggaagaagccttggggttgacctcccaaaatggacttaatcaatcacaatcaataatggattctttactgaaagcactgcatgatcctgtcgataaaatgcatcaagattgcaacatgtggctaaaggtcttcaaagtgtaccgtaatacacggccatcttctttatccactcttcttctctgtcagaagcttgcaagtctttctagaaagcagagcaattttatgttggctactcgtttaaatcaatacctcatagatcatcctttgaagtcatctgatgagatggacaaggaaatacttgaattgaacattaagtatgaaggtgccttgctgaagcatgcaaatggaaataatgaagaggctctatctgatctgtggtcactggtccgagctagtgttctgtctagagttagttgttcatctggcattggcacttcacattcactggttgctagggcttgtttgaaactctcaacctggatggagcaagcgaactcaagtcctttaaattcgatcattccaatggtagtaaaagatttcagcgattctgatggatttcaagatggggcagagaaacttctatctggtgatagtgtatctgtttcgactttggattatcatgcacttgctcaagaaatcataggcactgctcgaaagatatcctggcaactttgccccactatgggtaaggcttggcttgcttatgcatcctggtgctttgctcatggcagttattctctgtctggaactgattcaaatttgcagaattcactgtcccctgttcttcagtctgaactctccccgagtagatgtcatttaacagatgacgagaaatctgaggtgggtgaaataatcagaagtatctgtgctgatgaacatgcaaatcatgtgggttgtgaatacccaatgacaccagggtgttacaattctgcaccagagcaccccatatctttacttgttgaacaggcaattagtttgatagaaactgcagctggagcaccaggctttgagtcccgcgaaggtgatgatccctctgcagttctagcatcagagctggtggttctttgtaaatgtgattctggaaaggacactgcacctttgattggcaagcttactgaaatatggtggtctttaaggaaaaggagggtatcactcttcggacatgcggcacatgcttattttcagtatctttcccattcatcaactgagcttcaatcttcatatcaccatgatgctttgaaagggaaaacaagaagctacactatgcgtgcgatgctgtatctacttcacataatgttgaactatggggtggaactgaaggaaacacttgaaagtgggctttcaacagttcctttattgccatggcaggagattatacctcaactttttgcacgcttgagttcccacccagagaagatagtgagggaacttttggagagtatattgctgaagctaggaaagttatctccttgctctattgtatatcctacattggttgatatcagtgcttgcgaaggagaaccctctgaggagcttcagcgcatatcggactttatggttaagctataccccaatttaattaaagatgttaagcttgcaattgaggagctaggtatgattactgttctctgggaggaacaatggctcagcacattacaagatctccattcagatgttttgaggagaatcaatatacttaaagatgaagctgtaagggttgctgcaaattctacactgagttcggcagaaaagaacaagattaatgctgcaaaatattctgctgttatgactccaatagttgtagccttggaacgtcgtctggtgtctacatctcgtgaaccaaaaacaccccatgaaatgtggttccataaagaatacaatgctaagctgaaatctgcagtcacaacccttaagatgccccctggatctccagcagcattaggagagatttggcaaccttttgattcaattgctgcttctttagccacacatcaaagaaggtcacacataatgttaagtgaaattgctccacagctagctgttttgtcaacctctgacattccaatgcctggttttgagaagatacttggttcctcagaatccttttctggaaaccatggcattgtaaccatatcttccttctgtaaagaggtaacaatactttcaacaaagacaaggcctaagaagctcatcttgcaaggatcggatggtcagaggtacacttaccttctcaagggccgggaagatttacgccttgattcacggataatgcaactgttggaggcaataaatagcctgttgtattcgtcttccgacactcgaagtcgaaatatcacactacggttctattccgttacaccggttagtggacgagctggactgatccagtgggtggaaaatgtaagcagcatatacaatgtgtacaaatcatggcaaaagcgttcacagttggcacatgcacatgcagaggcacaagtatcttcagttagcactggtaacattcacaaccctgttgcacctgttccccgtccaagtgacatgttctatggaaagattataccagcactgaaagaaaaagggataaaaagggtagtctcacgaagagattggccattagacgttaaaagaaaagttctattggagcttatgaatgagactccgaaacagattctgtggcaagaaatgtggtgtgcaagcgaagggttcagaaactttaactccaaagtaaatagattctccaggagcgtagcagccatgagcatagttggccatatactgggtcttggagatagacatttggacaacattcttatggatttcagcaatggggatgtggttcatattgattacaacatatgctttgataaagggaagaggttgaagattccagaaattgttccattccgtctcactcaaacaattgaatcagctttaggattgactggcgtggaaggtgtttttagagttacttgtgaggaagttatgggtgtcctcttgaagaacaaagatattatcttgatgttgttggaagtatttatttgggatccattgattgagtggacacgtggaaatatccaagatgaagcaggaattgccggtgaagagaagaaaggaatggaattagcagttagtttgagcttgttctcttctagaattcaagaaattcgtgttcctttgcaggagcacaaggatcttttcttaactaatttgccagctacagtatcgtctctaaagaaattcttggatattttagatcagtatgaggttgcatcggctatattttatcatgctgagaaagagagatcaagtgttttgcagcatgaaatgtcggctaagttggtcctagctgatgctacatcgggtgctgagaaatctcgcacttcatttgaaattcatgctcacgagttagcagaagcaaaagcggcggcagttgatgaagctaacaagcttgcaatatgggtcgaaaaacatgcactggttcttgaggctatacgggagaactctgttgcgtgcattgagtcatgcatgcaattgaattgtaaggacaagacattgagccttatttcagccgtcctagaatcaggggtcccacttacagttgtaccagaaccaacaagagcgcaatgctcggaattggatagggagatttctcaattattatctgagttacagggtggactttcctctgctttagactcacttggtgaatattctttagtcttgaagcaagttcttccggttaactacatcacaaccagtccggttactagttgggcgcaagtcttgcagcgatctgtaaggagtacatcgcaagatatgctttccctggctaaaatacaggctgcagaagtcattgctaaggttcaaggtgaaggcattaatctggtgcaacaaagatatcaggatctcgtaaatcaaatggaaagttatgtttcatgtgtggagaaacttgcgagggagtgttctgaactgatgaattctattgggttgaataacgaagtgcaatcaaaagagcggatactttctgtattcatgaactctgttcagttgccttcacaaaagaaggatggtgatagtactcatttatcgcattcaggaagtcctcagcagggtgagatcaaaactccagccaagggcgatgtacaggagacaacaggtaaggtcctctctattcttgggattgctgtgagtcagctatatggtgatattagagccaaagtgtctgaactctcaattaaagctattggaaaagctaaatttaggacagatgattctggtcttcaagctgatgctggaatgagcttgcaagtatttgaacaacatatagaaaaatgtgcattaatttctggagttgttgatgaagtgcatgaagttattgggagaaccttagcagaaacaagtgctgcttatgcaaagcccagtcctaggcactgggcctctacttttcaggcagctttgcactcaagcatcaacttgattgaacaaatgactgaagcttttcttccagaatttatcagatcagttgttccacataattcagaggtaaaggaaaccgtcaggtcaatttctgaggtacgtggttctgttgataatgctctagagaagctgattgaggttgaacttgagagaacatctcttgctgaattggaacagaactactctgtgaaagttggcagaattactgagcagcaaatagctcttgaagaagctgctgcaagaggtagagaacatctatcatgggaagaagcagaggagctagcttcacaggaggaaatctgtagggctcaattggaacaattacatgaaacatggagacagaaagatatgcgtattttgtcacttatgaaagtagaagacaatatcatgaattcgctgctttcttctaaacagtatgtttcatctttggtggaccatgatcaggaaagtgagtttcattatggacaaattaaggccctcctttcaatcttcgcaaagccctttgctgacctggaatcgctggaccatatgctatcatcatctggcatgtttcctcacatagacaatcccatttccaatattaaagatgctttgtctttgggctcttcattgtctgacgtggtgtggcctttagctggcatattgaaggatcatgctttttttgtttgggaactcaatcttcttgattcggttcttgttttatgcatgcgtgagatttcatcttctcttgagcatggcattaatgccaatcaactttacatgactcttaaaaagaagcttgcgatctatgtggaaaaacaagttttccggtatgttacagaaaggattgctcctgcgctcaccctaaagttagatgaagaaattagcgctttgctgcagctgagtcaaggaataagagcatcagatcagcctaaaagagattctgctgccgttggaagggttgcattaatgcttgaggagtattgtaatgcttatgaaacagctagagctgccgggactgcagtttcgctaatgaaaaggcaattaaatgagctcactgaggctctgcgcaaaattattttggaaatagttcaggttgaatggctacatgatatttcatcgtctcatgcacagaaggtgaaggttttgtcacaaaatattcttagtgatgataagttcatctctttgatgttaaatctgagcagaagcaatttgttagataagatccaatcttctgtctcattaataacaaggtcaattgaagtcctgcaagcttgtgaaagcatttctgtttcggccgaaggacaacttgagagagcaatgggatgggcctgtgctgggccaaatacttccagtgcaggtggttcaacggcaaagggttcaggaatcccccctgaatttcatggtcatctattaaaaagaaggaaattgcttcgggtggttcaaaaagaggcatctgatcttgttaaagtttgcacctctgttttggagtttgaagcatccagagatggactttacttcgttcctgaggataaagcttccgaacaatcttcggacaaaggcagggcctggcatcaaactttcttgaatctcctggcacgtctagatgcggcatttcattcttttacatgtgcagaacaagaatggaaacttggccagctcagtctggaagctgctggaaaaggcctgttttcagctaataaccaggtttcagtagtctctgtgaaagcaaactctgctttagttaatctccaggatgttcttggtgccatgtatggtcatgcttgtgaagcaagtgcattgctatctggattcaaacatgtatcacaagactgcactgctttgacttctgaatgtggttcgttgctcgaggaggttttagctatagcagatgggttgcatgatgtatacactctggggaaggaagctgctgctgctcacagttcccttatgaccaatctttccaaggcaaatacaattttgtttccacttgaggtttgtctatgtgctgatgtaactgttatgtctgaagcgatttcaaacgaaagagagaagaacaatgctagtatgcctcttattcatggaaaggcattataccaatcttataatattaaagttagggaagcttgcaaaactttggaacctctggtgggtccactttctgacaatgcgaaggaactgcattccatggtaatgaagcttggacacctttcaagtcttcatgctgggaatcttcacaaggctctagaagttccaggagaaagggaatctatgagatcccaggatttgctctcaacacatcctgatcttttgcaaagtgattcatcaactgagaaggatagagcctctcttggcatggattctggctctccagatttggaattgaatactgacatttgtttgcaagatagatgttggatttcacctccagagcactcatatactagcagttctggatgtaccacagggttgacccagattaatccctatgacaacttagagaaaatagatgctcttatggatgatggggctgaaatagatggttctggttctactgacctggaaacaaaagacagtaatcaggaagttgaaaccgatttggtggtgggaagaattgaaagtgtggataacaacagtgcagcagccttcagacaagttagaggacaagaatgtgacaacagcgatcctaaatcctatggagactctactactcgagtgaccagaggtaaaaatccttttgccctgtccatcctgaagcaagtggagcataagttacatggacagaatatagatggcaccaggtccttgaatatttctgagcaagttgactatcttcttaaacaagcaacaagcattgacaacttatgcaatatgtacgagggatggacaccttggatatgattcaaagatgtgactttccttcattgtgcatggacaaatagtccaggttacatctcaacctgtttttttgatgatgttcttgatataaaactgaagctgggatgtacatggttatcagtgacttag

SEQ ID NO: 5205 - DNA, 5525 bp, Zea Mays
gcgaggtggtactatccgaaagcgttgcgctgcgtgtggcttcgtgttctcacggcccatctgacagattctccaggagcgtagcagccatgagcatagttggccatatactgggtcttggagatagacatttggacaacattcttatggatttcagcaatggggatgtggttcatattgattacaacatatgctttgataaagggaagaggttgaagattccagaaattgttccattccgtctcactcaaacaattgaatcagctttaggattgactggcgtggaaggtgtttttagagttacttgtgaggaagttatgggtgtcctcttgaagaacaaagatattatcttgatgttgttggaagtatttatttgggatccattgattgagtggacacgtggaaatatccaagatgaagcaggaattgccggtgaagagaagaaaggaatggaattagcagttagtttgagcttgttctcttctagaattcaagaaattcgtgttcctttgcaggagcacaaggatcttttcttaactaatttgccagctacagtatcgtctctaaagaaattcttggatattttagatcagtatgaggttgcatcggctatattttatcatgctgagaaagagagatcaagtgttttgcagcatgaaatgtcggctaagttggtcctagctgatgctacatcgggtgctgagaaatctcgcacttcatttgaaattcatgctcacgagttagcagaagcaaaagcggcggcagttgatgaagctaacaagcttgcaatatgggtcgaaaaacatgcactggttcttgaggctatacgggagaactctgttgcgtgcattgagtcatgcatgcaattgaattgtaaggacaagacattgagccttatttcagccgtcctagaatcaggggtcccacttacagttgtaccagaaccaacaagagcgcaatgctcggaattggatagggagatttctcaattattatctgagttacagggtggactttcctctgctttagactcacttggtgaatattctttagtcttgaagcaagttcttccggttaactacatcacaaccagtccggttactagttgggcgcaagtcttgcagcgatctgtaaggagtacatcgcaagatatgctttccctggctaaaatacaggctgcagaagtcattgctaaggttcaaggtgaaggcattaatctggtgcaacaaagatatcaggatctcgtaaatcaaatggaaagttatgtttcatgtgtggagaaacttgcgagggagtgttctgaactgatgaattctattgggttgaataacgaagtgcaatcaaaagagcggatactttctgtattcatgaactctgttcagttgccttcacaaaagaaggatggtgatagtactcatttatcgcattcaggaagtcctcagcagggtgagatcaaaactccagccaagggcgatgtacaggagacaacaggtaaggtcctctctattcttgggattgctgtgagtcagctatatggtgatattagagccaaagtgtctgaactctcaattaaagctattggaaaagctaaatttaggacagatgattctggtcttcaagctgatgctggaatgagcttgcaagtatttgaacaacatatagaaaaatgtgcattaatttctggagttgttgatgaagtgcatgaagttattgggagaaccttagcagaaacaagtgctgcttatgcaaagcccagtcctaggcactgggcctctacttttcaggcagctttgcactcaagcatcaacttgattgaacaaatgactgaagcttttcttccagaatttatcagatcagttgttccacataattcagaggtaaaggaaaccgtcaggtcaatttctgaggtacgtggttctgttgataatgctctagagaagctgattgaggttgaacttgagagaacatctcttgctgaattggaacagaactactctgtgaaagttggcagaattactgagcagcaaatagctcttgaagaagctgctgcaagaggtagagaacatctatcatgggaagaagcagaggagctagcttcacaggaggaaatctgtagggctcaattggaacaattacatgaaacatggagacagaaagatatgcgtattttgtcacttatgaaagtagaagacaatatcatgaattcgctgctttcttctaaacagtatgtttcatctttggtggaccatgatcaggaaagtgagtttcattatggacaaattaaggccctcctttcaatcttcgcaaagccctttgctgacctggaatcgctggaccatatgctatcatcatctggcatgtttcctcacatagacaatcccatttccaatattaaagatgctttgtctttgggctcttcattgtctgacgtggtgtggcctttagctggcatattgaaggatcatgctttttttgtttgggaactcaatcttcttgattcggttcttgttttatgcatgcgtgagatttcatcttctcttgagcatggcattaatgccaatcaactttacatgactcttaaaaagaagcttgcgatctatgtggaaaaacaagttttccggtatgttacagaaaggattgctcctgcgctcaccctaaagttagatgaagaaattagcgctttgctgcagctgagtcaaggaataagagcatcagatcagcctaaaagagattctgctgccgttggaagggttgcattaatgcttgaggagtattgtaatgcttatgaaacagctagagctgccgggactgcagtttcgctaatgaaaaggcaattaaatgagctcactgaggctctgcgcaaaattattttggaaatagttcaggttgaatggctacatgatatttcatcgtctcatgcacagaaggtgaaggttttgtcacaaaatattcttagtgatgataagttcatctctttgatgttaaatctgagcagaagcaatttgttagataagatccaatcttctgtctcattaataacaaggtcaattgaagtcctgcaagcttgtgaaagcatttctgtttcggccgaaggacaacttgagagagcaatgggatgggcctgtgctgggccaaatacttccagtgcaggtggttcaacggcaaagggttcaggaatcccccctgaatttcatggtcatctattaaaaagaaggaaattgcttcgggtggttcaaaaagaggcatctgatcttgttaaagtttgcacctctgttttggagtttgaagcatccagagatggactttacttcgttcctgaggataaagcttccgaacaatcttcggacaaaggcagggcctggcatcaaactttcttgaatctcctggcacgtctagatgcggcatttcattcttttacatgtgcagaacaagaatggaaacttggccagctcagtctggaagctgctggaaaaggcctgttttcagctaataaccaggtttcagtagtctctgtgaaagcaaactctgctttagttaatctccaggatgttcttggtgccatgtatggtcatgcttgtgaagcaagtgcattgctatctggattcaaacatgtatcacaagactgcactgctttgacttctgaatgtggttcgttgctcgaggaggttttagctatagcagatgggttgcatgatgtatacactctggggaaggaagctgctgctgctcacagttcccttatgaccaatctttccaaggcaaatacaattttgtttccacttgaggtttgtctatgtgctgatgtaactgttatgtctgaagcgatttcaaacgaaagagagaagaacaatgctagtatgcctcttattcatggaaaggcattataccaatcttataatattaaagttagggaagcttgcaaaactttggaacctctggtgggtccactttctgacaatgcgaaggaactgcattccatggtaatgaagcttggacacctttcaagtcttcatgctgggaatcttcacaaggctctagaagttccaggagaaagggaatctatgagatcccaggatttgctctcaacacatcctgatcttttgcaaagtgattcatcaactgagaaggatagagcctctcttggcatggattctggctctccagatttggaattgaatactgacatttgtttgcaagatagatgttggatttcacctccagagcactcatatactagcagttctggatgtaccacagggttgacccagattaatccctatgacaacttagagaaaatagatgctcttatggatgatggggctgaaatagatggttctggttctactgacctggaaacaaaagacagtaatcaggaagttgaaaccgatttggtggtgggaagaattgaaagtgtggataacaacagtgcagcagccttcagacaagttagaggacaagaatgtgacaacagcgatcctaaatcctatggagactctactactcgagtgaccagaggtaaaaatccttttgccctgtccatcctgaagcaagtggagcataagttacatggacagaatatagatggcaccaggtccttgaatatttctgagcaagttgactatcttcttaaacaagcaacaagcattgacaacttatgcaatatgtacgagggatggacaccttggatatgattcaaagatgtgactttccttcattgtgcatggacaaatagtccagctgcacaaaaaaacgaaggaaccgtagcacgaccaacacatgatatggctgctatggatgctagtgaaacaggagggtttgaattcgatccagcccctcaaatgctggcaaagaagaggctccatggtacgcatgaatgttgaatggctatggattggtccaagtgaattagccaaataacaatcgagcatacacgtgcagcccatggcctggtcatatacaatatcttttctgccgaaccccatatattccgaatatcaacaatgtggaacgctaagctagtgtactgtttttgtaatcgggcttgcacatggtatgcgtcaaatgtgcaattgaacgacccagcatttgcaatttgatggggacacggtacacggcccctctggattaagagttgaagaccttgtagcgacggttgacctggccaaagaggcagagaacattgaagaaaagatgagaaggcaagttactttaggctgacccttgattgttggtctattttggacccctcttcttaagataatgatgtgcagaaaaaaaaactatcctcttttctccataggaaccttatcaactgatgtagactttatctggttcaaatataatgtacatgctgtacctatggttttggtagttcccttttgtaacatataaaggtagacccactgccagtcttccacctttgtggggtgtagtggagtaaactgaggcaggagaggctattttgaacccatgacttggttgactgagacggcgttcatcgtacatagatgttggaaatacaattt

SEQ ID NO: 5206 - DNA, 1756 bp, Zea Mays
ggccacaagcacgggactggcatatattatccatgtaaataaaataaagtatataaataaccccataaaaagctaccattccactacctcccaaactcgcgagcgagtcgaggctccaaccccggcacatcacaggaggaggaggacgacgcgcccaccatggccatggcgacggccctccgcaagctctccgccaacgctctgcgccgccagccgctctcccgcatcacgccgctctactacatggcgtcccttccggcgacggaggagagatccggaatcacctggactaagcagttgaacgcgccgctggaagaggtcgaccccgagattgctgacatcatcgagcacgagaaggcccgccaatggaagggtctggagctcatcccgtcggagaatttcacgtcggtgtcagtgatgcaggcagtgggttccgtcatgaccaacaagtacagcgaggggtaccctggcgcaagatactacgggggaaatgagtttattgatatggcagagtccttgtgtcagaaacgtgctttggaggctttccgtttggacccggcgaaatggggagtgaatgtgcaacctctatccggttcgcccgccaacttccatgtatacactgcactcttgaagccacatgaaaggatcatggctttggatcttcctcacggtggacatctttctcatggttaccagactgacactaagaagatatctgcaacttcaatattttttgagacaatgccttacagattggatgaaagcactggattgattgattacgatcagttggagaaaagcgctgttctttttaggccaaagttgatcattgctggtgcaagtgcatatgctcggctatatgattatgaccgtatgcggaagatatgcaacaagcagaaggcaatacttctagcagacatggcacatattagtgggcttgttgcagctggtgttgttccatctccttttgattatgcagatgtagtgactaccactactcacaaatcactccgtgggccacgtggagccatgatcttttacaggaagggagtcaaagaaataaataaacaaggaaaagaggttatgtatgattttgaggacaaaatcaatgctgctgtctttcctggtctgcaaggtgggcctcataaccataccattactggcttggctgttgcgctcaaacaggcaactactccagaatacagagcttaccaagagcaagttatcagtaattgtgctaaatttgcgcagagcctgatttcaaaaggatatgaactcgtctctggtgggactgacaaccatttagttctggtgaatctcaagaataaggggatagatggttcaagggtggagaaggttttagaaagtgtgcatattgcagcaaacaagaacacagttcctggtgatgtttcagctatggtgccaggaggcatcaggatgggaaccccagcccttacgtcgagaggatttgttgaagaagatttcgctaaagttgctgacttcttcgatgcagcagtgaatctggccttgaagattaaggctgcaacgacaggtggaacaaagctgaaggactttgttgccactttgcaatctgatagcatccaagttgagattgcaaagcttcgccatgatgtagaggaatttgcaaaacaattcccaacaattggatttgagaaagagaccatgaaatacaagaactaatatctggatgacaagttgtgaaagggggtaccggagctggaactgccgttttctt
